United States Patent Application Publication US 2024/0327476 A1 - sequence listing, part 69

SEQ ID NO: 130376 - DNA, 591 bp, synthetic construct
  misc_feature 1..591: note = Description of Artificial Sequence: Synthetic coding sequence
  source 1..591: mol_type = other DNA
atggcagtggagtttgatggcggcgtggtcatgggttctgacagtagggtgtctgcgggggaggccgtggtgaaccgcgtgttcgacaaactgtcaccccttcatgagagaatatattgtgcactaagcgggtcagccgcagacgcgcaggcagtcgcagacatggccgcctatcagctggaactgcacgggatcgaactggaggaaccccctctggttttagccgcagccaacgtggtacgaaatatctcctacaagtatagagaagatctgtccgcacatctaatggtcgctggatgggaccagagggagggcgggcaggtctacggcacgcttgggggcatgctgacaaggcaacctttcgccatcggcgggagtggatccaccttcatttatggatacgttgatgcggcctataaacccggcatgtcaccggaagagtgtagacgattcacgaccgatgctattgctcttgcgatgtctcgggatggttcttctggcggcgttatatatctcgtcaccattaccgcagcaggggtcgatcacagggtgatcctcggtaacgagttgccgaagttttacgacgagtag

SEQ ID NO: 130377 - DNA, 660 bp, synthetic construct
  misc_feature 1..660: note = Description of Artificial Sequence: Synthetic coding sequence
  source 1..660: mol_type = other DNA
atgctgcgcgccggcgcaccaacaggagatctcccccgggccggcgaggttcataccggtactactatcatggctgtcgagttcgatgggggggtggtaatgggcagcgactccagggtttccgccggagaggccgtggtgaatagggtgtttgataaactcagtcctcttcatgaacgaatatactgcgctctttctggttcggcagctgatgcacaagcagtcgcagatatggccgcttatcaacttgaactgcacggaattgagctggaagagccacctctggtgcttgcggctgctaacgtggtgcgcaacatttcttataagtacagagaggatttaagcgcccacctcatggtcgctggctgggaccagcgtgagggaggccaagtctatgggacgctgggaggtatgttaacaagacaaccatttgccatcggcggttcgggttcaacgttcatatatggttacgtggatgcggcctacaagcctggtatgtctcccgaggagtgccggaggtttacgacagacgccatcgcactggctatgtctagagatggtagttcgggcggagtgatctacctggtgaccataactgcggctggggtcgatcatagagttattcttggaaacgaactgccgaagttctacgacgagtag

SEQ ID NO: 130378 - DNA, 591 bp, synthetic construct
  misc_feature 1..591: note = Description of Artificial Sequence: Synthetic coding sequence
  source 1..591: mol_type = other DNA
atggcagtggaatttgatggcggagttgtgatggggagcgatagcagggtgtcagcaggtgaagccgttgtgaacagggtgttcgacaagctgtcacccctccacgagcacatctactgcgccctctctgggagcgccgccgacgcacaggctgtggctgacatggcagcctaccagctggagctgcacgggatcgaactcgaggagcctccattagtgctagcagcggctaatgttgtgaggaatatttcctacaagtacagagaagaccttagcgcccatcttatggttgcgggctgggaccagcgcgagggaggccaggtttacgggacattgggcggcatgcttacacggcaaccctttgccatcgggggctctggcagtacttttatttatggctacgttgatgccgcttataagccagggatgtctccagaggagtgccggcggtttacaactgacgcgatcgcgctagcaatgtcacgagatgggagctccggcggcgtcatttacctagtcaccatcaccgctgccggtgtcgatcaccgcgtgattctggggaacgagctccccaagttttacgacgagtag

SEQ ID NO: 130379 - DNA, 537 bp, synthetic construct
  misc_feature 1..537: note = Description of Artificial Sequence: Synthetic coding sequence
  source 1..537: mol_type = other DNA
atgctccgcgccggcgcccccaccggagatttgccaagggccggcgaggtccatacgggcactaccattatggccgtcgagtttgatgggggtgtggttatgggcagcgattcgcgggtatcagcggggatagagctggaggagccacccttagtgctggcagcagccaatgtagtgaggaatataagttacaagtatcgtgaggatcttagtgctcaccttatggtagcaggctgggatcagagagaaggcgggcaggtatatgggacgctgggaggcatgctaactaggcagccatttgctatcggtggcagcggatcaaccttcatttacggatacgtggacgccgcttataaacccgggatgagtccagaggagtgtcggcgcttcaccaccgacgccacctccaccaagcgcagggtctgcggatacttcctcagaacacaaaagagggagaaccagaatcagcgcgttcatgagtacatgtgtactagcgaaagatcattgagcagttctcctctgctaagctgcagttag

SEQ ID NO: 130380 - DNA, 537 bp, synthetic construct
  misc_feature 1..537: note = Description of Artificial Sequence: Synthetic coding sequence
  source 1..537: mol_type = other DNA
atgcttcgagcaggggcccccaccggtgatctgccacgcgccggcgaggtacacactgggacaacaatcatggctgtggaatttgacgggggagtggtgatgggtagcgattcacgagtgtccgccggcatcgagttagaagaacccccccttgtgctggctgccgctaacgtggttcgtaacattagctataagtacagagaggacctgtctgcacatctaatggtggctgggtgggatcaacgggaggggggccaggtctatggtacactgggggggatgttgacgaggcagccctttgccatcgggggatccggcagtacatttatttacggctatgttgacgctgcatataagcccgggatgtcccctgaagaatgtcggagatttactacagatgcgacgagtaccaagcgccgcgtgtgcggctacttcttaaggactcaaaagagggagaaccaaaatcagcgcgtgcacgagtatatgtgcacatcagaacgcagtctcagctccagtcctctgctgtcatgttcctag

SEQ ID NO: 130381 - DNA, 660 bp, synthetic construct
  misc_feature 1..660: note = Description of Artificial Sequence: Synthetic coding sequence
  source 1..660: mol_type = other DNA
atgctccgcgctggtgcacctacgggagacctgccccgagctggcgaagttcataccggaaccaccatcatggctgtggagttcgacggaggcgtcgtaatggggagcgattcacgggtgtccgccggtgaagccgtggtgaatagagtgttcgacaagctgtccccactgcatgagcatatctactgtgccttgagcggttccgctgctgacgcccaggctgtggcggatatggctgcttatcagctggagctgcacggcatcgagctggaggaacctcccctcgtgttagctgccgcaaatgtagtgcggaacatttcatataagtatcgagaagacctgagcgcgcacttgatggtggccggctgggaccagcgggagggggggcaggtatacgggacattaggagggatgttgacccggcaaccgttcgccattgggggatcagggagcactttcatctacgggtacgtggacgctgcttacaagcctggcatgtcccccgaagagtgtagacgttttactactgacgcaatcgccctagctatgtctagagacggctcctccggaggcgtgatctacctggttaccattacagccgccggtgtggaccatcgcgtgatcctgggaaatgagctgccaaaattttacgatgaatag

SEQ ID NO: 130382 - DNA, 591 bp, synthetic construct
  misc_feature 1..591: note = Description of Artificial Sequence: Synthetic coding sequence
  source 1..591: mol_type = other DNA
atggcagtggaatttgatgggggagtagtaatgggatctgactcacgggtgagcgctggtgaagccgtggtgaacagggtgtttgataaattgtcacccctccatgagcatatttattgcgcactgtccgggtcagctgctgacgctcaggctgtcgctgacatggcggcgtaccagcttgaactgcatggtatcgaactggaggagccccctctggtgctggcggcagctaatgtcgtgaggaatatttcctacaagtacagggaggatttgtccgcccatctgatggttgccggctgggaccagcgtgaggggggtcaagtttatggaactctcggtgggatgctgacccgacagcccttcgcgatcggagggtccggctctacctttatatatggttacgtcgacgcagcttacaaacccgggatgagtccagaagagtgccgcaggtttaccacagatgccattgctttggcaatgagcagagacggaagctctggcggtgttatatacctcgtgaccattactgcagccggtgtagaccaccgagtaattctgggcaacgagctgcctaaattctatgatgaatag

SEQ ID NO: 130383 - DNA, 660 bp, synthetic construct
  misc_feature 1..660: note = Description of Artificial Sequence: Synthetic coding sequence
  source 1..660: mol_type = other DNA
atgctccgggccggtgccccaacaggtgacctcccgcgggcaggcgaggtgcacaccggaaccacaatcatggccgttgagttcgatgggggtgtggttatggggagtgacagtcgtgtatcagcaggggaggccgtggtgaaccgcgtctttgataagctgagcccactgcatgagcatatatactgcgccctctctggtagcgctgcagacgcacaggctgtagcagatatggcagcctatcagctggagctgcacggaatcgagctggaggagcctcctcttgtcctggctgccgcaaacgtcgtgcgcaacatctcttataaataccgcgaagatctttctgctcatttgatggtggctggttgggaccagcgggagggcggccaggtgtacgggacactgggtggaatgctgactagacaaccctttgctatagggggatcgggttcaacctttatttacggctacgtggatgccgcatacaagcccggtatgagcccagaagaatgcagaagatttaccacagacgccatcgctctcgccatgagccgcgacggctcaagcggtggtgtgatctacctggtcacaataacagctgcaggagtcgatcacagggtgatcctgggaaatgagctacctaaattttatgacgaatag

SEQ ID NO: 130384 - DNA, 396 bp, synthetic construct
  misc_feature 1..396: note = Description of Artificial Sequence: Synthetic coding sequence
  source 1..396: mol_type = other DNA
atggccgtggagttcgacggaggggtggtgatggggtccgacagccgagtctctgcaggagaggctgttgtgaacagagtcttcgacaaactgtcccctctacacgagagaatctactgcgctttatcagggtccgctgcggacgcccaggctgtggcagatatggcggcctatcagctggaactacatgggattgagctcgaagaaccccccttggtgctggcggctgctaatgtcgtccgcaacatctcttacaagtatcgtgaagacctcagcgcccatctgatggtcgctggatgggatcagagggaagggggacaggtttacggaacactgggaggtatgttgactcggcaaccgtttgcaataggaggaagcggaagcacattcatttag

SEQ ID NO: 130385 - DNA, 396 bp, synthetic construct
  misc_feature 1..396: note = Description of Artificial Sequence: Synthetic coding sequence
  source 1..396: mol_type = other DNA
atggccgtcgaattcgatggtggcgtggtgatggggtccgattcaagggtgtctgcgggcgaggccgtcgttaacagagtgtttgacaaactgtcgccactgcatgagcacatctactgcgccctgtcggggtccgccgccgacgcacaggcagtggccgacatggcagcctatcagctcgagcttcatggcatcgagcttgaagaaccaccattggtcctggccgcagcaaacgttgtgcgaaacatatcctacaaatatagggaggacctgagcgctcatctcatggtcgctggatgggatcagagagaaggcggtcaggtttacggaacacttggcgggatgctgaccaggcagccttttgcaatcggaggatcgggaagcacttttatttag

SEQ ID NO: 130386 - DNA, 591 bp, synthetic construct
  misc_feature 1..591: note = Description of Artificial Sequence: Synthetic coding sequence
  source 1..591: mol_type = other DNA
atggctgtggagttcgacgggggcgtggtgatggggtccgattccagagtgagcgccggcgaagctgttgtgaacagggtgtttgacaagctatctcccctccacgagcacatttattgtgctctaagcggctctgctgccgacgcccaggctgtagccgatatggcagcctaccaattggagctgcatggaatcgaactggaggagcctccacttgtgctcgctgctgctaacgtcgtgagaaacatctcttacaagtaccgggaagatctcagcgcccacctgatggtcgccggatgggaccagcgagagggaggtcaagtttatggtactctgggcggaatgttgacccgccaacctttcgctatagggggctcaggctccacttttatttacgggtacgtggacgctgcatataagcccgggatgagtcctgaggaatgccgccgatttactacagatgccatcgcccttgccatgtcacgtgacggctctagcggcggtgtcatttaccttgtcacaataactgctgccggggttgatcacagagtgattctgggaaacgagttacccaaattttacgacgaatag

SEQ ID NO: 130387 - DNA, 660 bp, synthetic construct
  misc_feature 1..660: note = Description of Artificial Sequence: Synthetic coding sequence
  source 1..660: mol_type = other DNA
atgttaagggcaggagccccaaccggtgacttgcccagggctggagaggttcacacaggcaccactatcatggctgtcgagttcgacggtggggtcgtgatgggctcggactccagggtaagcgccggggaagctgtggtcaatcgagtctttgacaaactgtcccctctgcacgagcgcatctattgcgctctgagcggatcggctgctgacgcccaggcagttgctgacatggctgcctatcaactggagttgcacggaatagagctggaagagcctccactggtgctcgcagcagcgaatgtggttcgtaacatttcctacaagtatcgggaagatctgagtgcccacctgatggttgcaggctgggatcagcgtgagggcgggcaggtctatggtaccctgggcggcatgctcacaaggcagccctttgcaatcggcggctcgggttctacattcatatacgggtacgtggatgccgcctacaagcctgggatgtctcctgaagagtgtcggcgatttacaacagacgctattgctcttgctatgtctagagacggtagttcagggggtgtcatctatctcgtgactattactgcagcaggtgtggatcacagggtcattctcggtaatgaactccctaagttctacgacgaatag

SEQ ID NO: 130388 - DNA, 537 bp, synthetic construct
  misc_feature 1..537: note = Description of Artificial Sequence: Synthetic coding sequence
  source 1..537: mol_type = other DNA
atgcttcgggcaggagctcccactggagatttgccccgcgccggcgaggtgcacaccggcactacgataatggccgtcgaattcgatggcggagtggtaatgggtagcgattctcgggtgagcgcaggtatcgaactggaagaaccccccttggtccttgctgccgccaatgtcgtgagaaacatcagctataagtatagagaggacttgtccgcgcacctgatggtggcaggctgggatcagcgcgaggggggtcaggtgtacggcacactcggaggaatgttaactcgccagcccttcgctatcggcggatcaggctccacctttatctatggctacgtcgacgccgcctacaaacccggtatgtccccagaggagtgtagacgctttaccaccgacgctactagcaccaagcgtcgcgtctgcggatatttcctgcggacccagaagcgagaaaaccagaaccagcgcgtgcatgaatacatgtgtacgggagagcggtcactgtcaagtagcccactgctgtcttgtagttag

SEQ ID NO: 130389 - DNA, 537 bp, synthetic construct
  misc_feature 1..537: note = Description of Artificial Sequence: Synthetic coding sequence
  source 1..537: mol_type = other DNA
atgctgcgggcaggggctcctactggcgaccttccacgcgccggcgaagtccacacaggcactaccatcatggctgtagagtttgatgggggtgtggtaatgggatccgattcccgggtgagcgccggaatagaactggaggagcctcctctcgtactggccgctgcaaatgtggtgcgcaatataagctataaatatcgtgaggatctctcggcacacctgatggtagccggctgggaccaacgggaagggggtcaggtgtacggcaccttaggagggatgctgacaagacagcccttcgctatcggcggcagtggtagcactttcatctatggatacgtcgatgctgcctataaacctggcatgagccccgaagagtgcaggcggtttacgactgacgccacatccaccaagaggcgtgtgtgcgggtactttcttcgtacacagaagagagagaatcaaaaccaaagagttcacgagtacatgtgtactggcgagagatctctgtcttccagccccctgctcagttgctcttag

SEQ ID NO: 130390 - DNA, 591 bp, synthetic construct
  misc_feature 1..591: note = Description of Artificial Sequence: Synthetic coding sequence
  source 1..591: mol_type = other DNA
atggccgtggagttcgatggcggagttgtgatggggagcgacagtagagtgagtgcaggagaagctgtcgtgaacagggtgttcgacaaactttcgccacttcacgagcgaatttactgtgccttgtcaggttctgcagcagacgcccaggcagtcgccgatatggccgcctaccagctggagctgcacggcatcgaactcgaggaacctcctctggtattggccgctgcaaatgtggtgcgcaacatatcgtataaatatagagaagatttgagtgcacacttaatggttgcgggttgggaccagcgagaaggcggccaggtgtatggcacccttggcggcatgttgacccggcagccatttgctataggtgggtccggctccacatttatatacggctacgtcgacgcagcctacaagccgggaatgtctcccgaggagtgtaggcgcttcacaactgacgcaatagctcttgccatgagtagagacggctctagtggtggcgtcatctatttggtgaccatcaccgctgccggtgtggatcaccgggtcatactaggaaatgaacttccgaaattttacgatgaatag

SEQ ID NO: 130391 - DNA, 660 bp, synthetic construct
  misc_feature 1..660: note = Description of Artificial Sequence: Synthetic coding sequence
  source 1..660: mol_type = other DNA
atgctgcgagccggagctccaacaggagatttaccccgggcaggagaagtccacaccgggactactatcatggccgtggagtttgacggtggagtcgttatgggctcagattcaagagtgtccgccggtgaggcagtggtgaacagggtattcgacaagctgagcccactccacgaacacatctactgtgctctcagcggtagcgccgcagacgcgcaggcggtggcagacatggccgcataccagctggagctccacgggattgaattagaagaaccacctctggttcttgcggccgccaatgtggtgaggaatatctcgtacaagtaccgcgaggatctgtcggctcatctgatggtggcaggatgggaccagagagaaggagggcaggtgtatggcactttgggtggaatgctgactcggcaaccttttgccatcggggggagtgggtcaacttttatctatggatacgtagacgctgcctataagccaggaatgagcccagaagagtgccggcgctttaccacagatgcaattgcactggcgatgagcagggacggtagtagtgggggggtgatctatctggttactattacagcagccggtgtcgaccatagggtgatcctgggtaatgaattgcctaaattttacgatgagtag

SEQ ID NO: 130392 - DNA, 465 bp, synthetic construct
  misc_feature 1..465: note = Description of Artificial Sequence: Synthetic coding sequence
  source 1..465: mol_type = other DNA
atgctccgggctggagcccctacaggcgatctcccacgcgcgggagaagtgcatacagggacgactatcatggccgttgagttcgacggcggcgtggttatgggatccgatagccgagtcagtgcagggatagaactcgaggagcctccacttgtccttgctgctgcgaacgtggtacgaaacatcagttacaaatatcgagaggacctgtccgctcatcttatggtggccggatgggaccagcgggagggagggcaggtgtacggaactcttggcggtatgctgaccagacagccttttgccatcggcggcagcggctcgaccttcatctatgggtatgtggatgctgcatataagccagggatgtctcccgaggaatgccgccggttcacgactgacgggaatcagccatctgggcgcgttcccggtgagggcttcgagacatgggaggggagccgcttatag

SEQ ID NO: 130393 - DNA, 396 bp, synthetic construct
  misc_feature 1..396: note = Description of Artificial Sequence: Synthetic coding sequence
  source 1..396: mol_type = other DNA
atggctgtggagttcgacggtggggttgttatgggcagtgacagccgcgtatccgctggcgaagcagttgtcaacagggtatttgacaaattgagcccattacatgagcatatctattgcgccctcagcgggtcagcagctgatgcccaagccgtcgccgacatggccgcctaccagctggaactccacggtatagaactggaagagccacccctggtcttggcggcagcgaacgtcgttcggaatatatcttataagtatcgcgaggacctttcggcgcacctgatggtggcaggatgggatcagagagaaggcggccaggtctatgggacactgggggggatgctgacaaggcagcccttcgccatcgggggttccggatctactttcatctag

SEQ ID NO: 130394 - DNA, 465 bp, synthetic construct
  misc_feature 1..465: note = Description of Artificial Sequence: Synthetic coding sequence
  source 1..465: mol_type = other DNA
atgctgagagccggcgcccctactggagacttaccccgtgccggtgaggtccatacaggaactacaatcatggctgttgagttcgacggcggggtagttatgggtagtgatagtagggtcagcgctggtattgaattggaagagcctcccctcgttttagctgcagcaaatgtggtgagaaatatctcctataaatatcgtgaagatctgagcgctcacttaatggtggctgggtgggaccagagagagggtggtcaggtgtatggtacattgggtggcatgctcacaaggcagccttttgctatcggaggaagcgggtcgacattcatttacgggtatgttgatgccgcctataagcccggcatgtctcccgaggagtgccggcggtttacgaccgatgggaatcaaccctccggacgtgtgcccggtgaggggtttgagacgtgggaggggagcaggctgtag

SEQ ID NO: 130395 - DNA, 465 bp, synthetic construct
  misc_feature 1..465: note = Description of Artificial Sequence: Synthetic coding sequence
  source 1..465: mol_type = other DNA
atgctgagagctggggccccaacaggcgatttaccgcgagctggggaagttcataccggaaccaccatcatggccgtagagtttgatggtggcgttgtcatgggctcagattccagagtgtctgcaggtattgaactcgaggaaccacctctcgtgctggcggccgcgaatgtcgtaaggaatattagctacaagtatagagaagatctatccgcccacctcatggtcgccgggtgggaccagagggaaggtggccaagtctatggcaccctaggcggtatgttgacgcgacagccatttgccatcggcgggagcgggagcacttttatctacggctatgtggatgccgcctataaacctggcatgtcgcccgaagaatgccgacgattcacaaccgacggtaaccagccatccggccgtgttccgggcgaggggttcgagacctgggagggatcccgcttatag

SEQ ID NO: 130396 - DNA, 465 bp, synthetic construct
  misc_feature 1..465: note = Description of Artificial Sequence: Synthetic coding sequence
  source 1..465: mol_type = other DNA
atgctgagagccggcgcgcctactggagacctgccccgggccggcgaggtgcacaccggcactaccattatggctgtggagttcgacggtggcgtggtgatgggatccgactcccgagtgagtgcaggaatagagctcgaagagccaccactggtgctggccgccgcaaacgtcgtcagaaatatctcttacaaatatcgcgaagacctgtctgcacacttaatggtggccggatgggatcaacgcgaaggcgggcaggtctacggaaccctaggaggtatgcttacacgccaaccattcgcaattgggggaagcggctcaactttcatctatgggtacgtcgatgccgcctacaaacctggcatgtcgcctgaagagtgccggagattcactacagacgggaaccagccctccggccgcgtgcccggcgaaggcttcgaaacatgggaaggtagtaggctatag

SEQ ID NO: 130397 - DNA, 465 bp, synthetic construct
  misc_feature 1..465: note = Description of Artificial Sequence: Synthetic coding sequence
  source 1..465: mol_type = other DNA
atgttgcgtgcaggtgcccccaccggggacttgccccgagcaggcgaagtgcacacaggcaccacgatcatggccgtggagttcgacggcggagtggtcatggggagcgacagccgggtaagcgctggaattgaactcgaggaacctcctttggtgctggccgcagccaacgtagtccgaaacatttcctataaataccgcgaagacctatccgcccatctgatggtggcagggtgggatcaacgtgagggcgggcaagtctatggcaccctgggcggtatgcttacccgacagccctttgccattggcgggtcgggatccaccttcatatacggctacgttgacgcagcctacaaacccgggatgtcgcctgaggaatgcagacgtttcacgacagacggaaatcagccgtccggcagagtgccaggggagggcttcgaaacctgggaggggtcccgtctctag

SEQ ID NO: 130398 - DNA, 465 bp, synthetic construct
  misc_feature 1..465: note = Description of Artificial Sequence: Synthetic coding sequence
  source 1..465: mol_type = other DNA
atgcttcgcgccggtgctccaactggcgacctgccaagggccggagaggtgcacactgggaccacaatcatggctgtggagtttgatgggggagttgtcatgggaagtgacagccgggtgtccgccggcatagagctcgaggaaccgccccttgtgctggcagcagccaatgtagttaggaacatctcttacaaatatcgggaagacctttccgcccatcttatggtcgccggatgggatcagagagagggcggacaagtgtatgggactctcggcggtatgctgacacggcagcccttcgcgatcggtggatccgggagtacattcatttatggatatgtagacgcggcatacaagccaggtatgtcccctgaagaatgccggagatttactaccgacggtaaccaaccatccgggagagtgcccggggaggggttcgagacttgggagggcagccgattgtag

SEQ ID NO: 130399 - DNA, 465 bp, synthetic construct
  misc_feature 1..465: note = Description of Artificial Sequence: Synthetic coding sequence
  source 1..465: mol_type = other DNA
atgctgcgggcaggcgcacctaccggcgatctccccagggctggagaagtgcatacgggtaccaccataatggccgtcgagtttgatggaggggttgtaatgggttcagattctcgtgtttcagctggaattgagctcgaagagcctcctctggttctggcagcagccaatgtggtccggaatatcagttacaaatatagggaagatctgtcggctcatttaatggttgccggttgggatcagagggagggaggtcaagtttacggcactctgggtgggatgctcactcggcagccttttgcaattgggggctcaggcagcacgtttatttacgggtacgtggacgccgcttacaaacccggcatgagtccagaggagtgtcggagatttacaaccgacggcaatcagccctcaggcagggtgccgggggagggcttcgaaacgtgggaagggtctaggctgtag

SEQ ID NO: 130400 - DNA, 465 bp, synthetic construct
  misc_feature 1..465: note = Description of Artificial Sequence: Synthetic coding sequence
  source 1..465: mol_type = other DNA
atgcttcgagcaggcgctcccactggagatctccccagggccggggaggtacacaccggcacaactatcatggccgtggaattcgatggaggtgtggttatgggctctgatagcagggtctcagctgggattgagctcgaggagcctccactggtgctcgccgctgcaaacgtcgttcggaacatttcctataaataccgtgaggatctgagcgcacacctgatggttgccggatgggatcagagggaaggtgggcaagtgtacggcacactaggaggtatgctgactaggcagcctttcgccatcggcggcagtggtagcacttttatctacggctacgtagatgccgcttacaagcccggaatgtctcccgaggagtgccggcggtttaccaccgatggcaaccagccctctggacgcgtaccaggcgagggctttgaaacatgggaggggtcacgtctgtag

SEQ ID NO: 130401 - DNA, 426 bp, synthetic construct
  misc_feature 1..426: note = Description of Artificial Sequence: Synthetic coding sequence
  source 1..426: mol_type = other DNA
atgaacgctaggggacttgggagtgagttaaaggattcaatccccgtgaccgaactgtctgctagcggtcccttcgaatcccacgatctgctgcgcaaggggttctcctgcgttaaaaatgagctactgccgtcccatccactcgagttaagtgaaaagaactttcagctcaatcaggataagatgaacttcagcaccttgcgcaatatccaaggtttgttcgccccgttgaaactgcagatggagttcaaagcagtacagcaggttcagcgactcccatttttgagcagtagcaatctcagtctcgatgtgctccgcggaaatgacgaaacaatcggctttgaagatattcttaatgacccttcacagagcgaagtcatgggtgagccgcatctcatggtggaatacaagcttgggctgctctag

SEQ ID NO: 130402 - DNA, 471 bp, synthetic construct
  misc_feature 1..471: note = Description of Artificial Sequence: Synthetic coding sequence
  source 1..471: mol_type = other DNA
atgccaatggccgggctgctcaaaggccttgtgcgacagctggaaagattcagcgttcagcagcaggcctccaagatgccacctaaaggcaagtctggttctggaaaggcagggaaggggggagctgccagcggctccgactccgcagataagaaggcccagggcccaaaaggcggcggaaacgccgtgaaagtcagacacatcctttgtgagaaacacggaaaaatcatggaggctatggagaagctaaagagcggtatgagatttaacgaggttgccgcccaatattccgaggacaaggcgcggcaggggggagacctgggatggatgacaagaggcagcatggtgggccctttccaagaggcagcctttgccctgcccgtatccggtatggacaaacccgtctttacagacccacctgtgaagaccaagttcggatatcatatcattatggtggagggccgcaaatag

SEQ ID NO: 130403 - DNA, 402 bp, synthetic construct
  misc_feature 1..402: note = Description of Artificial Sequence: Synthetic coding sequence
  source 1..402: mol_type = other DNA
atgccaatggctggcctacttaagggactggtgcgccagctggaacgcttttcagtgcagcaacaggcttcaaaaatgccccctaaaggaaaatccggatcgggtaaggccggaaaggggggggccgcctccggctcagactctgcagataagaaggcccaggggcccaaggggggaggcaacgcagttaaggtgagacatatactctgcgagaagcatggcaagataatggaggccatggaaaagctcaaatcagggatgcgatttaacgaagtggctgctcagtattccgaagataaagctaggcaggggatcccctcactccaacagcacgctggacatcatcgggatctgcggtccaccctaatctcgctggtatcctacctgcagaccacgccatag

SEQ ID NO: 130404 - DNA, 1062 bp, synthetic construct
  misc_feature 1..1062: note = Description of Artificial Sequence: Synthetic coding sequence
  source 1..1062: mol_type = other DNA
atggcagctgcggaagcagccaactgcattatggaggtgagttgtggacaggcagagagctctgagaagcccaatgcagaagacatgacgagtaaagactattattttgactcttacgcacactttggcatccacgaggagatgctcaaggacgaggtccggaccctgacatatagaaactcaatgttccataacagacacctcttcaaggataaggtagtactggatgtgggctctggtacaggtattctctgtatgttcgctgcaaaggccggtgcgagaaaagtgatcggaatcgaatgttctagtattagcgattatgcagtgaaaatcgtaaaggccaataagctggatcacgtggtgactattatcaagggcaaagtggaagaggtggaactgccagtggaaaaagtggatatcatcatatccgaatggatgggctactgtctgttctacgaaagcatgcttaatacggttctgtatgcccgtgataagtggctggccccagacggactgatcttccctgaccgggctacattgtacgttaccgccattgaggatcgtcagtacaaggattacaagatccattggtgggaaaacgtctacggctttgacatgtcatgcatcaaggacgtagctataaaggaaccgctggtcgatgtggttgaccccaaacagctggtaaccaacgcctgcctgattaaagaggtggacatatacactgtcaaggtggaggatttaacctttaccagccccttctgccttcaggtgaagaggaacgattatgtgcatgccctcgtggcttacttcaacatcgaattcaccaggtgccataagcggacaggattttctactagtccagaatctccgtacactcattggaaacagaccgtattttacatggaagactacctgactgtcaaaaccggagaagagatcttcggcaccatcggtatgcgtcccaatgcaaagaataacagggatctggatttcaccattgacctggatttcaagggtcagctctgcgagctcagttgctccaccgattatcgaatgaggtag

SEQ ID NO: 130405 - DNA, 882 bp, synthetic construct
  misc_feature 1..882: note = Description of Artificial Sequence: Synthetic coding sequence
  source 1..882: mol_type = other DNA
atggtgggggtcgcagaagtgagctgcgggcaagccgaatcctctgaaaaacccaacgccgaggatatgacatccaaggattattatttcgatagctatgcgcacttcgggatccacgaggagatgctgaaagatgaggtgagaaccctcacctaccgtaactcaatgtttcacaaccgtcacctgttcaaggataaggtcgtgctcgatgtgggttctggtaccggaatactgtgcatgtttgctgctaaggctggtgcgcggaaagttattggcattgagtgttcatctatctcggactacgccgtgaaaattgtgaaggccaataaactggaccacgtcgtgaccatcatcaagggaaaggtggaggaagttgagcttccggtggagaaggtggatattattatcagcgagtggatgggatactgcctgttttacgaatcaatgctgaacacggtactttacgcccgagacaaatggctggcacccgacggccttatatttcccgaccgggcaaccctgtatgtcaccgcaatcgaggatagacaatataaagattataagattcactggtgggaaaacgtatacggcttcgacatgtcatgtatcaaagacgtcgccataaaggaaccactggttgacgttgtcgaccctaagcagctcgtgaccaacgcctgtctgattaaggtccggggatgggcttggcccggagccccgtgggttgagactaaagaacgccccagccctggacccggaatggggctatggggccctgagtgctggccagaagtgagtgagccggacctacctgctcggggaggagccaggggaccagggaaaaccctcaggcccctgaacatattcgtgagtgctgctgtctag

SEQ ID NO: 130406 - DNA, 1116 bp, synthetic construct
  misc_feature 1..1116: note = Description of Artificial Sequence: Synthetic coding sequence
  source 1..1116: mol_type = other DNA
atggcggcagcagaggcagctaactgtataatggagaacttcgtagccaccctggccaacgggatgtcgctccagcctccactggaggaagtatcatgtgggcaggctgagtcttccgaaaagcccaatgccgaggacatgacgtcaaaggactactatttcgacagctatgcacacttcggcatccatgaggagatgttgaaggacgaagttcgaactctgacataccgcaatagtatgttccacaatcgccacctattcaaagacaaggtcgttcttgacgtggggtccggcacaggaatactgtgcatgtttgcagcaaaggctggtgccaggaaagtgatcggcattgaatgttcatccatctctgattacgccgtgaaaattgtgaaagccaataaacttgaccatgtggtaacaattatcaagggaaaggtagaagaagtcgaattacctgtggagaaggtagacattattatttcagaatggatgggttactgtcttttttacgagtccatgttaaacactgtgttatacgctcgcgacaagtggctggcgcccgacggactgatctttcctgatcgggcaaccctatatgtgacggccattgaggacaggcagtataaggattataagatccattggtgggagaacgtgtatgggttcgatatgtcttgtattaaggacgtggcaattaaagagcccttggtcgatgtcgtagatccaaaacagctggtgactaacgcttgcctaataaaagaagtggacatctatacggtaaaggtagaagatctcactttcacctcgcccttttgtttgcaggtgaaaaggaacgactacgttcatgcattagtagcctatttcaatatagaatttaccagatgccacaagcgtacaggatttagcacttcaccagagtcaccctatacccactggaaacagaccgtcttttatatggaggactatctgaccgtgaaaacgggagaggagatcttcggaacaattggtatgcgcccaaatgccaagaacaatagagacctggattttaccatcgacctcgacttcaagggccagctttgcgagctaagctgctccacagactaccgtatgcggtag

SEQ ID NO: 130407 - DNA, 483 bp, synthetic construct
  misc_feature 1..483: note = Description of Artificial Sequence: Synthetic coding sequence
  source 1..483: mol_type = other DNA
atgacctctaaagattattattttgattcctacgcccatttcggtattcatgaggagatgcttaaagatgaggtccgcacgttaacttaccggaattcaatgttccataatcggcacctctttaaggacaaggtggtcctagatgtgggctcggggactggtattctatgtatgttcgcagctaaagctggcgcccgcaaggtcattggaatcgagtgcagttctatttctgattatgcagttaaaatcgtaaaggcaaataagctggatcacgtggtgaccatcatcaagggtaaggtcgaagaggttgagttaccagtggagaaggtcgatatcattatctccgagtggatgggctattgcctgttctacgagagcatgctgaataccgtcctttatgccagggacaagtggctggccccagacggactcatcttccctgacagagcgacgctctatgtgactgcgattgaggatcgctag

SEQ ID NO: 130408 - DNA, 618 bp, synthetic construct
  misc_feature 1..618: note = Description of Artificial Sequence: Synthetic coding sequence
  source 1..618: mol_type = other DNA
atgacgagcaaggattactactttgactcctatgcccatttcggcatccacgaggagatgttaaaagacgaagtccgcactctgacttacagaaattctatgtttcataaccgccatttgttcaaggataaagttgttctggatgtgggcagcggtacaggaatattatgtatgttcgccgccaaagctggtgcaaggaaggttattggaatcgagtgttcaagtataagtgattacgctgtcaaaattgtgaaggccaataaactggatcatgtggtcactattatcaaaggcaaggtggaagaggtagagctcccagttgaaaaggtcgacattatcatctccgagtggatgggttattgtcttttctatgagagcatgctgaatacggtgctttacgcaagagacaagtggcttgcgcccgacggtctgattttccccgatagagcaaccctttatgtcaccgcgatagaggaccgccaatacaaggactataaaatacattggtgggagaatgtctacggcttcgacatgagctgtattaaggatgttgctataaaagaacctctggtcgacgtagttgaccccaagcagctcgtaaccaacgcatgtctctag

SEQ ID NO: 130409 - DNA, 483 bp, synthetic construct
  misc_feature 1..483: note = Description of Artificial Sequence: Synthetic coding sequence
  source 1..483: mol_type = other DNA
atgaccagtaaggattattactttgattcctacgcccatttcggaatacatgaagaaatgctcaaagacgaagtgcggactctgacgtaccgcaacagcatgttccacaatcgtcacttattcaaggacaaggtggtgttggacgttgggtcagggacagggatcctctgcatgtttgctgcgaaagccggagccagaaaggtgataggcattgaatgtagctccatcagtgactacgcagtgaaaatagttaaggccaacaaactggatcacgtcgtcacaattatcaagggcaaagtggaggaagtggaactccctgtggaaaaggttgatataatcatcagcgagtggatgggttattgcttgttctatgaaagtatgctcaacactgtgctgtatgcgagggataaatggctggcaccagacgggcttattttcccagaccgggcaactctctatgtgacagcaatcgaggacagatag

SEQ ID NO: 130410 - DNA, 630 bp, synthetic construct
  misc_feature 1..630: note = Description of Artificial Sequence: Synthetic coding sequence
  source 1..630: mol_type = other DNA
atgacaagcaaagattactacttcgactcatacgcccattttggcatccatgaagagatgctgaaggacgaggtgaggacgttgacctaccgaaactccatgttccataatcgacacttgttcaaggacaaggtggtgctggacgtgggctctggcactggaattctgtgcatgttcgccgcaaaagccggtgcccgaaaggtgataggcatcgaatgctcatctataagcgattacgctgttaagatcgtgaaggcaaacaagctcgaccacgtcgtcacaatcatcaagggcaaagtcgaggaagtagaactgcccgtggaaaaagttgatatcattataagcgaatggatgggatattgtctgttctacgagagtatgctgaacaccgtactgtacgcgcgcgataagtggctcgctccggacggacttatctttccagatagagccacgttatacgtgaccgccattgaggatcgacaatacaaggactataaaatccactggtgggaaaatgtgtacggattcgatatgtcatgcattaaggatgtcgcgatcaaggagccactggtggatgtggtggatcccaagcagttagtaacaaatgcttgcctgatcaaggtgagatag

SEQ ID NO: 130411 - DNA, 687 bp, synthetic construct
  misc_feature 1..687: note = Description of Artificial Sequence: Synthetic coding sequence
  source 1..687: mol_type = other DNA
atggctacatctggggattgtcctagaagcgagagccagggagaagagcctgctgagtgtagcgaagccggtctattgcaggagggggtgcagccagaagagttcgtggcaattgcagactacgccgctaccgatgagacacagcttagctttctgaggggtgagaagatcttgattttgcgtcaaaccactgctgactggtggtggggcgagagggccggatgctgcggctatattccagccaatcacgtaggtaagcacgtagatgagtacgatcctgaggacacttggcaagacgaagagtacttcgggagctacggcacgttaaagctccatttggaaatgcttgccgatcagcccagaactaccaaataccactctgtgatcctgcagaataaagagtctttgactgacaaagtgattcttgatgtcggctgcgggacaggaatcattagccttttctgtgcacattacgcgagacccagagccgtctatgccgttgaagccagcgagatggcgcagcacacagggcagctggtcctgcaaaatggctttgccgacatcattaccgtgtaccagcagaaggtcgaagacgttgtactccctgaaaaagtggatgttttagtttcagagtggatggggacatgcctgctcgtcggggaaaaagtgttccctatctggcggtag

SEQ ID NO: 130412 - DNA, 855 bp, synthetic construct
  misc_feature 1..855: note = Description of Artificial Sequence: Synthetic coding sequence
  source 1..855: mol_type = other DNA
atggccacaagtggagattgcccacggtccgagagccagggcgaagaaccagctgagtgctccgaagcggggctgctccaggaaggagtgcagcccgaggagtttgtagctatagctgactacgcggcgaccgacgagacgcagctaagtttcctccgcggcgagaaaattttgatactccgccaaacaacggccgattggtggtggggcgagcgtgcaggatgttgtgggtatataccagccaaccatgtgggtaagcacgtggatgagtacgaccccgaggatacatggcaggatgaggagtattttggttcctatggaacactgaagttgcatctagaaatgctggccgatcagccgcgcacaactaaataccacagtgtgatcctgcagaacaaggaatccttaacggataaggtgatacttgacgttggatgcggcacagggatcatcagcttgttttgcgcccattacgccaggccacgagccgtctatgctgtggaagctagtgaaatggcccagcacaccggtcagctggtattacagaacgggtttgctgacattatcacggtttaccaacagaaggtggaggacgtagttctgcctgagaaggttgatgtgctggtgtctgaatggatggggacttgtctgctcgccgcacctcttttgtcttgtaggatactcccctgtacctgtgctagcggacccctgcatgtgctcttagcttgctgtcttccacttccttgtacatgcgcttcggttcctctgcacgtactgttagcttgctgcctgccggtactcagagctcctcaaccctccggattgcacctgagctggcctattttcttgctgtag

SEQ ID NO: 130413 - DNA, 1302 bp, synthetic construct
  misc_feature 1..1302: note = Description of Artificial Sequence: Synthetic coding sequence
  source 1..1302: mol_type = other DNA
atggcgacttccggcgattgcccccgatctgagagccaaggggaagaacccgccgaatgttctgaggcgggacttttgcaagaaggcgttcaacccgaagaattcgtcgccattgccgattatgccgccacagatgaaacacaactatccttcctgaggggggagaagattctgatcctgagacagactaccgctgactggtggtggggtgagagagcaggctgctgcggatatatccccgcaaatcacgtagggaagcatgtagatgagtacgatcctgaggacacatggcaggatgaggaatattttggatcatacggcacgttaaagcttcacctggaaatgctggccgatcaaccaaggaccacaaagtatcattcggtaattctgcagaataaagaatctctcacggataaagtcatcttggatgttggttgcggaactggcataatcagtctcttttgcgctcactacgctcgaccccgtgcggtctacgcagtcgaggcctccgaaatggctcagcacaccggacagctggtcctccaaaacgggtttgcagatatcataactgtttaccagcagaaagtggaggatgttgtgctgcctgaaaaggttgacgttcttgtttctgaatggatgggaacctgcctgctctttgaatttatgatcgagtcaatactgtacgccagggatgcctggctgaaagaggatggcgtcatatggcctacaatggctgctctgcatctggtgccctgttcagctgataaagattacagaagtaaggtgctcttctgggacaatgcttatgagttcaatctctcagcattgaaaagtcttgccgtaaaggagttcttctccaagccaaaatataatcacatacttaagccagaagactgcctttcagagccttgcaccatactgcagttggacatgcgaactgtgcagatcagtgacttggagactttacggggtgaactcagattcgatattaggaaggccggcaccttacatggtttcactgcctggttctcagtgcattttcagagcctgcaggaggggcagcccccgcaggtgctgtcaactggcccgtttcatcccaccacgcactggaagcagaccttgttcatgatggatgatccagtgccagtccatacaggagacgtagtaactggttctgtagtgttacagagaaatcctgtctggcggcgacatatgtctgtggccctgtcctgggctgtgacctcaagacaagacccaactagccagaaggtgggagaaaaggtgtttccaatctggcgatag

SEQ ID NO: 130414 - DNA, 486 bp, synthetic construct
  misc_feature 1..486: note = Description of Artificial Sequence: Synthetic coding sequence
  source 1..486: mol_type = other DNA
atgttggccgatcagcctcgaactacaaaataccatagtgtgatcttacagaacaaagaaagtctgagaatcaagtcctcctggacatgggccgttggcctcggttctagcgttagttcagttcatacgatgcgcggactagaacgtgtatacgctgtggaagccagcgagatggcccagcatacaggtcagctcgtactgcagaacggattcgctgatatcatcaccgtataccagcaaaaagtggaagatgtggtgctgcctgagaaagtggacgtgctggtgagtgaatggatgggaacttgcctgctatttgaatttatgatcgagagtatcttgtacgcccgggacgcctggttgaaggaaactgggtcttttggccctccatggctcaggtgtacgttgtgtcctgcagtcctcattcggatcattgtggccagatgttcttctggcacgaccagaacctcttctacttccgccttgtag

SEQ ID NO: 130415 - DNA, 1302 bp, synthetic construct
  misc_feature 1..1302: note = Description of Artificial Sequence: Synthetic coding sequence
  source 1..1302: mol_type = other DNA
atggccacttccggggactgcccacgctcggagagccagggagaggaacccgcggagtgttccgaagcgggcctgctccaggagggggtccagcctgaggagttcgtagcgattgcggactacgccgccactgacgagacccagctgtccttcctgcggggcgagaagatattaatactgcgccagacaacagctgactggtggtggggcgaaagggctggctgctgcgggtatatacctgcaaaccacgtgggcaagcacgttgatgagtacgaccctgaagacacctggcaggacgaggaatatttcgggagctacggcactttgaagttgcaccttgaaatgctggccgatcagcctaggaccaccaagtaccacagtgtcattctacaaaataaagaatcgctgacagataaagtgatcctggatgtcggctgcggaaccggtattatttctctgttctgcgctcactatgcccgccccagagcagtttatgctgtcgaggcctctgaaatggcacagcatacaggacaacttgtgctccagaatggctttgcagatatcattaccgtgtatcaacaaaaggtggaagacgtggtgttgccagaaaaagtcgacgtactggtctctgagtggatgggaacatgcctgctgttcgaatttatgatcgagagcattctctatgccagggacgcttggttaaaggaggatggcgttatctggccaacaatggctgctctgcaccttgtgccatgttctgcagataaggattacaggagcaaagttctgttttgggacaatgcttatgagttcaacctgtctgctctaaagagtctggccgtaaaggagttcttctccaagcctaagtacaaccacatcctcaagcccgaggattgtctaagcgagccctgtaccattctacagcttgatatgcgaaccgtgcagatctcagaccttgaaacacttagaggagagctgaggtttgatatccgcaaagctggtaccctgcatggattcaccgcctggttcagtgtgcatttccagtcgctgcaggaaggacaacctccgcaggtgctctccactggaccatttcacccaacgacacattggaaacagacgctcttcatgatggatgatcctgttcccgtgcatacaggagacgtcgtgaccgggtctgtggtactccagaggaaccctgtgtggcgaagacacatgtctgtcgccttgagttgggccgttacatcacgccaggaccctacctctcaaaaggttggcgaaaaggtgttccctatctggaggtag

SEQ ID NO: 130416 - DNA, 1302 bp, synthetic construct
  misc_feature 1..1302: note = Description of Artificial Sequence: Synthetic coding sequence
  source 1..1302: mol_type = other DNA
atggccacatcaggggattgcccaaggagtgaatcccagggcgaagagccggcggagtgttcggaggccggcctgttgcaggagggagttcagcctgaggagttcgtggctattgcagattatgccgccaccgacgaaacacagctctcatttttgagaggcgaaaaaattttgatactgcgccagaccaccgccgactggtggtggggagagagggctgggtgctgcggctacattccagccaaccatgtgggaaagcacgtagatgaatacgatcccgaggatacctggcaagacgaggagtatttcgggtcgtatgggactttaaagttgcacctcgaaatgctggccgatcagccgagaactaccaaatatcacagtgtcattctccagaacaaggagtctttgacagataaagtcattctcgacgtgggatgtggcactgggatcatctctctgttttgcgcacattacgctcgcccacgcgccgtctatgctgtggaggcatcggaaatggcccagcacactgggcagctggtgctgcaaaatgggtttgcggatattattacggtataccagcaaaaggttgaggatgtagtcttacctgagaaagttgatgttctggtcagtgagtggatgggcacctgcctgctgttcgaattcatgatcgagtcaattttgtatgcccgtgacgcgtggctgaaggaagatggggttatttggcctacgatggcagccttgcacctggtcccgtgctcagccgataaagattaccgctctaaggtcctcttttgggataatgcatatgaatttaatctgagtgcattaaaaagcttggcggtgaaggagttcttttctaagcccaagtataatcacattcttaaaccggaggactgcctgtccgagccgtgtactatcctgcaactcgatatgcgcaccgtgcagatcagcgatttggagaccctcaggggagagctgcgtttcgacattcgcaaggcaggcaccctccacggcttcacagcctggttcagcgtgcacttccagtccctccaggagggacagcctccacaggtgctgtccacggggccgttccacccaactactcattggaaacaaacgctgttcatgatggacgatccagtaccagtgcacaccggggacgtcgtgactgggtccgtagtcctgcagcggaatcctgtgtggcgtcggcacatgagcgtggcactgtcctgggctgtgacctctcggcaagatccgacaagccagaaagtcggggagaaggtgtttcctatttggcgctag

SEQ ID NO: 130417 - DNA, 996 bp, synthetic construct
  misc_feature 1..996: note = Description of Artificial Sequence: Synthetic coding sequence
  source 1..996: mol_type = other DNA
atggccacctccggcgattgtcccagatccgaatcccaaggggaggagcccgcagaatgttctgaagcaggcctgctgcaagaaggcgtgcagccagaagagtttgtcgccatagctgactacgctgctaccgacgagacccagttgtccttccttcggggggagaaaatcttgatcctccggcagacgactgctgactggtggtggggcgagagggctggctgttgcggctatattcctgcaaaccacgtgggtaagcacgtggatgaatacgatcctgaggatacatggcaggatgaggaatattttggctcgtatggcactttgaagctccatcttgaaatgctggccgatcaaccacgtactactaagtaccatagtgtcatcttgcagaacaaggaatcattgactgataaagtcatcttagacgtcggatgtggaaccggcattatttcactcttctgcgctcattacgcacgccctcgggctgtgtatgcagttgaggccagtgagatggcacaacacactggccagctggtgctgcagaacggtttcgccgacatcataacagtgtaccagcagaaggttgaagacgtcgtcctgccagagaaagtggacgtcctggtgtcggaatggatgggcacttgtctccttaccctgaggggcgaattgagattcgacattagaaaggccggcacactgcatggcttcacagcctggttttcagtgcacttccagtccctgcaggaagggcagcccccccaagtgctttccacaggccctttccacccaacaacccactggaaacagacgctctttatgatggacgaccctgttcctgtgcacacgggggacgtggtcaccggctccgtcgtgttgcaacgcaacccggtttggagaagacatatgtcagttgctttaagttgggcagtgactagcagacaagatccaacttcacaaaaagtgggagaaaaagtgttccccatatggagatag

SEQ ID NO: 130418 - DNA, 870 bp, synthetic construct
  misc_feature 1..870: note = Description of Artificial Sequence: Synthetic coding sequence
  source 1..870: mol_type = other DNA
atggcaaccagcggggattgtccacggtcagaatctcagggtgaggagccggcagagtgtagtgaagccggcctgctacaggaaggtgtgcagcccgaggagtttgtggcgatcgctgactatgcagccaccgatgagacccagttatccttcctgcggggtgaaaaaatcctcattctgcggcaaacgacggcggattggtggtggggggaaagagccggatgctgcggctatattccagcaaatcacgtggggaagcatgtcgatgagtacgatccggaagacacctggcaggacgaggagtatttcgggagttacgggactttgaagctacatctggagatgttagcagatcaaccccggaccaccaaataccacagcgtgatcctgcaaaataaggagtcactaacagataaggtgattctcgacgtgggatgcggcacagggatcatcagtctcttttgcgctcattatgcccgtccacgggcggtgtatgcagttgaggcttcggaaatggctcaacataccggacagttagtcctccagaacgggttcgccgacattatcaccgtttatcagcagaaagtggaggacgtggtgctacccgagaaagtagacgtgctcgtatccgaatggatgggaacatgtctactgttcgaatttatgatcgagtcaatcctttatgcgagagatgcctggctcaaagaggacggcgtgatttggcctaccatggccgccctccacttggtgccatgttcagcagacaaggactacaggagcaaggtgttattctgggacaacgcttatgagttcaatctgagcgctttgaagctggagaaaaaatcctcgcccagtggggatgactcgtag

SEQ ID NO: 130419 - DNA, 906 bp, synthetic construct
  misc_feature 1..906: note = Description of Artificial Sequence: Synthetic coding sequence
  source 1..906: mol_type = other DNA
atggctacatccggcgattgtccgaggtcagaaagtcagggtgaggagccggccgagtgctctgaagcaggtttactccaagaaggcgtacagcccgaagaatttgtcgctattgcagactatgccgcaaccgatgaaacccagctgtctttcctgcgcggcgagaagattctcattctgcggcaaacaactgccgactggtggtggggagaacgagcaggatgttgcggttacatccccgccaaccacgtagggaagcacgtcgacgaatacgatcctgaggacacctggcaagatgaggagtacttcgggtcttacgggacactgaagctgcatctggaaatgttagctgatcagccacggacgacaaaatatcactcggtcatactgcagaacaaggaaagcctgacagataaggtgatcctcgatgtgggatgcggcaccggaatcatcagcctgttttgtgcacattatgccaggccgagagctgtttacgcggtcgaagcgagcgagatggcgcagcacaccggacaacttgttctgcagaacggatttgccgatatcattactgtatatcagcaaaaagtggaggatgttgttctccctgagaaagtggacgtactggtgtcagagtggatgggcacttgcctcttgcatcatacactggaagctgacgcagttcatgatggtaggcctagcccttgcccctatcgcaggcgcggccatggattttcctgcgtggcagagaagcctagcgtagagaaagcccatgtgtgtggtagtgagctaggctgtcactttcagacaagacctcacatctcgaagagctggaggaaaagtttaccgcatctggagatgacagtagatgcattatttggcaagcagtgcgcttatctggaggggtag

SEQ ID NO: 130420 - DNA, 951 bp, synthetic construct
  misc_feature 1..951: note = Description of Artificial Sequence: Synthetic coding sequence
  source 1..951: mol_type = other DNA
atgatcgccgaccgggtgcgcaccgatgcatacaggctaggcattctgagaaactgggcagcacttcgtggcaaaactgtgctcgacgtgggggctggaaccggtattctgtcgatcttctgtgcacaagccggagccaggcgcgtttatgccgttgaggccagcgccatatggcagcaggctcgggaggtggtgaggttcaacgggttagaagatagagtgcacgttctccctggtcctgtggaaacggtggaactgccagagcaggttgatgcaatagtgtccgagtggatgggatacggcttgttgcatgaatccatgctttcatcagtgctgcacgcccggactaaatggctgaaagaagggggactgttgctacctgccagcgcagaactatttatagcgcccatttcagaccagatgttggaatggcggctcggcttctggtctcaggtgaaacaacactacggagtggacatgagttgccttgaaggatttgctaccagatgcctgatggggcattcggagattgtagtgcagggcttgtcgggagaagatgtcctcgcccgccctcagcgtttcgcacagctggagctctcaagggccggcctggaacaggaactagaggctggcgttggaggacgctttcgctgcagctgttacgggtcggcccctatgcatggctttgccatttggttccaggtgactttccccggcggcgagtccgagaaacctttagtgctctccacatcgcctttccatcctgccacccactggaagcaggcactgttatatctcaatgagccagtgcaggtggagcaggacaccgatgtgagcggagagattacccttctcccttcacgggataaccctcgtcgcctacgggtgctgctgcggtacaaggtgggagaccaggaggagaaaaccaaggacttcgctatggaggactag

SEQ ID NO: 130421 - DNA, 1128 bp, synthetic construct
  misc_feature 1..1128: note = Description of Artificial Sequence: Synthetic coding sequence
  source 1..1128: mol_type = other DNA
atgtcacagcccaagaagaggaaattggaaagcggaggcgggggcgaagggggagagggcaccgaggaagaagacggggcagaaagggaggctgctctggagaggcctcgccgaaccaaacgtgagcgcgaccaactctattatgagtgttatagcgatgtctccgttcatgaagaaatgatcgccgacagagtccggactgacgcctatcgcttggggatactgcgtaattgggcagcactgcggggtaagactgtcctagatgtgggcgctggcaccggaatcctaagcattttttgcgcccaggcaggagctcggcgtgtgtacgccgtggaagctagtgccatttggcaacaggcaagagaggtcgtcaggttcaatgggctcgaggatcgagtccacgtgttgcccggccctgtcgagaccgtcgagctcccagagcaagtggatgccatagtgtcggaatggatgggttacggcctgctgcatgaatcgatgctgtccagtgtattacatgccaggacgaagtggctgaaagaaggaggcctgctgctccccgcgtccgcagagctttttattgcccctatctctgaccagatgctggaatggcgcctcggcttttggagccaggtcaagcagcactacggtgtggatatgtcctgcctcgagggcttcgcgaccagatgtctgatggggcatagcgagattgtcgtgcagggccttagcggagaagacgtgttggctcgtccacaacgtttcgctcaacttgagctcagcagagcggggttagaacaggagttggaggctggggtgggaggtcggtttagatgctcgtgttacggctcggcccctatgcatggattcgccatctggttccaggtgacgtttccggggggggagtcagagaaaccattggtacttagcactagcccgttccatcctgctacccattggaagcaggcccttctctacctgaacgaaccagttcaggtggagcaggatactgacgtcagcggcgaaatcactctgctcccttccagagataaccctcgccggttgcgagtccttctgcgctacaaagttggcgatcaggaggagaagaccaaggatttcgcgatggaagattag

SEQ ID NO: 130422 - DNA, 936 bp, synthetic construct
  misc_feature 1..936: note = Description of Artificial Sequence: Synthetic coding sequence
  source 1..936: mol_type = other DNA
atggcccggtccggaaggcgaccctggtcagatccaggcgggctgtctggcgctgtgcaaagggcagggggtccgggcgcacggccggccggcacttcgggggactgtagagtggccggcactgggggatgccacagagaaagggtggatggactacggacgccagctcgggtgcacgctgaactgcgacctcccagggctaatcaggtggcagagggtgggcgctcatctcccgccgggctgaggagggcgctgcattctccacaccagagaccagacgcaggcatggctcccggcctgctggaacctggtgaggccgccttgtggtgcggtcatgagctccccggggggctgagacatgctctcagtcacgggccactgggcgaccgttgtgcaggcatagtgcgcagaggcagagccggccccgctgcagccttatgcagcgccagagctcttcccagacgactcggagccggtgcgggagggcgaagtggccgggcactgcctctgcagctcctttggcttggtgcccatgcttggctgtgccacttggtgcccggcgacctgccttggaggggagtgggtgaaacacccggggccgtgcatcttgcattctctcctgggcacagcttagaaaccggtgccccactcccagagcgcgcgggagcttccggggccagacatggccgctttcgtcgggatcacgccgccgccctgcccggacagccgccttcaccagctagggccgcggctctacagtctggaaggcctgggggagaggaccagaggttgtgtcatggagggttgtcagtagccttctctccatcctacctgccaaagcaacccgatctgcggggacgtggagtcgctcgcagcgaggggaaaggacggtcccacgttcaagtgggtggaatcagcccgccgtttccttcatag

SEQ ID NO: 130423 - DNA, 2532 bp, synthetic construct
  misc_feature 1..2532: note = Description of Artificial Sequence: Synthetic coding sequence
  source 1..2532: mol_type = other DNA
atggccaagcccttgactgactcagagaaacgaaagcagattagtgtgaggggactggctggcctcggggacgtcgccgaagtgcggaagtcttttaacaggcatctgcattttaccctagttaaggatcgtaacgtagctactcctcgcgattatttcttcgcgctcgcacataccgtacgggatcacctcgttggtaggtggattcggactcagcagcattactatgagagagacccgaagagaatctattatcttagtctcgagttttatatgggacggacactgcagaacacgatggtgaacctgggccttcagaacgcttgcgacgaggccatctatcagcttgggcttgacctggaggagctcgaggaaatcgaagaggatgctggcctcggcaatggagggttggggaggctggcagcatgcttcctagattctatggccactttgggactcgccgcatacggctacggtattaggtacgaatttggcatctttaatcagaaaatagtgaacggctggcaagttgaggaggctgacgactggctcaggtatgggaatccgtgggaaaaagctaggcccgaatacatgctgcccgttcacttctatggccgggttgagcataccccagacggggttaaatggcttgatacccaggtcgtgctggctatgccttacgacacacctgtgcctgggtacaagaacaacactgtcaacaccatgcgcctttggtccgcaaaggctccaaatgactttaagctacaggacttcaatgtgggagattacatcgaggctgtgctcgaccgcaacctcgcggagaatatctcccgggtgctgtatcccaatgacaatttttttgaggggaaagagctacgcctgaagcaggaatatttcgtcgtcgccgcgactctgcaagatattatccgaaggtttaaaagctcaaagtttggctgccgagatccagtgcgaacctgctttgagactttccctgacaaggtagctatccagctaaatgatacccatccagccctatcaatccccgaactcatgcggatcctcgtggatgtagaaaaagttgattgggataaggcttgggagattactaaaaaaacatgcgcctacactaatcatacagtgctacccgaggccctggagcgatggcccgtgtccatgtttgagaaacttctgccacgacatctggaaataatctacgccatcaatcaacgacacttagatcatgtggccgctctgtttccaggagatgtcgaccggctgcgacgtatgagcgtgatagaggagggtgattgtaagcgaatcaatatggctcacctctgcgtgatcggctcccatgctgtcaatggcgttgcacggattcacagcgaaattgtgaagcagagcgttttcaaagacttctacgagctcgaacccgagaagttccagaataaaactaacggcatcacgcctcgacggtggctgctgctgtgtaaccctgggctggctgacacgattgtggaaaagatcggcgaagaatttctgactgacttgtcccagttaaagaaactcctgcccttggtgtcagacgaggtgttcattcgagatgtagccaaggttaagcaagagaataaattaaaattcagcgcttttctggagaaagagtataaggtgaaaatcaacccctcttccatgtttgacgtgcacgtgaagcggatccacgaatacaaaagacaactgttgaattgtttgcacgtggtgaccctttacaaccgcattaaaagagaccccgcaaaagcttttgtgccccgcacagtaatgatcggagggaaggccgcgcctgggtaccacatggctaagctaatcattaagctcgtgaccagtattggggatgtcgttaatcatgatcccgtggtgggcgaccgcctgaaggtcatttttttggagaattacagggtgagcctggccgagaaggttataccagccgctgatcttagtcaacagatatcaacggccgggaccgaggcatctggcaccgggaatatgaagtttatgctgaatggagcactgactatcgggacgatggacggcgcgaatgtcgaaatggcagaagaagctggagccgagaacctgtttatttttggtttgagagtggaagacgtggaggcattggatcggaagggatataatgcacgggaatattatgaccacctgccggagctgaagcaggcagtggaccagataagctcgggctttttctctccaaaggaaccagactgtttcaaagacattgttaacatgttaatgcaccacgaccgatttaaagtgtttgccgactatgaggcctacatgcaatgccaggctcaggtcgatcaactttacagaaaccctaaggaatggaccaaaaaagtaatacggaatattgcttgctcaggtaaatttagtagcgatagaaccattaccgaatacgcacgggagatctggggcgtggaaccttcggacctccagattccaccacctaatatccctagagattag

SEQ ID NO: 130424 - DNA, 717 bp, synthetic construct
  misc_feature 1..717: note = Description of Artificial Sequence: Synthetic coding sequence
  source 1..717: mol_type = other DNA
atgctgaccaccctgctccctattttattattatctgggtgggcattctgctcccaagatgcctccgacggcttacagcgactgcatatgctgcagatttcatattttcgggacccttaccatgtgtggtatcaaggcaatgcatctctggggggacatctgacccatgttctcgagggccccgacaccaataccactataatccagttgcagccactgcaagaacctgagtcctgggccagaacacagtctgggctgcagagctacctgctgcaatttcatggattggtgcgactggtgcaccaggaacgaaccctagcctttccgctaacaataaggtgcttcctgggatgcgagttgcctcccgaaggttcgagggcccatgtgttcttcgaggtagcagtgaacggaagcagctttgtgtcattccgccccgagcgagccctctggcaggcggacactcaggttacctccggagttgttacctttaccctgcagcagctgaatgcatacaaccgcacgcggtatgagctgcgggagttcctcgaagacacttgtgtgcagtatgttcaaaaacatatcagtgccgaaaacaccaaaggttcacagactagcaggtcatatacctctttggtcctcggcgtgttagtcggcagctttattattgctggcgtggcggtgggcattttcctctgcacaggagggcgccggtgttag

SEQ ID NO: 130425 - DNA, 4551 bp, synthetic construct
  misc_feature 1..4551: note = Description of Artificial Sequence: Synthetic coding sequence
  source 1..4551: mol_type = other DNA
atggacaatcagcaggataaggcgatcgttgcttcagcaaatggagagaacaccctgattaatggtgtgaaagaaaatgacagtgaggatcaggacgtcgccatgaaatcattcgcagcgctggaggctgccgccccgatacagcctacacctgtcgcccaaaaggagactctcatgtacccacgaggactgctgccattaccttctaagaagccctgtatgcagagccccccatccccactgggccttattgaggcaccggagcacgcagccaattccgcctcagtcaatgcgatctcacttacctcagggatcgcgaagggcctgaacacctggtcactgccaaacgaatgtgaaaaggcaccctttgcgataatggaaccggccgggatgtctgctctcaacggagattgcctgatgcagccaagtaggacatgtttgggctgcttcatggagtccaaggatgccgttgatcccgagccaggtatcagtctgaaggttggcgacctgaaccgtgattacgagacatgcgccgtgtcagacattggcattcagtgtatcaatgccggtgaaaatatgaaatacggagagcagctcttgtcagaccagctccttggctttccattacacaagtcaagagcaggagatcgtcgggaaaccgaaaagccagatattgatttggaggatcccgcacagaaaagctattacgaggccctgctcctggataaatgtaacaccgaggaggcgttactggccaactctaaccaagactgggggtattttgagactttcatcagcgaaagcaaaatagaactgcttgatctctgctctaaaaacgaattatcagtgaacctcttctctgaggaagacgtcgataactacatgtttgatgatgatgagtccacgctggggtccgatgtttgctctctcaagatcaggtatgaatccttccaggacaatgtgagggacaagacaaccttgctgatgcaggaagatgcccagttcaatttttttccctccgtgttcactacatgccctaaaagagaatctaagagcggtgccctcaagcagtcgtcagatttttcccagttcaaagtccctgacgtgtcaatcatttggggggaggaggacaagaacctggacaagaagaaaggcaaggaggaggggcaggaggacaagggagtcgaaaaaaaggatggaaaggacaacggtgaaaagcctgccttgaacaaaccatgctcggggaccgaggtggagcagttgaaaaatccgaaacagggccacctggccaactccctcgaaacctcaggttctttttccgatgattcgagcttcatcgaaatcagctatgatgccatgggggaaatcaaggattgttcaaggtacatggctagagatactaactctgggtcatcaagcagccagcaaaactatggactccgagcaaagcgtaaagtgcgctactctgaagactacctgtatgatgtggattccctggagggggagaaggtgaatgaacgcaaagaatggctgccagtcggctctaaggaggaggacgacgacgagtggtgcccaaagaaacgccgaaaggtgactcgaaaggagccccccgttataataaaatacataattattaaccgttttaagggcgagaaaaatatgttagtgaaacttggaaaggtggatgcatcagagaccactgtaaatctctctgaaaatcagctaaacaaatacgcaaagctggctcctttaaagggattctggcaaaaaaaaaagaaacagaggaacacaaacacggatagcatcaaaacacctttctcccagaaacagtcctttgagcccggcagttttgaggtgagctttctgccaccagctaggaaacggaaatcaaaactagggaaccgccatcgcattcagaggatcccgagcatcgagatctccgctagcagcaagcagatctctctgtgcaacgaccaacgccacgcatctaaccacaaggaggatggcggtctgaaaggaactctgaagtccgcaccgctaggcgccccctcatgcgcaaatggtagccacctgaatgacattaccggaccggatagtgtaaaggtcaaggctcaggatactgagttcaaagggcctgagagaaaggtcctcaataaaattaagtttaagtccgaagcaagactgaaatcgaagaaggtgaaggccgcaggccaagagtccaagcctattgtgcagatgtcgcccctgctcgagaatcagtcatctaaggcaaatctgaaaaatgaggtgattcctggaacaagcaattcatcacggctgtccgagttccacgaagcgaaggccgctaagagctcaacctttctgcccacgacctgcagttctgagatgccactgagcagcgccaatgtgaccacaaatattccagttatccccggaggttacctccagacattgttggacgcctcagatctgagcaataacacttcaatttcctatttcagccaccatagtcctgaacagaatgaggggtcacttactcagaccgaaaaatcattcgtgcctctgcaacccacacaggactgtgtccttacctctagctctgactccgagttgcagcaatccagccataacttcaagatggaatccagtaactacaggaacgtgtggcctaacaaagccacgtccgggacccaggaattcatggccgaagtgtcccgagagattgccccaactcagagcagcgaattcggagcctcacaggtcgtctccatggagaacaacctcactcctacaacctacaatccaatttgcctgaactccggaggcagcaattgtaacaaagtgctctacgattccatgcaggatacccagttgccttctgatgactcttatcagctgtgccacttcaacaatggcgaaatatgctttcccttccagcaaggacccgtgaatatggacgatggacggctcttcagctttgactctatggctcctctgtcagtttcttcatctaattactgttccctgtctctgaaatcctgcgaaaaggatggtgacgacgatatcacggacgacttcctggcgcattgcagccccaaactggtaattcaacaatctatcgatgagatcgctccgctgaaagaatcgactgacctattggacatttcaaatttcacacctgacaagtttcgtcattcctctctcagcgagatgtcaccacccgacaccccctccctgtcgccccagatcactaggtgcgagtctatgaaaaccctgggtacgcttaaaggctttcaggaaggagtaccgggtccgctcgatagcgttgagaagattaaatgggattgtagcacactgagccgccaggtccagatggaggacggctttacgttaaacaatcaccagtttcagtttcatatgttcaacgatgaagatagcgtgtctttattacagaagaacccttgcctcagcaccttcaacgacccctcgggtcagatctctaccaacaataaagtcagcaagagcaggaaaaagtcatctccgagtaagtcaggtgctatgaatcagtctagtagccagaagaataccagaaagaagtctctgaagggcaacaacaaaggcatcgaaaagcctccaggaaagaacagccggcaagttcccaaatccacaaagaaaggcaagtacatggctgctatcaacggggagaaaatgcaaattggaataggccgtgggggaagtcagactaacaccatttcatccacagggaagacgctggccgagtgtatccagcacggaggcccaatggcttctatgaagatgccaagccagaaggggctgagtggtgattgggctttgggtaaggagagtagcccgggctggtcagatatgtcgatggggactaatacaaatagtctgcttgatgacgaccagagggagttccaggagccctcatacatactaagtaacatcgcgtccgggatggcagatgtgcagaggtttatgatggcaagcatagaaccactgtgggagcctatggaacaccatggtgatcctaatattttctactcacctgaaagcaacagcctcaagttgaaaaccttgaagatccttgccggcaccccacaggagagtaagaagaaaatcaacagcggtagccagggtgcaaccaaaaaccacaggtctatcaagggcgtaagcaagagcaatggtaaaactgccattggggaccctgggagggcaaacatgcccggctacaatgaagattctcgctccactttcttcgacaagaagtacagcaatatgtccacacttggcaacaatggacctactcacaaaaaactttaccggcataagagttcttcaaaagcgctgcgggacgaaaaatgcaaaggcaagcatatggaacgggagcaagttcacaaggatgagagcgggactgcgtcatttgagaagctgcgggacagcgattataatctgctcaaggctgagactacattttgggtcctcccagttttcgaggaagagacgcgtattttccagaaggatatatag

SEQ ID NO: 130426 - DNA, 1008 bp, synthetic construct
  misc_feature 1..1008: note = Description of Artificial Sequence: Synthetic coding sequence
  source 1..1008: mol_type = other DNA
atgtgggcaactctgccccttctgtgtgccggagcttggctgttaggcgtccctgtgtgtggagcagcggagctatgtgtaaactccctggaaaagttccattttaagagttggatgagcaagcaccgcaaaacatactccactgaggaataccatcaccgcttgcagactttcgcatccaattggcggaaaattaacgcccacaacaacggtaatcatacattcaagatggcgcttaaccagttttccgatatgtcctttgctgagatcaagcataagtatctttggtctgaacctcagaactgctccgctactaaatcgaactatctacgcggaaccggcccctatccgccctcagtcgactggaggaagaaggggaattttgtgtctccagtgaaaaatcaaggggcttgtgggagctgctggacattctcaacgaccggcgctctcgagagcgcgatcgctattgctactggtaagatgttgtctttggccgagcagcagctcgtagactgtgcgcaggacttcaataaccacggctgtcaaggcgggcttccgtcccaggcctttgagtatattttgtacaataaaggtatcatgggtgaggacacttatccctaccaaggtaaggacggttattgcaagttccagcctggtaaggcgattggttttgtcaaggacgtagcaaacatcaccatctacgacgaagaggctatggtggaggctgtcgcactgtataaccctgtatccttcgccttcgaggttacccaagatttcatgatgtacagaaccggcatttactcttctacaagttgtcataagacaccagataaagttaaccacgcggttcttgctgtcggatacggcgagaaaaacgggatcccctattggattgtaaagaacagctgggggcctcagtggggcatgaatgggtattttttgatcgaacggggtaagaacatgtgcggtctcgccgcatgcgcttcctatccaattcctcttgtctag

SEQ ID NO: 130427 - DNA, 5655 bp, synthetic construct
  misc_feature 1..5655: note = Description of Artificial Sequence: Synthetic coding sequence
  source 1..5655: mol_type = other DNA
atgcactgtactaatccagctttgatctttctgatagatgagttaagtccagagcagcataacctatctctgtattctatggagctggtgctgaagaagagcaccggacattcagctgcacaagtcgctctcaccgagacggcccccggtagtcagcattccagcccactccatgtgactgcccccccatctgcaaccacatttgacactgccttcttcaaccaggggaaacaaactaaatccacggccgaccctagcattttcgtcgccacttacgtctcagttacgtcaaaggaagtcgccgtgaacgacgacgagatggacaactttctgccggatacgcactggacaacaccgaggatggtgtcaccaatccaatatatcactgtcagcccacccggcctgcctcgagaagcgctcgagccaatgctaaccccttctctgcccatggttagtttgcaagatgaggaagtcaccagtgggtggcagaacaccacacggcagccagccgcttatgccgagagcgcgtctcattttcacacatttcggagcgcatttcggactagcgaggggatcgtgcccacgccagggcggaacttagtgttgtacccgaccgacgcctatagtcacctatccagtaggacattgccagaaattgtggccagcctaacggagggcgtggagactaccctgttcctgagctctaggagcctcatgccacaacctttgggagatggaatcacgatccccctaccatcattaggagaagtgagccagccaccagaagaagtctgggccacatcggcagacaggtacaccgacgtcacgaccgtactatctcagagtctggaggagaccatatccccgaggacctaccctacagtgactgccagtcacgccgcgttggcttttagcaggacgcactcacccttattatcgacccccctggcatttgcaagctcagcatcgcctactgacgtgtcttcgaatcctttcctgcccagcgatagctccaagacttcagagctgcatagcaattccgcacttcccgggccagttgacaacacccacattttgtcccctgtcagcagtttcagaccatacacatggtgcgctgcctgcacagtacctagccctcaacaagtgttggccacttcgttaatggaaaaggacgtcggctcaggggacggagccgaaacactttgtatgaccgtgctggaggagtcttctattagcctgatgagcagtgttgtggccgatttcagtgagtttgaggaagacccacaagtattcaatacactttttccatctaggcctatcgtgcctctaagcagcagatctatggagatctctgagaccagcgtgggcatatccgcagaggttgacatgtcctcagtgacgaccactcaagtgccaccggcccacggaaggctctctgtgcccgcaagcctggatcctaccgcaggctcattgtcagtcgcagagactcaggtgactccctccagtgttaccaccgccttcttcagcgtcataacttctatcctattggacagctcgttttcagtgattgccaataagaacaccccaagcctggctgttcgggacccctcagtttttacaccttattccttagtcccctcagtagaatcttcactcttctctgatcaggaacgcagtagcttcagcgaacataagccacggggtgccctcgatttcgcttcatccttctttagtacgcctcccctggagctttctggatcaatctccagtccatctgaggcccctgctagcctctcattgatgccctctgacctaagccccttcacaagtcagtcattttcccccctggttgaaacgtttacactcttcgactcatctgatctgcagtcttcccaactctccttaccaagcagtactaatctagaattctcccagctgcagcccagcagcgaattacccttgaacactatcatgttattacccagtaggtccgaggtgagcccatggtcctcattcccatctgactctcttgagttcgtggaggccagcacagtttctctgaccgacagtgaggcccacttcacgtccgcctttatcgagacaacatcctacctggagtcttccttgatctctcacgagtccgctgttacagctctcgtgccgccagggtcggaatcttttgacattcttacagctggaatccaagcgacgagccctctcaccacggtgcatacaacccccatattaaccgagtcctctttattttccacgctgacccctcctgacgatcagatctcagcattagacggacatgtatctgtgctagctagcttcagcaaagcgatccccactgggactgtgctgatcaccgatgcctacctgccatctggtagctcttttgtgtctgaggccacccctttccccttacctaccgagctgacggttgtagggccttctctcacacccaccgaagttcccctgaacacaagtactgaggtaagcacaacatccaccggcgctgctaccgggggccccctcgactcaactctgatgggagacgccgcgtcccagagccctccagaatcctccgctgctccccccctgccttccctgcggcccgtgaccgcatttaccctggaggcaactgtcgatactcccaccctggcgacagcgaagcccccttacgtgtgtgacattaccgtccctgacgcctacctgattacaacagtgctggctcgacgggctgttcaagaatacattatcacagctatcaaggaagtccttaggatccatttcaaccgggcagttgaattgaaagtctatgagctgtttactgactttaccttccttgtcacaagcggcccttttgtgtatactgcgatctccgtaatcaatgttcttataaattctaagctggtacgtgatcagacaccgctgattctgagtgtcaaacccagcttcctggtgccagaaagccggttccaggtgcagaccgtcctgcagttcgttccccccagtgttgacacgggtttttgtaacttcacgcagaggattgaaaaggggctgatgaccgcgctctttgaagtgagaaagcatcaccagggaacatataacctaaccgtgcagattctgaatatcaccatcagctcttcccgcgtaacacccagacgtggccccgttaatatcattttcgccgtcaagtctacgcaggggttcctcaatgggtccgaagtctctgagctcctgaggaacctatcggtggtggaatttagtttctatctcggctaccccgtattacagatcgcagagcccttccagtatcctcagctgaacctctcgcagctcctcaaatcgagctgggttcgcacagttctgctgggggtgatggaaaagcaacttcaaaacgaggtgtttcaggctgagatggagcggaagttggcccagctgctgagcgaagtgtcgacgcgacgccgcatgtggagacgtgctacagtggcagctggaaactccgttgtacaggtcgtaaacgttagcagacttgagggggacgataaccctgtccagctgatttatttcgttgaagaccaggatggtgagcggctgtctgctgtgaaatctagtgatctgatcaataaaatggatttgcaacgcgccgccataatccttggctataggatccaaggtgtcattgcgcaacccgtcgaccgagtaaagagaccatcaccagagagccaatcaaataatctgtgggtgattgtgggcgtggtgattcctgtgcttgtcgtcatggtgatcgtggtgattctttactggaaactctgtcgaacagataaactggactttcaacccgacacagttgcaaatatccagcagagacagaagctccagatcccctccgtgaaagggtttgacttcgccaagcaacacctgggacaacataacaaagatgacatcctcataatccatgagccagcaccactgccagggccactgaaagaccataccactccatctgaaaacggggatgtgccatccccgaaatctaagattccttctaaaaacgtgaggcaccggggacgagtgagcccttcagacgcagactcaaccgtgagcgaggaaagctccgagcgcgatgctggagataaaacgccgggcgcggtcaacgatggaagaagtcacagagccccccagtcaggacctcccttgcctagctcaggcaatgagcagcattctagcgcatccatttttgagcacgtcgatagaataagcagacctccggaagcctccaggagagtgccgtccaaaatacaattgatcgccatgcagccaattccggcgcctcctgtccagcggccgtccccagctgatagagtggccgagtctaacaaaattaacaaggaaattcaaacagctcttcgtcacaaatctgagattgaacaccaccggaacaagatcagactcagagcgaaacgcagaggccattatgagtttcccgtggtagacgacctgagtagcggagacacgaaagagcgacatcgcgtttatcgcagagcccagatgcagattgacaagatcctagatcccacggcctctgtcccatctgtctttatcgaacccagaaaaagctcacgcatcaagcggagcccaaaaccacgcaggaagcaccaagtgaacggatgtcccgcggacgccgagaaagaccgactaatcaccactgacagcgacgggacttatcgcagacctccaggtgtacacaacagtgcatatattgggtgtccgagtgatccggacttgccagccgacgtacaaacaccgtcctctgtcgaacttgggaggtatccagcactgccgttccctgcatcccagtatatacctccacagcccagcattgaggaagctcgccagacaatgcattccctgctcgatgatgcctttgcgcttgtagccccatccagccagcccgcatcaacagccggcgtcgggcccggcgtgccacctggcctgccagctaattctaccccttcacaggaggagcgacgggctactcaatgggggagtttctattcgcccgcccaaactgctaataatccatgctccaggtacgaggattatggaatgacccctcccacgggccctctcccgagacctggcttcggcccaggcctactgcagtccaccgaactcgtaccgcccgatccacagcagccacaggcttctgccgaggcccccttcgcagcacgcggtatttatagcgaggaaatgccctccgttgcgagacctaggcctgtcggaggaacaacaggctctcaaatccagcatctgactcaagtcggaattgccagcaggattggggcccagccagtcgaaataccgcccagccgcggctctcagtatggcgggcctggctggccctcctatggagaggacgaggctgggcgaagggaggctgtaccccggactagtgggcgcgagccgtctgccccttcaggaaacctgccccatcgcggcctgcagggacccggcttggggtatcctacaagtagcactgaagacctgcagccagggcattcttcagcgagcttgattaaggctatcagggaagagcttctgcgcctgtcccagaagcagtccaccgtgcagaatttccattcatag

SEQ ID NO: 130428 - DNA, 1236 bp, synthetic construct
  misc_feature 1..1236: note = Description of Artificial Sequence: Synthetic coding sequence
  source 1..1236: mol_type = other DNA
atggagaccccagaggtgcccgtaggatctcttatagattttggccctgaagctcccacatcgagccctctggaggctcctccacctgtgctccaagacggagacggctcccttggtgacggcgccagtgaatcagaaaccacagagtcggcagacagcgaaaatgacatgggtgaaagccctagccacccttcgtgggaccaggacagaaggagctccagcaacgaatccttctcaagcaatcagtcaacagaaagcactcaggatgaggaaactctggctcttagggattttatgagagggtatgtggaaaaaattttctctggaggggaagacctcgaccaggaggagaaggccaaatttggcgagtattgttctagtgaaaacggaaagggcagagagtggtttgctcgttacgttagcgcgcaaagatgcaattcaaagtgcgtgtctgaggccacgttttacagattggtgcagtcctttgcggtcgtccttttcgagtgccaccagatggatgatttcggtccggccaaaaacttgatgaccatgtgctttacctactatcacatcggcaagccgcagttgcttcccccagagtctagggagaagccggccggaagtatagattcatacctgaagtccgcgaatagctggctggccgagaagaaggacatagctgagcgtctgctgaagaatacttctgccaggacagaaaacgtgaaaggtttttttggtggattggaaaccaagttgaagggaccccttgctcgaagaaacgaggaggatgagaataaacctcaggagaagcgccctcgggccgtgaccgcctactccccggaggacgagaaaaagggagaaaaaatctatctgtacactcaccttaagcagcagccaatctggcacacactgaggttctggaacgcagccttcttcgacgcagtacattgtgagcggactaaaaggtctccaaccacccgcggtgatgcaggcgaagaggaggaaaaaagggagaaatggtgccatatgacccaggaagagcgggacgattccctgaggttcaatgagaatatcacctttggccagttgggcacctttacccacaatatgctagccttcggtttgaataagaagctgtgtaacgattttctcaaaaagcaggccgtcattggaaatctggatgaggagcagtataaattgctctccgatcatatcgaacagatggccacagagtag

SEQ ID NO: 130429 - DNA, 15018 bp, synthetic construct
  misc_feature 1..15018: note = Description of Artificial Sequence: Synthetic coding sequence
  source 1..15018: mol_type = other DNA
atggaccagaggaagaatgagtcaattgtgccttccattacccagctggaggactttctaaccgagcacaattctaatgtcgtgtggctcttagtagctacgatactctcttgcggctggattatttacctgacatactacaacagcaggaacgttggacttatcctcactttagtgctgaacagactctataagcacggctacatccatataggatctttcagtttctccgtcctgtctgggaaagtaatggttagagagatttactatatcacggaagatatgtcaatccgcatacaggatggattcattatctttcggtggtggaagatgtacaaccccaaacagaaacagcatgatccgaaggctgaaacgagactgtacataaccgttaacgatttcgagttccacgtgtacaatcgttctgatttatatggacgccttcaagaactgttcgggctggaaccaacaataattccccctaaaaaagacgacgacaaaacccgggagataggcagaacaaggacgcagagtaagatagaacgcgtgaaggtgaagaccgaatctcaggacccaaccagcagctggcgcagccttatacccgtgattaaggtgaacgtgtctaccgggagactcgccttcggtaaccactatcagcctcagacgctttgtatcaacttcgatgacgccttcctcacctataccaccaagcctccatcgagtcatttagaccagtttatgcatattgtcaaaggcaaactggagaacgtcagagttatgctggtgccatctccaagatatgtggggctgcagaacgacgagcctcctcgccttatgggggaagggtttgtcgtcatgcagtccaatgacgtcgacatctactactatatggacgagcctggcctggtgccagaggagactgaagagaatattgagggcgaaatgtcttctgaagattgcaagctgcaagatctgccaccctgctggggactggatattgtatgtgggaaaggaacggattttaattatggtccttgggcagaccgacagcgcgactgtctgtggaaatttttcttccctcccgactaccaggttcttaaagtttcagaaatagcccagcctgggcgacccaggcagatcctggccttcgaactgaggatgaatattatcgccgacgccacgattgatctactgtttactaaaaacagagaaacgaatgccgtgcatgttaacgtcggggcaggtagctacctcgaaatcaacatccctatgaccgtggaggaaaacggatatacccccgccatcaagggacagctactccacgtggacgctactactagtatgcagtatcgcaccctgctggaggctgagatgcttgcatttcacatcaatgcctcctatcctcggatctggaacatgccacagacctggcaatgtgagctggaggtgtataaagccacctatcatttcatatttgcccagaagaacttctttaccgacctcatacaggactggtccagcgattccccccccgacatcttttcatttgtgccttatacatggaatttcaaaataatgtttcatcagttcgaaatgatttgggctgccaaccaacataattggattgattgcagtacgaagcaacaggaaaatgtgtatcttgccgcatgcggagaaactctgaacatcgatttcagtctccctttcaccgattttgtgcctgccacttgtaatactaaattttctctgcggggagaggacgtggatttacacctgtttctgccggactgtcatccgagtaaatattccctgtttatgttggtgaaaaattgtcatccgaataaaatgatccatgacactgggatccctgccgagtgccagtctggtcaaaaaaccgtgaagcccaagtggagaaatgtgactcaggagaagtcaggatgggttgaatgctggactgtacctagcgtgatgctgactatcgactacacgtggcacccaatctacccccagaaggccgatgagcagttgaagcagagtctctccgagatggaggagacgatgctgtccgtccttcgcccttctcagaagacctccgacagagtggtgtcttcaccaagcacttcctctagacctcccatcgacccatccgaactcccaccagacaagctgcacgtggagatggaactgagccctgattcacagatcacgttgtatgggcccctgttgaacgccttcttatgcattaaagaaaattattttggcgaagatgatatgtacatggacttcgaagaagtcattagctctcctgtgttgtcattgtcaacttcctcttcctccggctggaccgccgtggggatggaaaatgacaagaaggagaatgaaggcagcgccaagtctatccaccctctggcgttacgtccttgggacattacagtgcttgtgaacctatataaggttcatgggcggttacctgtgcatggaactactgacggacccgaatgccctacagcgttcctagagcggctgtgtttcgagatgaagaagggcttccgggaaactatgctacaactgattttgtcccccctgaacgtctttgtgagtgataactatcagcagcggcctccagtggatgaagtgctgcgcgaaggccacattaacctcagtggactgcagttgcgcgctcatgctatgttcagcgccgagggcctgcccctgggatctgactctcttgagtatgcttggttaatcgacgtgcaggctggaagcctaaccgcaaaggtaactgctccacagctcgcctgcctgttggagtggggtcagacatttgttttccacgtagtgtgcagggaatatgagctggagcgtccgaaatccgtcattatctgtcagcatggcattgataggcgattctgcgaatctaaactgtcttgtattcctggaccatgtcctacttccgacgacctgaaatatactatgatcagactcgccgttgacggcgctgacatctacatcgtggagcatggttgcgccacaaatattaaaatgggtgccatccgggtagcaaactgcaacctgcataaccagtctgtgggagaaggaatctcagctgccattcaggactttcaggtacgtcagtatatcgagcaactcaataattgtaggatagggcttcaaccagctgtgcttcggcgggcctattggctcgaggctggatccgcgaaccttggattaattactgtcgacatcgcgctggcagcagatcaccactcgaaacacgaggcccagcggcactttctggaaacacacgacgcacgcacaaagcggctctggttcttatggcccgatgacattctgaagaacaagcggtgtagaaataagtgtgggtgcctggggggttgcaggttttttggcggtacagttacaggcctggatttcttcaaattggaagagctgactccttcatcgagctcagccttttccagcacttccgccgagagtgacatgtattatgggcaatctcttctccagcccggtgaatggataatcaccaaggagatccctaaaataattgatggcaacgtcaacgggatgaagaggaaggagtgggaaaacaaatccgtgggcatagaagtggagcgcaagacccaacatctctcgctacaggtccccctgaggtcccacagctcgagctcctcatccgaggagaacagtagttcctcagcagctcagccactgttggccggagagaaggagagtcccagttcggttgcagatgatcacttggtgcagaaggaatttctgcacggcacaaaaagagatgatggacaggcctcaatccccaccgagatttcagggaactcccctgtgtccccgaatacgcaggacaagagtgtgggacagtctccactgagatcaccactcaagcgccaggccagtgtctgcagtacacggctcggttccactaagtccctcaccgcagctttttacggggacaaacaacctgttactgtgggcgtgcaattcagcagcgacgtgtcccgctctgacgagaatgtccttgacagccctaagcaaaggagaagttttggatcgttcccatacacccctagcgccgactcaaattccttccatcagtataggagcatggacagcagcatgtctatggcagattccgaagcttacttctccgccgctgaagagtttgagcccatatctagtgacgaggggccggggacttaccctggaaggaaaaaaaagaaaaagcagactcagcagatcgattactcccgtggctcaatctatcacagcgtcgaagggcctctcactggtcatggtgagtctatccaggattccagaacactacccttcaaaacccaccctagtcaagcatcattcgtgagcgcgttggggggagaggacgatgttatcgagcacctatatatcgtggagggtgaaaaaactgtcgagtctgagcagatcaccccccaacagcccgtgatgaactgctaccagacttatcttacccagtttcaggttataaactggtccgtcaagcacccgaccaataaacggacaagtaaaagctcacttcaccggcctctggacctggatacaccgacttctgaagaaagctcttcgagttttgagcagctttcggttcccacgttcaaagttatcaagcagggattgactgctaattccttgctggatcgtggcatgcagcttagcgggagcacctctaatacaccatacacacccctcgagaaaaagcttgctgacaatacagatgatgagacccttactgaggagtggaccttggatcagcccgtgtcccagacgcgtaccacggcaattgtggaggtgaagggcacagtggacattgtgctgaccccgcttgtggcagaggctctcgatcgctatatcgaggccatggtgcactgtgcttcaacccgccacccggccgcgatcgtggatgatctgcatgccaaagtgcttcgtgaagccgttcagaacagcaaaaccaccttttccgaaaatttatcatctaagcaggacataagaggtacaaaaaccgagcagtctaccatcggtacgacaaatcagggtcaggctcaaactaatttaaccatgaagcaggacaacgtaaccatcaagggactgcagaccaacgtctccatccccaaggtgaacttgtgcctgcttcaggcctccgtggaagaatctccgactacggcccctagccgatccgtgacgcacgtcagcctcgtggctctatgttttgataggatcgccacacaggtcagaatgaataggggagtagtggaagagaccagcaacaacgcggagccaggtaggacctccaactttgacaggtacgtgcatgctaccaagatgcagccacagtcctctggatctctaagaagcaatgccggggctgaaaaaggcaaagaaatcgctgctaaattgaacatccatcgtgtgcacggccagctgagggggcttgacactacagacataggcacgtgcgcgatcaccgccataccatttgagaaatctaaagtcctgtttacccttgaagagttggacgagttcactttcgttgatgagacggatcagcaggctgtgccagacgttacgcggattggtccgagtcaggagaaatggggctggattatgtttgaatgtggacttgagaacttgaccatcaagggaggccgacagtctggcgcagtcctctacaactcttttggaattatgggaaaggcctctgataccgagcgcggtggggtcctgacaagtaacaacagttccgacagtcccaccggcagcggttacaacaccgatgtatccgatgataacctgccatgtgaccgcaccagcccttcatccgacctgaacggtaactccgtgtcagatgagcaggacgaaggcgttgaaagcgacgacctgaaaaaggatttaccactcatgcctccccctcctgactcatgtagcatgaaactcaccatcaaggaaatttggttttccttcgcagcaccgacaaacgttagatcccatacccacgctttttcccgccagttgaacctcctgtctactgcaaccccagcagtcggcgcgtggctagtgcccattgaccagcttaagagcagcctcaacaagctcgagactgaaggcactctgcgtatttgtgccgtgatgggctgtataatgacagaagcgcttgagaacaagtctgtccatttcccgctcagatccaagtataaccggcttactaaagtggctcgattcttgcaggaaaacccttcatgtttgctgtgtaatatactccaccactacctccaccaggccaactatagtatcatcgacgatgctaccatgtccgatggattaccagccctggttactctaaaaaagggccttgtggccctggcaagacagtggatgaaattcattgtggtgacacctgccttcaagggcgtgtccctgcaccgtcccgctcagccactcaaacctcagatcgccatggatcatgagcatgaagatggattagggctcgataatggcggaggtctacagtccgacaccagtgctgacggggccgagttcgagtttgatgctgccacggtaagcgaacatacgatgctactggaagggaccgccaatagacctccaccgggatcgagcggcccggtgaccggcgccgagatcatgcggaaactgtcaaagacgcacacccactctgacagcgccctgaagatcaagggcatccacccctaccactccctttcctataccagcggcgatacagccacagactctccagtacatgtggggagggcaggtatgcccgtgaaagactctccacgcaaagaatctctcctgtcctacctcacggggtctttcccctctctccacaatttactggagggaaccccccagcggtcatccgctgccgtcaaatccagctcacttactcggaccggcaatacagtcgcaaccgacatgctttctgagcacccactgctctcggaacctagcagcgtcagcttctacaattggatgagcaacgctgtgggcaacagaggttccgtgctgcaagaatccccagtgacaaaatcgggccacaacagcttgcctaccggcgtggctcccaatctgcccactataccttccgcttcagactttaacacagtgctaagcagcgatcaaaatacactagatggaactcacagtcagcactctacatcgcaggatgatgtggctggagtcgaggaagccaatcaagggttcccggcagtgcaactggccgatgcacaggttgtgtttaaacccttgctgtcccatacgggtattcagtcgcaggatacaatgcctttctgctatcggatgtatttcggcgagcacctgagctttagcgggacacttgactgcctccgcgccgacatagttgatagcgatacagccaaggagcggaagggtaagcgtgcacgacggcaaggacacgtcaacctgccaccgcttgagtttaagcccgcactaatgttagggaccttcagcattagcgcggtagttatggagaagtccgtgtgcactccgcaaaacagcacatccgccttgagtttccacgatctgagcaaacgttactacaacacgttccattgtaatttcaccatatcttgtcagagcatctcccagcacgtcgatatggcccttgttcggctgatccatcagttctccaccatgattgacgatatcaaagcgacccagacggacattaaactgagtcgatatactgccggaagtgccagtcctacccctacctttaaaacccgaaagcatagagatttccggagcagtgatttctcgcgaagctctcgtggctcattgaatgggggaaaccgcgtgaataacgcaaagaacaagcgcacaaacaatgagaacaataaaaaagaatcaaggaataagaattctcttggtcgtagtgagagacggacaagcaaggtgtcgagaaagggcagtaaagacgtagtagatcatatgaccatccacatggacgacagtgacagcatcacggtctccgagcagagcgagccatccgccgagtgctggcagaacatgtataagcttctgaatttctactccttaatttcagacccgaccggaattctcgaaaagtcgtccgaaacctttggcccagcaggcgtcaggtccccaaccgaacctacctgcaaggtggtgttcgagaatgagcaggataactcttcattgacaaagacccagaggaagcgaagcctcgtgacttctgagccacagcacgtaacactaatagtgtttggtatcggcatggtgaatcgtacacacctggaggccgatattgggggcctaaccatggagagtgagctcaaaagaattcatggttctttcaccctgaaagaaaaaatgaaggatgtgctacaccagaaaatgaccgaaacctgcgccactgcccatattggtggcgtcaatatcgtgctattagagggcatcactcccaatatccagcttgaggatttccctacaagcccgaccagtacggctaagcaagaattcttgacagtggtgaagtgttctatcgcaaagtcacaggccttatacagcgcccagaggggcctgaaaacaaacaatgcggccgtgtttaaagttggcgcaatctctatcaacattccacagcaccctgctaccttgcattctatgatggtgcgctcttcacatcagctgtcaaaacaaatcagcgatctcatcagacaaccatctaccgcgcctcagcctgtgaaggaggatatcgccacaccattgccatccgaaaagacgcccacaagcgtgaaccaaacgcccgtcgaaaccaacgaattcccacagttgcccgaaggtctggaaaaaaagccaatagtgttgaagttttcagccatgctagacggcattgccattggcgccgcattgctgcccagtctcaaggcagagtacaaaatgggccggatgcgatcccacgggatgacaggcgcccagactcgatttacctttgaactgccaaaccacaggctaagattcacttctaaagtgtcagcaactgatatgtcaaccattcctccctcagcatcactcaacctgcctccggtgacaatgtctggcaaatatataatggaggagcacgatagctattctgatcaggtgtggtccatcgacgaactgccatctaaacaagggtactatttgcagggtaattacttgagatgcgtggccgaggtgggatcttttgagcacaatttaacaacagaccttctgaaccacttagttttcgtccagaaggtctttatgaaagaggtcaatgaagtaatccaaaaagttagtggcggagaacagcctatcccactctggaacgagcatgacggaactgccgatggagacaaacccaaaattcttctgtattctttaaacctgcagtttaaaggcatccaagtgactgcaaccacaccctccatgcgcgccgtgagattcgaaactggcctgattgaactcgagctgtcgaataggctacaaacaaaggccagcccaggtagtagctcttatctgaaactcttcgggaaatgtcaggtagatcttaatctggccctgggccagatcgtgaagcatcaggtttacgaagaggctggcagcgattttcatcaggtggcttactttaagactagaatagggctgcggaatgccctgcgtgaggagatctccggatcttctgacagagaggctgttttaatcacgcttaatcggcccattgtgtacgcccagcctgtggccttcgatcgggcggtacttttctggctgaattacaaagcagcatatgataactggaacgagcagaggatggccctgcataaggacatccatatggcaaccaaggaggtggtcgatatgctcccagggattcagcagaccagcgctcaggcattcggcaccctattcctgcagctcacagtcaatgatctggggatttgtcttcctatcaccaacaccgcacagtcaaaccacaccggggacctggatactgggtcagccttagtactgacaattgagagcaccctgatcaccgcttgctccagcgaaagcttggtgtcaaagggacattttaaaaacttctgcatcagatttgccgacggcttcgaaacaagctgggacgattggaaaccagagatccacggcgacctggtgatgaacgcctgtgtggtccccgatggaacgtacgaggtttgcagccggactactggtcaagcagccgctgaatcgtccagcgcaggcacatggaccctgaatgtgttgtggaaaatgtgtggcattgacgtgcacatggaccctaatattggcaaaagattaaatgctcttggcaataccttgacaacccttacaggagaggaagacatagacgacatagccgatctcaattcggtaaatattgcagacctgtcagacgaagacgaggtagatactatgtccccaaccatccataccgaggcaacagactacaggcgtcaagctgccagcgcgagtcagccaggcgagttgcgtggaagaaagatcatgaaacgaattgtggacatcagagagctgaacgaacaggcgaaggtcattgatgatttgaaaaagctgggggcttccgagggcacaattaaccaggaaatccagcggtaccagcaactggagagtgttgccgtaaatgatatcagaagggacgtgcgaaagaaacttcgcaggtcaagcatgcgagcggcatcactgaaggataagtgggggctcagttacaaaccaagctatagcaggtccaaatcgatcagcgcctcaggccggccgccacttaagagaatggaacgcgcgtcctcaagagtgggagaaacagaggaacttccggaaattcgcgtagacgccgccagtccaggcccaagagtgactttcaacatccaggacactttcccggaagagaccgagctggatctgctgtccgtaactatagaggggccttcacactattcctctaattcggagggctcatgttcagtgttctcaagtcctaagacccccggcggcttttccccggggattcccttccaaactgaggagggccgccgggatgactccttgtcctccacaagtgaagattcagaaaaggacgaaaaggacgaggaccatgagagggagcggttctatatttataggaagcccagccataccagtaggaagaaagctactggattcgcagcggttcaccagctgtttaccgagcggtggcccacaacccctgtgaacaggtctttgagtggcaccgccaccgagcggaacattgacttcgagcttgacattagagtggagatcgacagcggtaagtgcgtactgcaccctactaccctgctgcaggagcacgatgacataagcctgaggcgcagctatgataggagttcaagaagccttgatcaggactctccttcgaaaaagaaaaagttccagactaactacgcctcgactactcaccttatgacagggaaaaaagttccaagtagcttgcagacaaagccttccgatctcgagaccaccgtcttctacatacctggcgtggatgttaaactgcactataattctaagacactgaagacagaatctccaaatgcttctcgcggctcttccttgcccagaacactctctaaagagtctaagttgtacggcatgaaagattcagctaccagcccacccagcccccccctgccatccactgtccagtccaagacaaatacgctcctaccgccccagcctcccccaatcccggctgccaaaggtaaaggcagcggtggcgtgaagacagccaaactgtacgcctgggtcgctctgcagtccttgcccgaagaaatggtcatcagcccgtgcctcttggatttcctggagaaggcactggagacgatccctatcactcccgtggagcgaaactatacagcagtaagtagccaagacgaggacatgggccactttgagataccagatcctatggaggagtctactacttcacttgtgtcaagtagtacatccgcttatagtagtttcccggttgacgtcgtggtctacgtcagggtccaaccgagccagatcaagtttagctgtctcccagtttcacgggtcgagtgcatgctgaagctgccgagtttggacctggtgttttcttctaaccgcggcgaactggagacactcggcaccacataccccgccgagacactgagccctgggggaaacgctacccagagcggcacaaaaacatcagcttccaagacagggatacctggaagttccggattgggctcacctttgggaaggtcccgacattcgtcgtcacagtcagatttgaccagctccagctctagctcaagtggactgtcatttaccgcatgtatgtcagacttttccctgtatgttttccatccctatggggccggaaagcaaaagaccgcagtgagtgggctgactcctgggagcggcgggttgggcaacgtggacgaggaacctacaagcgtgaccgggcggaaagatagcctgtccatcaacttggaatttgtgaaagtcagtctgagccgcattagaaggagcggtggcgcttctttttttgaatcccaatctgtctcaaagtctgccagcaaaatggacacaactctgataaatatttccgcagtgtgtgatattgggtccgcaagcttcaaatacgacatgagaaggctctcggaaatcttggccttccccagggcttggtataggcggtccatagcacgtcgcttgtttctgggagatcagaccattaacttgccaacctctggacctgggacgcccgattccatcgagggagtgagccaacatctgagcccagagtcttcccgcaaagcctattgtaagacctgggagcagccatcacagtctgcgtcattcactcatatgccacaaagccccaacgtgtttaacgaacacatgacaaactctaccatgtcccccggtacggtgggccaatccctgaaatcgcccgccagcattcgtagtaggagtgtgtcagacagcagcgttccacggagagactccctatccaaaacttctacccctttcaacaagagcaataaagcggcgtctcaacaaggaacaccttgggagactctagtcgtattcgctattaatctcaaacagctcaatgtccaaatgaatatgagcaatgtaatgggcaataccacctggaccacctcaggcctgaagtcacaaggaaggctgtccgtcggcagtaatcgcgacagggaaatctcaatgtcagttggcctgggcaggtctcagctggactccaaagggggagtggtgggcggaacaattgatgtcaacgctctggagatggtggctcacataagcgagcacccaaatcagcagccaagtcacaaaattcagattacaatgggctcaaccgaggctcgggtggattacatgggttcctccatactgatgggtattttttctaacgcggatctcaaactgcaggacgaatggaaggtcaatctctataacactctggactcgagtattaccgataagtccgagatctttgttcatggcgatctcaaatgggacatcttccaagtaatgatttccaggtccacaacgccagatttaatcaaaattggcatgaagctacaagagttctttactcagcagttcgacacatccaagcgcgccctcagcacatgggggccagtgccctatctacccccgaaaacaatgacttcaaatcttgagaagtcatcccaagagcagttactggatgccgcacaccaccggcattggcccggagtgctgaaggtggtgtcaggctgtcatatcagcctgttccagattcccctgcctgaggatggtatgcagttcggtggctcaatgagcttgcatggaaaccatatgaccttagcatgcttccacggcccaaatttcagatccaagagctgggctttgtttcacttggaagagccaaacattgccttttggaccgaagcacagaaaatctgggaggacgggtcctctgatcattcaacctacattgtccagactctggacttccacctggggcacaacaccatggtaactaaaccctgcggagcactggagtctcccatggcaaccattacaaagattacaagaagacggcatgagaatccacctcatggtgtggcatcagttaaggagtggtttaactatgtgacagcgactcgcaatgaggagttgaacttgctgaggaatgtagacgccaacaacacggagaactcgactactgttaaaaactcgagcctgttgagcggtttcaggggcggatcaagctacaaccatgaaactgagaccatcttcgccctcccaaggatgcaactcgatttcaagtctattcacgtacaggagccacaggaaccaagtctccaggacgccagcttgaagccgaaggtcgaatgtagcgtcgtaaccgagtttactgatcatatatgcgtgacaatggatgcagagcttataatgtttctgcacgacctggtttctgcttacctgaaggaaaaagagaaagccatttttcctccaaggatactgtcgactcgacctggacagaagtcccccattatcatacacgatgataattccagtgacaaagacagagaggatagtattacctacaccaccgtcgactggagggatttcatgtgcaacacctggcacctggagcctacactacgactcatctcttggaccggcagaaagatcgatcctgtgggcgtcgactatattctgcagaaactaggctttcaccatgcccgaacaaccattccaaagtggctccagcgaggagtgatggatccccttgacaaagtgttgagcgtgctgatcaagaagcttggcactgctctacaggacgaaaaagagaagaagggcaaggacaaggaggaacactag

SEQ ID NO: 130430 - DNA, 1287 bp, synthetic construct
  misc_feature 1..1287: note = Description of Artificial Sequence: Synthetic coding sequence
  source 1..1287: mol_type = other DNA
atggggggactgttctcccgctggagaactaagccaagcaccgtggaagtgttagagtcaatcgataaagagattcaggccttagaagaatttcgggagaagaaccagcgcctgcagaaactctgggtggggagactcattctctacagttcggtattgtatctttttacttgtttgattgtgtatctctggtaccttccagacgagttcacagcccgcctcgccatgacacttccttttttcgccttcccgttgatcatatggtccattagaacagtcatcatcttctttttttcaaaacggacagagaggaacaacgaggctctcgatgacttgaaatcacagcgtaagaaaattctcgaagaagtaatggagaaagagacttataagaccgccaagctcatactggagaggtttgatcctgacagtaaaaaggctaaagagtgcgaacctcccagcgccggggccgctgttacggcacgccctggtcaggagatcagacagcggactgccgctcaacggaatttgagcccaacaccggcctctcctaatcaggggccccccccacaggtccccgtcagtccagggccacctaaggactctagtgcacccggtggcccgccagagcggacggttacccctgcactgagttcaaatgtgctccctagacacctgggttccccagctacctctgttcccgggatgggtctccaccctcctggaccccccctggcccgtcccattttgcctcgcgaacgaggagcgctggatagaattgtggaatacttggtgggagacgggccacagaaccgctacgccctgatctgccaacaatgcttctctcacaatggtatggcgctcaaggaagagttcgagtacatagcatttcgctgtgcttactgcttttttctaaatcccgcgcggaaaacccggccccaggccccgcggctgcctgaatttagttttgagaaacgacaagtggtggaagggtcctccagtgtcggccctttaccctcggggagcgttttaagcagcgacaatcagttcaatgaggagtccctggaacacgatgtcctggatgacaacacggaacaaacagacgacaaaatccccgccacagagcaaacgaaccaggtgatagaaaaggcttctgacagtgaggaacctgaggaaaagcaggagacagagaatgaggaagccagtgttattgaaacgaattccaccgtccccggagccgacagcatccccgacccagaactctccggcgagtcactgacggcagaatag

SEQ ID NO: 130431 - DNA, 2718 bp, synthetic construct
  misc_feature 1..2718: note = Description of Artificial Sequence: Synthetic coding sequence
  source 1..2718: mol_type = other DNA
atggatagtaccgcgtgtttaaaaagtttgctgcttactgtctctcagtataaggcagtgaagagcgaggccaacgccacccagctgctgcgccacttggaggtgatcagcggacagaagctaactaggctcttcacctcgaatcaaattctcaccagtgagtgtttgagctgtcttgtcgaacttctggaagatcccaacatctctgcatctttgatcctctctattatcgggcttctgtcccaattagccgtagacatcgaaaccagggattgcctacaaaatacatataatctcaactccgtccttgctggcgtcgtgtgcaggtcttctcataccgacagcgtgtttctacaatgcatccagctcttacagaaactcacttacaacgttaaaatcttttactccggagctaatattgatgagttgatcacatttctgattgatcatatccagagttccgaagatgaacttaagatgccctgcctgggcctgctggctaacctctgccgccacaatttgtctgtgcagacccacattaagacgctctctaatgttaaatcattttatcgcaccctaataaccctgttggcccattctagcttaacagtggtagtgttcgccctgagcattctgtcgtcacttaccctgaatgaagaggttggagaaaagttgttccacgcccggaacatacaccagacattccagctaatcttcaacatcctaatcaacggggatggaactcttaccagaaagtatagtgtcgatctgctgatggatttactgaaaaacccaaagattgccgactatctgacccgctatgaacacttcagtagctgcttacaccaggtcctgggtcttctgaatggaaaggacccagatagttctagcaaagtgctggagcttcttcttgccttttgcagtgttactcagctgaggcatatgctgactcagatgatgtttgagcagagtccacccgggtctgccaccttaggaagccatactaagtgcctggagcctactgtggcactccttagatggctgagccagccccttgatggcagcgaaaactgctccgtcctggctctggaactgtttaaggaaattttcgaggatgtgatcgatgccgccaactgctcctccgcggacagatttgtaacattactgctgccgacaattctcgaccagctgcagttcaccgaacagaatcttgacgaagctctgactcgcaagaaatgtgaacgcatcgctaaggcaattgaagtgctgctcaccttgtgcggagacgacactcttaaaatgcatatcgcaaaaatcttgacaacggtgaaatgcacaacacttatcgaacaacagtttacatatgggaagatcgacctgggtttcggaacaaaggtcgccgactctgaactgtgtaaattggccgctgacgtgattctgaaaacactggatttgattaataaactaaaaccgctcgtgccgggcatggaggtgagtttttacaagatcttgcaggatcctcgcctgattacccccttggcattcgctctgacttcagataatcgcgaacaggtgcaatccggcctgcggatccttttggaagccgcccctctgcctgatttccccgcattagtgctgggggagtctattgctgctaacaacgcctaccgccagcaggaaacagagcacattccacggaaaatgccatggcagagctcaaaccatagtttccctacctctatcaaatgtttaactccccatttaaaggacggcgttccaggccttaacattgaggaattaattgagaagttacagtcaggtatggtggtcaaagatcagatctgtgatgtccgcatatcggacatcatggatgtgtatgagatgaagttgagcactcttgctagcaaagagtcgagattgcaggacctgctggaaactaaggcgctggccctggcccaggctgatcggctgattgcccagcatagatgccagcgcacccaggccgagaccgaggcccgaacattggcttctatgctaagggaagtcgaacgcaagaatgaggaattatctgtcctcctgaaggctcagcaggtcgaaagcgagcgggcccagtctgatatcgaacacctgtttcaacacaaccggaagttggagagcgtcgcggaggaacatgagattttgactaagtcttacatggagcttctacagaggaacgaaagtacagaaaaaaagaataaggatctacaaataacatgtgactcattaaacaagcagattgaaaccgtgaaaaagctgaacgagtctctcaaggagcagaatgaaaaaagcattgcacaactcattgagaaagaggagcagcgtaaggaagtccagaaccagctggtggaccgcgaacacaagttagctaatctccaccagaaaactaaagttcaggaggagaaaattaagacactgcagaaggaacgagaagacaaggaagaaaccatcgacatcctcagaaaagagctctcaaggaccgaacagatacgcaaggagctgtcaattaaggcatccagccttgaggtccagaaggcacagctggagggacgtttggaggagaaagagtcactggtgaaactgcagcaagaggagctaaataagcattctcacatgattgcaatgatccactctctgtctgggggaaaaattaaccccgaaactgtgaacctgtcgatatag

SEQ ID NO: 130432 - DNA, 2370 bp, synthetic construct
  misc_feature 1..2370: note = Description of Artificial Sequence: Synthetic coding sequence
  source 1..2370: mol_type = other DNA
atgttggaggggaactatcaggtgatgctcaagtctggtacgaatattctgtattggagaacaacggggatattaatgggatcaaaggccgtgaagcctgtattggtgaagaatattactatagaaggggtagcatacacctctgagtgtttcccgtgcaagcctgggaccttttcaaataagcccggcagcttcaactgccaggtatgtccccgcaacacctattctgaaaaaggggccaaagagtgcatacgttgcaaagatgatagccagtttagcgaggagggctcctctgagtgcactgagcgcccaccttgcactaccaaggattacttccagatccacaccccatgtgatgaagaaggcaagacccaaattatgtacaagtggatagaacctaaaatttgcagagaggatctgaccgacgccattagactgcctccgagcggggagaagaaagattgcccgccttgtaatcccggattctataacaacggctcgtcctcctgccatccctgtccaccaggcaccttctcagacggcacaaaggagtgccgtccatgcccggccgggacggaacccgccctcgggttcgaatataagtggtggaatgtactgcccggaaacatgaagactagctgctttaacgtcggcaactccaagtgcgacggcatgaatgggtgggaagtggcaggtgatcacatccagagtggcgcagggggttccgacaacgactacctgattctgaatctgcacatcccaggtttcaaaccgcctacatccatgaccggcgccaccgggtccgaacttggcagaattacattcgtcttcgaaacattatgttcagcggactgtgtactttatttcatggtggatattaataggaaaagtacgaacgttgtcgagagttgggggggcacgaaagaaaagcaggcatacacgcatattatattcaagaacgcgacatttactttcacttgggccttccaaagaaccaaccagggacaggataatagacgattcattaacgacatggtgaagatctattctattaccgccaccaacgcagtggacggcgtggcgtcgtcttgcagggcatgtgccctcggctcggagcagtctgggtcttcctgcgtgccatgcccacccgggcattatatcgagaaggagactaatcagtgcaaagaatgtccgccagatacttaccttagtatccatcaggtttatggcaaggaggcatgtataccctgtgggcccggctcaaagaataatcaagatcatagcgtgtgctatagtgattgtttcttctatcacgaaaaagagaaccagtctctacactacgacttttcaaatctgagttcggtcggatcattaatgaacggcccatcattcacttcgaagggtactaagtacttccattttttcaatataagcttatgtggacacgagggcaaaaagatggccctatgcacaaacaacatcacagacttcacagtgaaagaaatcgtggccggctccgacgattataccaatctagtcggagcttttgtttgccaaagcaccattatccctagcgagtctaaggggttcagggcggcacttagctctcagagcatcatcctcgctgatactttcatcggggttacagttgagaccaccctgaagaatatcaacattaaagaagatatgtttccagtaccaacatctcagatccctgacgtgcactttttctataaaagctccaccgccacaacatcttgcattaatgggaggtctacggccgtgaaaatgcgctgcaaccccaccaagtccggggctggcgtgatttctgtgccatcaaagtgtcctgccggcacatgcgatggatgcaccttctatttcctgtgggagagcgccgaggcatgtccactatgcactgagcacgatttccacgaaattgagggcgcctgcaaacggggctttcaggagactctgtatgtttggaatgagccgaagtggtgtataaaaggcatttcattaccagagaagaaactggcaacctgtgagacagtagacttttggttaaaggtcggagcaggggtaggcgctttcacggcagtgttgcttgtggctctcacctgttacttctggaagaaaaatcagaaactggaatataaatattccaagctggtgatgacaaccaacagcaaagagtgcgagctgccagctgccgacagttgcgctattatggaaggcgaagacaatgaggaggaagtggtatattctaacaaacagagcctgcttggaaagcttaaatcactggccactaaggagaaggaggatcatttcgagagtgtccagctgaagacgtcccggtcgccgaatatctag

SEQ ID NO: 130433 - DNA, 336 bp, synthetic construct
  misc_feature 1..336: note = Description of Artificial Sequence: Synthetic coding sequence
  source 1..336: mol_type = other DNA
atggtccgcacaaaggcggactcagtgccaggcacttatcggaaggtcgtagccgcccgagcccctcgcaaagtacttggctcgagtacttctgctactaactctacctctgtgtcttcccggaaagcagaaaacaaatacgctggcggaaatccagtgtgtgttcgacctacccctaagtggcagaaaggaataggagagttcttccggctgtctcccaaggactcagagaaggagaatcagatccctgaggaggctggaagtagtggtctgggcaaggccaaacggaaggcctgtcctttacaacctgatcacactaatgacgaaaaggagtag

SEQ ID NO: 130434 - DNA, 2772 bp, synthetic construct
  misc_feature 1..2772: note = Description of Artificial Sequence: Synthetic coding sequence
  source 1..2772: mol_type = other DNA
atgtctcagttcaagcgtcaacgaattaacccgctcccagggggccggaacttttccggaaccgctagcacatcattgctgggtcccccaccaggcttgctcactcctcctgtggccactgagctgtcgcagaacgcacgtcacctgcaggggggcgaaaagcagagagtcttcactggaattgtcacatccctgcacgattatttcggcgtggtagacgaggaagtgttcttccagctcagcgtggtgaaggggaggctacctcagctcggggaaaaggtgctggtgaaagctgcctacaaccctggtcaggccgtaccatggaacgccgtaaaggttcaaaccctctcaaatcagcctttactaaaatccccagccccacctctgctccacgtcgctgcccttgggcagaagcagggcatactgggagctcagcctcaactgatctttcagccgcatcggattccaccactcttcccccaaaagcccctctccctcttccaaacctcacacacactgcacctctcccacctgaacaggtttcctgcgcgggggccacacggcaggctggatcaaggaaggtccgatgactacgattcaaaaaagagaaaacagcgagctggcggagaaccttggggcgccaaaaagcctcgacacgatctccctccctatcgtgtccatcttaccccgtacaccgtcgattcgcccatctgtgactttctagagctgcaaaggaggtaccggtccctgctggttccctctgactttcttagcgtgcatttatcgtggctttcagctttccccctgtctcagcccttctcactccatcacccctcccgcatccaggtgtcttccgagaaggaagccgctccggatgcaggcgctgaacccatcaccgccgattccgaccccgcctactcatcaaaagtgctcctgcttagtagtcctgggctggaagaactttaccggtgttgtatgttgttcgtagatgacatggccgagcctcgagagactccagaacacccattgaaacagattaagttcttgttaggcagaaaagaagaggaggctgtgctagttggaggcgagtggtctccatctctggatggtctggacccacaggccgacccccaagtgctggtgaggacagctatcaggtgcgcccaggctcagactgggatcgatctatccgggtgcacaaagtggtggagattcgcggaatttcagtatttgcagccgggcccacctcgacggctgcagacggtcgtggtgtacctgcccgatgtgtggaccataatgcctactctagaggagtgggaagcattgtgtcagcagaaagctgcagaggcggcccctcctactcaggaggcgcagggagaaacagaacctacagagcaggctcctgacgccttagaacaggccgccgatacgagtaggcgaaacgcagagacaccagaggccaccactcagcaggagaccgacaccgatcttccggaagcccctcctcctcctttggagccagccgtgatcgctcggccgggctgcgtgaaccttagcttgcatggtattgtcgaggaccgtagacctaaagaaaggatctcgttcgaggtcatggtccttgcagagctgtttcttgagatgctgcagagagacttcgggtacagagtgtataagatgctcctttcactgcctgagaaagtcgtctcacctccagagcctgaaaaggaagaggctgctaaagaagaggctacaaaggaggaggaggctattaaagaggaagtagttaaggaacctaaggacgaagcccagaatgagggccctgctacagagtctgaggcgccgttgaaggaagatggcttgctccctaagccactgtcgtccggaggagaagaagaagagaagcctaggggagaggcctcggaagatctgtgtgagatggcactggacccagaactgctgcttttgcgtgatgatggcgaggaggaatttgccggcgccaagctcgaggactccgaagtccgatcagtggcaagcaaccagtcagagatggaatttagttcactgcaggacatgccaaaggagctggacccttccgcggtactccctctcgactgtttattagccttcgtgtttttcgacgcgaattggtgtggctatttgcatagacgagatcttgagaggatcttactgaccctcgggatacggctgtcagctgaacaggctaagcagctggtcagtagggtcgtgactcagaatatctgccaatataggtcattgcagtatagtcgacaagaaggcctggatggaggcttaccagaagaggttctcttcggaaatctagacttattgcctcctcctggcaagagtacaaagcctggagcagcccctactgagcacaaagccctggttagtcataatggatcattgattaatgttggctccctccttcagcgtgctgaacagcaggattccggcaggttatatctagaaaataagattcacaccctcgaacttaaactggaggaaagccacaacaggttttccgccaccgaagtgactaacaagacattggcagccgaaatgcaggagctgagggtacgacttgccgaggctgaggaaacggcacgcactgcggagagacagaagagccagctccagcggctgctccaggagctgcggcgacgtcttactccccttcaactggaaatccagagagttgtggagaaagccgattcatgggtagagaaagaggaaccagcgccatctaattag

SEQ ID NO: 130435 - DNA, 3480 bp, synthetic construct
  misc_feature 1..3480: note = Description of Artificial Sequence: Synthetic coding sequence
  source 1..3480: mol_type = other DNA
atgctcgacttcttagccgaaaacaatctgtgcggacaggctattcttcggatcgtaagttgcggtaacgccattatagcggagttgttgaggctgtcagagtttattcctgccgtgttcagactaaaggatagggcggaccagcagaagtacggcgatatcatttttgatttctcttatttcaagggccctgagctgtgggagtcaaagttggacgcgaagccagagcttcaagacctcgacgaagagtttagagaaaacaacattgaaatcgtaaccagattttaccttgccttccagtctgtgcacaagtatattgtggatctgaatcgctaccttgacgacctgaatgagggggtgtacatccaacaaacattagaaaccgtgttattgaatgaggacggaaagcagcttctatgtgaggctctctatctgtatggagtcatgctcctggtcatagatcagaaaatagaaggagaggttcgagaacgtatgcttgtctcttactacagatacagcgcagcccggtcttcagctgatagtaacatggatgatatttgtaaactccttcgttccactggatatagttcacagcccggcgctaagagacccagcaactaccctgaatcctactttcagagggtgcccataaatgagagctttatatcaatggtgatcggtcggctgcgttccgatgacatctataaccaagtgagcgcctaccctcttcccgagcacagatccaccgccctggcaaaccaggcagccatgctgtatgtgatcttgtattttgagccaagcatcttgcacacccaccaagctaagatgcgggaaatcgtggataagtatttccccgacaactgggtaatatccatatatatgggtatcaccgtcaatctcgtggatgcttgggaaccttacaaagcggctaaaacagctttgaacaacacactggatctgagtaatgtccgcgaacaggccagcaggtacgccacggtcagtgaacgcgtacacgcccaggtccaacaatttctgaaggagggttatttgcgggaggagatggtgcttgacaacattcctaagctattaaactgtctgcgcgattgcaacgtagccatccgatggctcatgcttcacacagccgatagcgcatgtgatccaaacaacaagcggctacggcagattaaagaccagattctcacagattctcgctacaatccacgtatcctgttccaattgttgttggacacagcccaatttgaattcatcctgaaagagatgttcaaacagatgttgtctgaaaagcagacgaaatgggaacactataaaaaggaaggatccgaacgcatgactgaattggctgatgtgttctctggtgtaaagccgctgacccgcgtcgaaaaaaatgaaaatctgcaggcgtggtttcgggaaatctcaaaacagatcctcagtctgaactatgatgattccaccgcagccgggaggaaaaccgtccagctgatccaggctctggaagaggtgcaggagttccaccagctggagtctaatctacaagtctgccagttccttgccgatacccggaagtttctacatcaaatgatccgcacgattaacatcaaggaagaggtcctgattaccatgcagatagtgggcgacctgtcatttgcatggcagcttattgactccttcacttcgattatgcaggagtctatccgagtgaatcctagtatggtcaccaaactccgcgccactttcctcaagctggcctcggccctggatctcccactgctgcggatcaaccaagccaactctccagatctcctgtctgtgtcacagtactattcgggagagctggtgtcctatgtccggaaggtcctgcagattattccagaaagcatgttcactagccttctaaagattattaaactgcagacacatgatatcattgaggtgcccacgcggcttgataaagataaactccgcgattatgcgcagctcggacctcgctatgaagtggcgaagctgacccacgccatctcaattttcaccgaggggattctaatgatgaaaacgaccctggtagggatcataaaagtcgaccccaaacagctgctcgaggacggaattaggaaggaactcgtcaagagggttgccttcgccttgcacagggggctgatctttaaccctagagccaagcccagtgagctgatgccgaaactgaaggagctcggcgccactatggacggcttccataggtctttcgagtacatacaagactacgtaaatatctatggcttgaagatttggcaggaggaggtgagcagaatcatcaactacaacgtcgagcaggagtgtaataatttccttcgtactaagatacaggattggcagtccatgtaccagtccacccacatacctatcccaaagtttaccccagtagacgaatcagtgactttcatcgggcgcctgtgcagagaaatattgcgcatcaccgatcctaaaatgacttgtcacatcgatcagcttaacacctggtatgatatgaaaacacaccaagaggtgacctcctctaggctattttctgagattcagacaaccctcggcacatttggcctaaacggattagaccgtttattgtgcttcatgatcgtcaaagaactccagaacttccttagcatgtttcagaagatcattcttcgcgatagaacagtgcaggacacactgaaaaccctgatgaacgccgtcagcccccttaagtctattgtggccaacagcaataagatttacttcagcgcaatcgcgaaaactcaaaaaatctggactgcctatctcgaggccatcatgaaggtggggcagatgcagatacttcggcagcagatagccaacgaactgaactattcctgcagattcgatagcaagcatctcgcggccgccctggagaacttgaataaagcgcttctcgctgacatcgaggcacactaccaggatcccagcctgccctatccgaaagaggacaataccctgctgtatgaaatcaccgcatatcttgaagcagcaggcatccataatccactaaataaaatctacatcaccacaaaacgtctgccctacttccccattgtgaatttcctgttcctgatcgcccagctgcctaaattgcagtacaacaagaatcttgggatggtctgccgaaaaccaactgatcccgtggactggcctcctctggtgttgggcctgttaacattgctgaaacagttccacagtagatacactgagcaatttttagccttgatcggccagttcatctgctccactgtggaacaatgtactagccaaaagattccggaaatcccagccgacgtagtaggcgcattactgtttctggaagactacgttagatacacgaagctcccacgcagagtggccgaagcacacgtgccgaatttcatttttgacgagttcagaaccgtcttgtag

SEQ ID NO: 130436 - DNA, 2424 bp, synthetic construct
  misc_feature 1..2424: note = Description of Artificial Sequence: Synthetic coding sequence
  source 1..2424: mol_type = other DNA
atgttctctgcgggtgccgaatccctgctccaccaggccagggaaatacaagacgaggagctgaaaaagttctgcagcagaatatgcaaattgctgcaagccgaggatctggggcccgacacccttgatagcttacagaggctgttcctgattatctcggccacaaagtactctcgaaggctggagaaaacctgtgtggaccttctgcaggccactctaggactgccggcttgccctgagcagttgcaagttttgtgcgctgcaatcctgagagagatgagcccatccgattctttatctttggcgtgggatcatactcaaaacagccgacagttgtctcttgttgccagtgttctgctggcacagggcgatcgcaatgaggaggttcgtgcagttgggcagggggtgctcagggccctggaatccaggcagcctgagggacccagcttgcggcacctccttcctgtgatggcaaaggtggtcgtcctcagccctggcactctgcaggaagaccaggctaccctgctaagcaagcggctggttgactggctacggtacgcgtccctgcagcagggcctccctcacagcggaggctttttttccacaccgagagctagacaaccggggcccgtaactgaggtggacggtgccgtagcaacggacttcttcaccgtcctatcttctggtcacagattcacggacgatcagtggctgaacgttcaggccttttcaatgctgagagcctggctcttgcactctggccctgaggggcccggcacattggataccgatgacaggtctgaacaagagggatccactcttagtgttatttccgcaactagctccgctggtagattattgcctccccgagaaaggctgcgtgaagtcgctttcgagtattgccagcgcttgatcgaacagtcaaatcggcgggcccttaggaaaggggacagcgatttacagaaggcttgccttgtcgaggctgtgctcgtgctggacgtcttatgtagacaggatccctcttttctgtatagatccctcagttgcctcaaagccctgcacggaagggttaggggggatcctgccagcgttagagtgctgctgcccctcgcccacttcttcctgtctcacggcgaggccgcagcagtggatagcgaagccgtgtaccagcacctcttcacacggatccctgttgagcagtttcactcacctatgctggccttcgaattcattcagttttgccgggacaacctccacctgttctctggacatttgtcaaccctcagactttctttcccaaacctgttcaagtttctggcctggaactctccgcctttgaccagcgaatttgtggcactactcccagccctggtcgacgccggaacagccttggaaatgctgcatgccctcctggatctgccctgcctgacagcagtcctcgatctgcagctgcggagcgctcctgctgcctccgaaagacctctatgggatacctcgctgagggcaccatcttgcctcgaagcctttcgcgatcctcagttccagggacttttccagtacctcctgcgccctaaagcctccggggccacggagagactcgcaccactccaccagctccttcagcctatggccggttgtgctcgcgtggcacaatgcgcccaagccgttccaacactgcttcaggccttcttctctgcggtgacccaggtggccgatggctcattgattaaccaactggctctgttgttactgggccgaagcgattcactctaccccgcccccggatacgctgctggggtgcactccgtcttgagtagtcaattcttggccctgtgtacgctcaagcctagtctggtggtggagctagccagggacctcctggagttcttgggatctgtgaacggcctctgctctagagcaagtcttgtgaccagtgtggtgtgggccatcggtgaatacctatctgtgacctatgaccggaggtgcactgtggagcagatcaacaaattttttgaagcattagaggcgctgctcttcgaggtaacccaatgccgtccatctgctgccctgcctcggtgtccgcctcaagttgtaacagtcctgatgacaactctaaccaagctggctagtaggtctcaggacctcatccctcgggccagcctgcttcttagcaaaatgcgaaccctggctcattcaccggccacatccagcacacactccgaagaaggagccgaggctatcaggacgagggctacagagttgctgacacttctgaagatgccctcggttgcccagtttgtgctcacaccttctaccgaagtgtgttcacctagataccaccgagacgctaataccgcgctcccactcgctctccggaccgtgtccaggctcgtggaaagagaggctggcctcatgcccgggtag

SEQ ID NO: 130437 - DNA, 4086 bp, synthetic construct
  misc_feature 1..4086: note = Description of Artificial Sequence: Synthetic coding sequence
  source 1..4086: mol_type = other DNA
atgggtgccgcgggtaggcaggactttctgtttaaggctatgttgactatcagctggcttacactgacatgttttcccggtgcaacctctactgtcgccgcgggctgtcctgatcagagccctgaactccagccttggaacccgggacacgatcaagaccatcatgtgcacataggccagggaaagacactgttgctgacaagctctgccaccgtgtatagtatccacataagtgagggcggaaagctcgttatcaaagaccacgatgagccaattgtactccgtactagacacattctgattgacaacggcggggagttgcatgcagggagtgccctctgtccgttccaaggaaatttcaccattatcctttacggccgagccgatgagggcatacagccagatccttactacgggctgaagtatattggagtgggcaaaggcggagcactagaactgcatggacaaaagaaactctcgtggacattcctgaacaagacgctgcatccaggaggtatggctgagggtggatactttttcgagcgctcatggggccatagaggagttattgtgcacgtgatcgaccctaagtctggcaccgtgatccatagtgaccgattcgatacttacaggtcgaaaaaggaaagcgagcgactggtccagtacctcaatgccgtccccgacgggagaatcctgagcgtggctgtaaacgatgagggcagccggaacctggacgatatggcgaggaaggctatgactaaacttggaagcaagcatttccttcatcttgggtttaggcacccatggtcgttcctgaccgtcaagggaaatccttcctctagtgtcgaagatcacatcgagtaccacgggcaccgtggctcggcagcagcaagagtgtttaagttgttccaaactgagcacggcgaatatttcaacgtttcactaagctcagagtgggtgcaggacgtggaatggaccgagtggttcgaccatgataaggtgtcccagaccaagggcggggagaagatctctgatttgtggaaagctcacccagggaaaatttgcaatagacctatagatatccaagcaacaactatggatggagtaaatctttctaccgaggtggtgtacaaaaaaggacaggattatcgattcgcatgttatgaccggggacgagcgtgtcggagctacagagtccgcttcctttgcggtaaacccgttcgccctaagttgacggtaactattgatactaacgtcaacagtactatcttaaacctggaagacaatgtgcagtcatggaagcctggggatacattggtcatcgcaagcaccgactactctatgtatcaggcagaggagtttcaggtcttaccctgcaggagctgcgcacccaatcaggtgaaggtcgctggcaagcctatgtacctgcatataggagaagagattgacggtgtcgacatgagagcagaggtgggcctgttgtcgaggaacatcatagttatgggtgaaatggaggataagtgctatccatataggaaccacatatgcaactttttcgacttcgatacttttggcgggcatatcaagttcgccttgggcttcaaagccgcccatcttgaaggcaccgagctgaagcacatggggcagcagctcgtgggtcagtaccctatacatttccacctggcaggggacgttgatgaacgcggcggctacgaccccccaacttatatcagggatctgtcaatccaccatacgtttagccggtgcgtgactgttcacggatccaacggactactgatcaaagacgtcgttgggtataattctctgggccactgcttcttcaccgaagacggtcctgaggaaagaaatacatttgatcactgcctggggctcctagtgaaatcgggcaccctgctcccttctgaccgcgactcaaaaatgtgtaagatgattaccgaggattcgtaccccggctacatcccgaagcctcgccaggactgcaacgctgtatcaacattttggatggctaacccaaataataacctcataaattgcgcagccgccggaagtgaggagacaggattttggtttatctttcaccacgtaccaaccgggccttcagttgggatgtatagtccagggtactctgaacacatccccttgggtaagttttataacaatcgtgcccacagtaactatagagccggaatgatcatcgataacggcgttaagacgacggaagcttccgcaaaagacaagagacctttcctatccatcatttccgcgaggtacagcccgcaccaagacgccgatccactgaagcctcgggagccagcaattatccggcactttatagcatacaagaatcaggaccacggtgcctggttaaggggaggcgatgtttggctggattcttgtcggtttgctgataacgggattgggttgaccctcgcaagtggcggcacattcccgtatgacgacggttcaaagcaggagatcaagaattcgctgtttgtcggggaatctggcaacgtagggactgaaatgatggacaacaggatctggggcccggggggacttgatcactccggtaggaccctacctattggccagaacttcccgattagaggcattcagttgtatgacgggccaattaatattcagaattgtacttttcgcaagtttgtggctctcgaagggagacatacatctgctctagcgttccgcctgaataacgcttggcaatcttgcccacataataacgtgacgggtattgctttcgaagatgtgcctatcacttcccgggtgttttttggtgagccgggcccatggttcaatcaactcgacatggacggagacaagaccagcgtgttccacgatgttgacggcagtgtcagcgagtaccctggcagttacctgacaaaaaatgataactggctcgtgcgccatccagactgcattaatgtaccagactggcgtggcgcaatttgctccggctgctacgcacaaatgtatatacaggcctataagaccagcaatctgcgcatgaagatcattaagaacgattttccctcccatcctctttatctggaaggcgcactcaccagatctacccattaccagcagtaccagccagtggtcaccctgcaaaagggctatactattcattgggaccagactgcccctgctgaactagcaatatggctcatcaacttcaacaagggtgactggattcgagtcggattgtgctacccgcgagggacaaccttcagtattctctctgacgtgcacaacaggctgctgaagcaaacatctaaaaccggagtctttgtgcgcacattgcagatggacaaggtggaacagtcataccccggcaggagtcactattattgggacgaggattctggcctcttgttccttaaactgaaggcacagaatgaacgggagaaattcgccttttgcagcatgaaaggctgtgagaggatcaagatcaaagcactcattcctaagaacgccggggtgtccgactgcacagccacagcttaccccaagtttacggagcgcgctgtcgtggatgtgcctatgccaaaaaaactgttcggttcacagctgaaaaccaaagaccacttcctcgaagtaaagatggagtcaagtaagcagcacttctttcatctgtggaacgactttgcttacattgaggtggatggcaaaaagtatccatcaagtgaagatgggatccaagtcgtggttatagacggtaatcaagggagagtagtgagccacaccagctttcggaattccatcctccagggaatcccctggcagctttttaattacgtggcaacaattccagataacagcattgttctgatggcatctaaaggcaggtatgtgtcccggggaccgtggactagagtgttggagaagctgggcgcggacagaggactcaaactcaaggaacaaatggcattcgtcgggttcaaaggtagctttagacccatctgggtgacgctcgacaccgaggaccataaagccaagatattccaggtggttcccattcccgtggtgaaaaagaagaagctgtag

SEQ ID NO: 130438 - DNA, 1866 bp, synthetic construct
  misc_feature 1..1866: note = Description of Artificial Sequence: Synthetic coding sequence
  source 1..1866: mol_type = other DNA
atggccaacgtgccttgggccgaggtgtgcgaaaagttccaggcagcactcgccctaagccgcgtcgagctccacaaaaatccggaaaaagagccctacaagtccaagtactctgcaagggcactgctggaagaggtcaaggctttgcttggtccagcacccgaggatgaagacgaaagaccagaggccgaggacggccccggtgccggtgaccatgccttaggcctgcccgccgaggtcgtggagccggagggtcccgtcgcccagcgggccgtacgccttgccgtgattgaatttcatttgggcgtgaaccatatcgatacggaggaactcagcgctggcgaagaacacttggttaaatgccttcggcttctgaggagatatcgactgagccacgattgtatcagtctgtgtattcaggctcaaaacaacttagggatcctttggtcggagcgcgaggagatagagaccgctcaggcatatctcgaaagcagtgaagctctctataatcagtatatgaaagaggtggggtctcctccgctcgaccctaccgagcggttccttcctgaagaggagaagttgacagagcaggagaggagtaagagattcgagaaggtttacacccacaacctgtactatctggcccaagtgtaccaacacttggagatgtttgaaaaagccgcacactactgtcactctactttgaaacgacagctggagcacaatgcctatcaccctattgagtgggccataaatgcggccactctgagccagttctacatcaacaagctatgtttcatggaagcccgccactgcctgagcgctgccaatgttattttcggccagacgggcaaaatctcagccaccgaagatactccagaggccgagggggaggtcccggaactttaccaccagcgtaagggggagatcgctaggtgttggatcaaatactgtttgaccctaatgcagaacgcccagttaagcatgcaggacaatatcggggagcttgacctagacaaacaatctgaattacgggctctacgtaaaaaagaattggacgaagaggaatccatacgtaaaaaagcggtgcagtttggcacgggcgagttatgtgatgcaatttccgcagtggaagaaaaggtcagctatctcagaccacttgactttgaggaggccagagagctgttcctactgggccaacattatgtgttcgaggcaaaggagttctttcagattgatggatatgtaaccgatcatatcgaggtcgtgcaggatcattcagccctttttaaggtcctggccttttttgaaacagatatggagcggcgatgtaaaatgcataagcgccgcattgctatgctggaacccctgactgtggacttaaacccacagtattacctcctggtgaaccgccagatacagttcgaaattgcacacgcctattacgacatgatggacttgaaagttgcaatcgcagatcgacttagagatcctgacagccacattgtgaagaaaatcaacaatcttaataaatcggcccttaagtactaccagttattcttagatagtctcagggaccccaataaagtcttccccgaacacattggggaagatgtcctaagaccagcaatgctggctaagttccgggttgcgaggctgtacggaaagatcatcaccgccgacccaaagaaagagctggaaaatctggcaacttcacttgaacattataaatttattgtcgactactgtgaaaagcatcccgaagccgcccaggaaattgaggttgaactggagctgtctaaggagatggtgagcctcctccccaccaaaatggaacggttcaggaccaaaatggctcttacatag

SEQ ID NO: 130439 - DNA, 4551 bp, synthetic construct
  misc_feature 1..4551: note = Description of Artificial Sequence: Synthetic coding sequence
  source 1..4551: mol_type = other DNA
atggataaccagcaggacaaagcaatagtggcgtcagctaatggcgaaaacactctaattaacggagtcaaagagaacgactcagaagaccaagatgtcgccatgaaaagctttgccgcgctggaagcagccgccccgattcaacccacaccagtcgctcagaaagagacattgatgtacccgcgagggctgttgccgttgccaagcaaaaaaccctgtatgcagagccccccctcacctctgggactgatagaagcccctgagcatgctgccaacagtgcgagtgtgaatgcaatttcattaacatctgggatcgcaaaaggtttaaatacatggtcactccccaacgaatgcgagaaagccccctttgctataatggaacctgcgggcatgagtgcgctcaacggagactgtctcatgcaaccatccagaacgtgtctgggttgttttatggagtctaaggacgccgtggaccccgagcccgggatctctctgaaggttggagacttgaaccgggactacgaaacttgcgctgtatcagatatcggaatccagtgtattaatgctggtgaaaacatgaagtatggcgaacagctgctgagcgaccagctgctgggatttcctctgcacaagagccgggccggcgacagacgtgaaaccgaaaaacccgacatcgatctggaggatcctgcgcagaaaagctattatgaagccttactgctggataagtgtaacaccgaagaggctctgctggccaatagcaaccaggactgggggtactttgagaccttcatcagtgaaagcaagattgagttgctcgatctctgctcaaaaaacgaactctcagtcaaccttttcagcgaggaagacgttgacaattacatgttcgacgacgatgagtccacattgggctccgacgtctgtagccttaaaattcgctatgagtcattccaagacaacgtccgcgacaagactacattgctcatgcaagaagacgcgcagttcaacttcttcccatcagtttttacgacgtgtcccaagcgggaatccaagtcaggggccctgaagcagtcgagcgacttttcacagttcaaggtgcccgacgtgtccattatttggggcgaggaggacaaaaatttagacaaaaagaagggcaaggaggagggtcaggaggataagggcgtagaaaagaaggatggaaaggacaatggtgagaagcccgctttaaacaaaccttgctcaggaacagaggtcgagcagcttaaaaaccctaaacagggacaccttgccaattccctagagaccagcggcagtttttcagacgactcctcattcattgagattagctatgatgcaatgggagaaattaaagattgctctcggtatatggcacgagacacaaacagcggttcctccagttcgcaacagaattacggactaagagcaaaaaggaaggtacgatatagtgaagattatctctacgacgtggacagtttggaaggtgagaaggtcaacgaacggaaagagtggctccctgtcggtagtaaggaagaagacgacgacgaatggtgtcctaaaaagaggcggaaggtcacccgaaaagagccaccggtgatcataaagtatataatcattaaccggttcaaaggcgagaagaatatgctcgtgaagctcgggaaagtggacgccagcgagaccaccgtgaatctgtccgagaatcagctcaacaagtacgctaaactggctcctcttaagggtttttggcaaaagaaaaaaaagcagaggaatacgaacacagactctatcaagacacccttttcccagaaacagagcttcgagcctggctcttttgaggtgagcttccttcctcctgctaggaagcggaagtccaaactgggtaatcgccaccgcatccagcgtatccctagcattgagataagcgcctcttccaagcagatctctctttgcaacgaccagaggcacgccagcaatcataaggaagacggcgggctaaaaggcactttaaaatctgcgcctctgggggccccatcatgtgccaacggatcccacttaaatgatattacgggccccgatagcgttaaggtcaaggcacaggataccgagtttaaagggcctgagaggaaagtgctgaataagatcaagttcaagtccgaggctagattgaagagtaagaaggtgaaggcagcaggccaggaatcaaagcccattgtgcagatgagtccattgctggagaatcaatcgagtaaagctaacctgaagaacgaggtgatcccgggaacctcaaactcctcccgcctaagcgaatttcatgaggcgaaagccgccaaatcaagcacctttctgcctaccacctgttctagcgaaatgcccttgtcttccgctaatgtaacaaccaacatcccagtcatcccgggcggatatctacagacacttttagacgcttcagatctctccaacaatacttccatctcctacttctcccaccattcccctgagcagaatgaaggatcactgacacagacagagaagagctttgtcccgttacaacctacgcaggattgtgtgttgacgtcctcgtctgatagcgagcttcagcagtctagtcacaatttcaagatggaatcttccaattacagaaacgtgtggcctaacaaagccacatccgggacacaggagtttatggctgaggtgtcgcgagaaattgcccccacccagtccagcgagttcggtgcatcacaagtggtgtcaatggaaaataatctgactccgacaacctacaatcctatatgcctgaacagcggtggatcgaattgtaataaggtcctctacgattccatgcaggatacacagttacccagtgacgatagctatcagctgtgccactttaataacggcgagatttgctttccttttcaacagggccctgtgaacatggatgatggccggttattcagctttgactccatggctcccctttctgtgtcgtccagtaattactgttcccttagcttgaagtcttgtgagaaagacggggacgacgatattaccgatgacttccttgctcactgcagcccaaagcttgtgatccagcagtccatcgatgaaatcgcgccactgaaagagtcaacagatctgcttgatatctccaacttcaccccagacaaattccggcactcttcactgagcgaaatgtctcctcctgacaccccgtccctttccccccagatcaccagatgcgaatctatgaaaaccctcgggaccctgaaaggattccaggagggcgtgccagggccacttgactcagtggagaaaattaagtgggactgcagcacactttcccgccaagtccaaatggaagatggttttacacttaacaaccaccagttccagttccacatgttcaatgatgaggactctgtgtctcttctacagaaaaacccctgcctgtctaccttcaatgatccgagcgggcaaatttccacgaacaataaggtgtccaaaagcagaaaaaagtcctctccctcaaagtctggcgctatgaaccagtcttccagccagaagaacactagaaagaagtctcttaaaggcaacaataaagggatcgagaagccaccaggaaaaaactctcgtcaggtgccaaagtcgactaaaaaggggaaatacatggctgccataaacggcgagaagatgcagataggaataggtaggggcggttcgcaaaccaacactatctctagtacggggaagacccttgcggaatgcattcagcacgggggccccatggccagtatgaagatgcccagccagaaggggttgtcaggggactgggcacttggaaaggaatccagtcccggctggtccgacatgagcatggggactaacacgaacagcctactggatgacgaccagcgagagttccaggagcccagttatatcttgtcaaatattgcgtcggggatggccgacgtgcagcggtttatgatggcctccatcgagcccctgtgggagcctatggaacatcacggagacccgaacatattttattcccccgaaagcaacagtcttaagctcaaaacccttaaaatcctggcagggactccacaagagagtaagaaaaagattaacagcggaagtcagggagccaccaaaaaccaccggagcattaaaggggttagtaaaagtaatggcaaaacagctataggggatccggggcgagccaatatgcctggatataacgaagacagcaggtcaacgttcttcgacaagaagtattcaaatatgagtactcttggcaataacgggcctacccacaagaaactgtaccgtcataaaagctcatccaaagccctgcgagacgaaaaatgcaaagggaaacatatggaacgagaacaggtgcacaaggatgagtcaggaactgcttcatttgaaaaacttcgagactcagattacaatcttctcaaagctgagacaactttttgggtgcttccagttttcgaggaggaaacgcgaatctttcaaaaggatatctag

SEQ ID NO: 130440 - DNA, 4080 bp, synthetic construct
  misc_feature 1..4080: note = Description of Artificial Sequence: Synthetic coding sequence
  source 1..4080: mol_type = other DNA
atgtactccgtggaggacctgcttatcagccacggctacaagctgtcgagggaccctcctgccagccgagaggataacccgaagggacgacaggccgcccggacaggtacccgggccgggcagggattacagaatgggcacgaagacggtccagcagcgcttgcccataggaagacaagtgctggaaagggacacgtatccgacagcgagtctcgcaggtctactcctcgaggccatggtgaacctcagtccacaagtgcgtcaagaaccagtgaggctggcttctgtaatcagccgccctcagcatggtcctcccaccccccaactgggaatgaccaggcctaccggaggcgggggcgtcaggaggcccggtcacagaagcctagagagcacgagaacctggaagcaagaggcatggcccaggcccactcgctgcccgtgcatgtcagggaaggcccctgggaagttggtgggaggtcggagcatgtgatgaagaaacctgtgtgggaggaggaactaagaatgtccggccctgctaagtggcagaatgtttcgctagagagctggaaccagccccggaagttgggaagacaaatgagtgatggcgacggtgagcgcctatttcaagatttatatcccttcatccagggcgagcatgttctcaatagccagaacaaaggtaagtctcgaagtctgcccagggtcctcagccctgagtctttaagctgcaccgagatcccgattcccctgaatgagagacactcaccgaaaatgcccccatatcctcctacctgtgcccccaatcttgatagtaccagaaactcagaaaaatcaggttgctccgccccttttccaagacctaaatttggacgtccactcaaacccccatcatatagcagtcaccagcagtccagaggcggtgccgacagtagcgactcccaggacagccagcaaatggacgcgtacgtgccacgacatgagctatgcctgtcagaccctgggctagaaccgcctgtctatgtgcctccccccagttatcgctctcctccgcagaatatacccaacccttacctggaggacacagtgcccataaatgtttgtggagggcattcacaacagcaatcccccacagaaaaggctggcgcatccgggcagcccccttcaggacctccgggcacaggcaatgagtatggagtttctcctaggctgccccagggattaccagcccacccccggccggtgacggcatacgacgggttcgtgcagtacattccctttgacgatccccgtctgcgacactttaagctagcacaaccccaggggttttgtgaagacatcaaactggacgacaagagctataactctagtccagtaaccgcccaagagccagctcatggaggaatgcagcccgatggggccatctggaatccgcagtccctcatacctcctagcggggatgaacgtggactcgtgttggctgacagctcaccacgttggctttgggggcaacccccgggagacggcgagaattcgggactgccgaatcagagggaccgctgtgtggcgcggggacagtggcccgacgtcaggggctcccagcatgggcacaccggccgacaggtctcctccccctactcacagggagagagtacatgtgaaacccagaccaagctgaagaaatttcagacagggactagaactaagaagagctccaagaagaagatgaacgagactatcttctgtttagtcagtatcccagttaagtcagagagtcaccttcccgacagggacatggacaacaatgatttaaagcccagtgccgatcaaaaaaatgggtccgacaagagtccagctttgcaagaacagtccctcctgtccatgtcatctactgacctggaactgcaggcgctaacaggtagcatgggcggccggacggaatttcagaagcaggacctcggcgagccagaggaggatcgtcagacgaatgatcttagcttcatccacttaaccaagcatcgcgaattgaagcatagcgggagctggccagggcataggtaccgggatcagcagacccaaacttcctttagcgaagagcctcagtcttcacagctgcttccaggagctaaactcggagggccctcacgggcggcattgtcacctaaatgctcagatccagcggcatcggaagctcaaacccataccgccttcccaactggcgaccacaagcagaggcccagcgctagaaacctgaaggggcaccgctcgctgtcaccttcgtctaacagtgccttttcgcgcacaagtctttcggtggatcaggctcctacacctaaggctggcaggtctcagccttgcgtggacgtgcacggcctcggcgcacaccccggacccaagcgcgaggtggtcaaaggcgaacctacaggtccctgtaattccaagcagctgttcggccaatttcttctgaagcctgtttcacgcagaccttgggacctgatttcccagctggagagcttcaataaggaactacaggaggaggaggagtcctcgagcagcagtagctcgtcttccagttcatctgaggaaagtgaagccgagccacaacaggagaatcgggcgcattgtcgccaggaggatgtggggttccgaggcaactcaccggaaatgagggtcgagccccagccaaggatgtgggttcctgagagtccggtgtgtaggtctggccgcggagagagtaagtctgaatcgtggagtgaggaacttcagcctggccatccccgggcctggcctccttctcccggacgatttagggtggaagaaggaggcggggctccattctgcagcgccgacggcagcacatcagccgagaagcgacatctggaagtgagcaacggcatggacgagctggctggctccccatttcctgtcactaggatgtcgagcagaagctccgatgcaaagcctttgccagcctcctatcccgccgagccacgcgagccccaggaatctcctaaaattacgtccgcattctctagtgttaaaccttctgaggctgtgccccggaagtttgatagtgggggggaaaggggggctggtctgcctctgtcactgtcaaacaaaaaccgcggcttgtccgcaccggatctgcgatcagtgggacttacacccggtcaggagcagggtgcatccgagctcgaggggtcactgggcgaggcttcgaccattgagataccaccaggtgagagcctgcaagctagagcagcccgtatactgggaatcgaggtagccgtggaaagtctcctgccagggatcaggcgggccggccagaatcagcctgccgagcccgacgcctcagcttgtacccccgaaagcccccaggaggagttgctctctaggcccgcgcctgcggatgtccctagagtcagtactgacgctttctatgggcgacgaaaatgcggctggaccaagagtcctctattcgttggagaccgggattcggccagaagagccccgcaggcttttgagcattctgacgtggacggtgttgtgaccagcaccgatcccgttcccgagccggagccgagccccctagagagtaaattctttgagcagaaggacgttgaaaccaaaccccccttccgcagcacgctcttccattttgtcgagcgcactccatccgtggctggatctgagaaaaggctgcgatcgccatcgaaggttattgaaagcctgcaagagaaactggcatctccgccaaggcgtgccgatccagatagactcatgcgaatgaaggaagtatcttccgtgtccagaatgcgcgtgctttcgttcagaaacgcggacagccaggaggacgctgaagaactcaaggccaccacccgcgggcaggcgggtcttcctggcggtctcgtgtctccaggctctggagaccgggcacaacgcctgggccacagcctcagcgtctcaaaggattcgatcagccgtgaagagaaggagcatccagctgctcagaaggagaaatccatggatcaggacttttggtgtccagacagctacgacccctcccgggttgagagagtatag

SEQ ID NO: 130441 - DNA, 3219 bp, synthetic construct
  misc_feature 1..3219: note = Description of Artificial Sequence: Synthetic coding sequence
  source 1..3219: mol_type = other DNA
atggcccccccaacgggggttctgagttctcttctcctgctggtgaccatagcgggctgcgccaggaagcagtgttctgaagggaggacatacagcaacgccgtgatttcgccgaatctcgagactacgcgaattatgagagtctcacacactttccccgtggtggattgtacggcggcctgctgtgacctgagctcatgtgacctagcttggtggtttgaggggcgctgctacctcgtcagctgtccacataaggagaactgcgaaccaaagaagatgggccctatccgcagttacctgacatttgtgctgaggccggtgcagaggcccgcccagctgctggattatggcgatatgatgttaaacaggggttctccttcgggcatctggggagactccccggaggatattcgaaaggatctcacatttctgggaaaggattggggactggaggaaatgagcgagtacagcgacgactatagagaactggaaaaggatctgttgcagccttccggcaaacaggaacctcgcggttccgcagaatacactgattggggcctcttaccaggaagcgagggggcctttaactcaagtgtcggcgattctcctgccgttccggctgagactcagcaggaccctgaactccattacttgaatgagagtgcttcaacacctgctcccaagttgccagagaggtcagtattacttcctctgccaaccaccccaagctcaggcgaggttctggaaaaagagaaggcttcacaactccaggaacagtcatcaaacagcagtggcaaagaagtcctgatgccctcacattctttgccacccgcatcactggagctctcctcagtgaccgtcgaaaagtcacccgtactgaccgtcacaccaggctccaccgaacactctattccaaccccccctacctctgcggcgccaagcgagtctactccgagcgagttgcccatctccccaacaacggcacctcgaacagtcaaggaactcaccgtctcagctggggacaatttgatcatcacacttccggataacgaagtcgaactaaaagcttttgtagcccccgctccgcctgttgagaccacttataactacgagtggaacttgatctcacaccctaccgactatcagggcgagatcaagcagggccataagcagactctcaacttaagccagctatccgtcgggctgtacgtgttcaaagtgacagtgagctccgagaacgcattcggggaagggttcgtgaatgttactgtgaaaccggcacgccgagttaatctcccacctgtagctgtcgtctctcctcagctgcaggagctcaccctcccgctcacctcagcacttatcgatggatctcagagcacagacgacactgaaatcgtgagctaccactgggaagaaataaacggcccattcattgaagagaaaacatcagtggactcgccggtgctgaggctgagcaacctggacccaggtaattactcctttagacttactgttacagatagcgatggagcaacaaactcgactacggccgctcttatcgtcaataatgctgtggattacccacctgtggcaaatgccggacccaatcatactattacccttcctcaaaactccattacgctcaacggcaaccagtcaagtgatgaccaccagatcgtcttatacgaatggtcactgggacctggtagcgaagggaagcatgtcgtgatgcagggcgtgcagacaccttatctgcatctcagtgctatgcaggagggtgattacacctttcagttgaaggtcaccgattcttccagacagcagtccacagctgtagttacagtgatcgttcagccagagaacaatcgaccaccagtggccgtggcagggcctgacaaggagctaatattccccgtcgagagcgctaccttagacgggagctccagttccgacgaccatggcatagtgttttaccattgggaacacgtgcggggaccctccgctgtggaaatggaaaacattgacaaagccattgccacggtcacagggctccaggtgggaacctaccattttagactcacagtgaaagaccagcaaggactgtcatccacttcgacccttacggtcgctgtcaaaaaggagaacaacagtccgcctagagcaagagccggtgggagacacgtgctcgtcctccctaacaactctatcaccttagatggctctcgttccacagatgaccagagaattgtgagctacttgtggatacgggacggccaatctcccgccgctggcgacgttatagatggatccgaccactctgtggctctccagcttacgaatctagttgaaggcgtgtacacatttcacctccgtgttacggattcccaaggtgcctctgacacagatacggcgacggttgaagtgcagcctgacccacggaaatcaggattagtagaactgacactgcaggtgggggtgggccaactgaccgagcaacggaaggatactctcgtcagacaattggccgtacttctgaacgtactggactccgacattaaggtgcagaagatacgtgctcactcagacctctccaccgtgatagtcttctacgtgcagtccaggccaccattcaaagtgctgaaagcagcggaggtcgcccgaaatcttcatatgcgtctatctaaagaaaaggcagatttcctcctgttcaaagttctgagggttgataccgccggctgtctgctaaaatgctcggggcacggccactgtgatccactcaccaagcgctgcatttgctcccatctgtggatggaaaacttgatccaacgttacatctgggatggagagtcaaattgcgagtggagtattttctacgttacagtgctagccttcactttaatcgtgcttacaggaggctttacatggctctgcatctgctgctgcaagcggcaaaaaaggaccaagattcgcaagaaaacaaagtatacaatcttagataatatggacgagcaggagcgcatggagctgaggccgaagtatggcatcaagcaccggagcacagaacacaattcttccttaatggtctctgagtctgagttcgacagtgaccaggataccatcttctcacgggagaagatggagcgaggcaatccaaaggtgagcatgaatggctctattagaaatggcgccagcttctcatattgctccaaagataggtag

SEQ ID NO: 130442 - DNA, 918 bp, synthetic construct
  misc_feature 1..918: note = Description of Artificial Sequence: Synthetic coding sequence
  source 1..918: mol_type = other DNA
tctcaactccccgttcgcgctgaggagcggactgaaagttgtctctggggctgctgggcttcgagccgagtgcggcgcacctctgacgcctgctcctcccctttggccaccagcagatccgcccggagctgcggtgtcctcaccgctcccgtcaaaggcgccagtagctccctagtggttaagctcgccgacacggaccgagaaagggcactccgtcgaatgcagcaaatggctggccatctgggggcgtttcatccggctccactgccattgggggcctgtggggcatataccactgctattctgcaacatcaagctgcacttctggcggcagcacaggggccgggtctggggccagtcgcggctgttgcagcccaaatgcagcacgtggcggctttttccttggtggcagcccctcttcttccggcagcagcagcaaactcacccccaggttccggccctggcacgttaccagggctgccagctcctattggtgtgaatgggttcggtcccttgacaccacaaacaaatggccagcccggaagtgacaccctgtacaataatgggctttctccctacccagcacagagccctggtgtggctgaccctctccagcaagcctatgctggtatgcaccactacgccggtccagagggctgcaatctcttcatctatcatctgccacaggagttcggggacgccgaactaattcaaaccttcctgccattcggtgctgtcgtctctgctaaagtatttgtggacagggctaccaaccagtctaaatgctttggctttgtttctttcgacaatcccacgtccgcccagaccgccattcaggctatgaatggctttcagatcgggatgaagaggttaaaggtccagctgaagaggccaaaggacgccaaccgcccttactag

SEQ ID NO: 130443 - DNA, 198 bp, synthetic construct
  misc_feature 1..198: note = Description of Artificial Sequence: Synthetic coding sequence
  source 1..198: mol_type = other DNA
atggtaagaactaaagctgactccgttcccgggacttaccggaaggttgtcgccgctcgggcaccgaggaaggtcctgggatcttctacatctgcgacgaactctacctccgtgagcagtaggaaggaacatgtgttgtgcaatctgattacccagatgatgaaaaaaaatagaactttctccttcatcttcgagtag

SEQ ID NO: 130444 - DNA, 15018 bp, synthetic construct
  misc_feature 1..15018: note = Description of Artificial Sequence: Synthetic coding sequence
  source 1..15018: mol_type = other DNA
atggaccagagaaagaacgagtctatagtgccaagcattactcagctggaggacttccttacggaacataacagcaacgtcgtgtggctactcgtggccactattttgagttgtggctggattatctatctgacctactataattcacgaaacgttggtctcatcttaactttggtactaaatcgcttgtataagcatgggtacatacacataggatcctttagcttcagcgtactctctggcaaggtgatggttagggagatctactacatcacggaggacatgtcaattcggattcaggacggatttattatttttcgctggtggaagatgtacaaccccaaacagaagcagcacgacccaaaggctgaaactaggctgtatattacagtgaatgactttgagtttcatgtttacaatagatctgatctgtacggccgcttacaggaactttttggcctggagccaactattattccccccaagaaagacgatgataaaacaagggaaatcggtaggaccaggactcagtctaagattgaaagagtgaaggtgaagacagaatctcaagatcccacctcctcatggaggagtcttatccccgtcattaaagtcaacgtgagcacaggtagactggcatttggaaatcattaccagcctcaaactttatgcataaacttcgatgatgcgttcctcacttacaccacaaagccccccagttctcatttagaccagttcatgcacatagtgaagggaaagctcgaaaacgtccgggtaatgttggtgccttccccacgttacgtgggcttacaaaatgatgaacctcccaggctgatgggtgaagggtttgttgttatgcaatcaaatgatgtggacatatattactatatggacgagcccggcctagtgcccgaagagaccgaggagaacatcgagggagagatgagctccgaggactgtaagctgcaagacctacccccatgctggggcctcgatattgtgtgtggtaagggaaccgacttcaactacggcccatgggccgatagacagcgtgattgcctgtggaaattctttttcccacctgactatcaagttctgaaggtcagtgagatagcacagcccgggaggcccaggcagattctcgccttcgaactgaggatgaacattatagcagatgctacaatagatctcttatttactaagaatagagagactaacgccgtgcacgtgaacgtgggggcaggctcatacctggaaatcaatattcccatgaccgtggaggagaacggttatactccagctattaaaggtcagctgcttcacgtggatgctaccacatcaatgcagtacaggacattactcgaggccgagatgctggcattccacatcaatgcgagctaccccagaatctggaatatgcctcagacttggcagtgcgagctagaggtttacaaagctacataccactttatatttgcacagaaaaatttcttcaccgacctgatacaggattggtcctctgattctccgcctgacattttttcctttgtgccttacacctggaatttcaagatcatgttccaccagtttgagatgatttgggccgccaaccagcacaattggatcgattgcagcactaaacagcaagagaacgtttacctggctgcttgcggcgaaaccctaaacatcgacttttccctcccctttacggacttcgtgcccgccacgtgcaacaccaagtttagcctgcggggcgaggacgtcgatctgcacttgttcctgccagattgccacccttccaaatacagtctgttcatgctcgttaaaaactgtcaccccaataaaatgatccacgatacagggatccctgctgaatgccagagtggacagaagaccgttaaaccaaaatggcgcaatgtcactcaggaaaaatccggttgggtggaatgctggacggttccaagcgtgatgctgactatcgactacacctggcatccaatctatccccagaaggccgacgagcagctcaaacaatctttgtcagaaatggaggagacaatgctaagcgttctgaggccatcacaaaagacgagtgatcgggtcgtgtcttcccctagcacaagctcccgtcccccgatcgatccttctgaactcccccccgataagctgcatgtggagatggaactgagccctgattctcagattacattatacggtcccctgcttaatgcctttctttgcattaaagagaattatttcggggaagatgacatgtacatggattttgaggaagtcatctcaagccctgtgcttagcctcagcacatcatcatcatccgggtggaccgccgtgggaatggagaacgataaaaaggaaaacgaaggcagtgccaaatcaattcacccactggccctacggccctgggacatcaccgtactggtgaacttgtacaaggtgcatgggcgactgcctgtccatggcacaacagacgggcccgagtgtcccactgctttcctggaacgcctgtgcttcgagatgaagaagggatttagagaaactatgctgcagctgattctgagtcccttaaacgtgtttgtgtccgacaattaccagcagcgacctcctgttgatgaggtgctcagagaaggccatataaatctgagtggactccagctgagggctcacgcaatgtttagcgcggagggactccccctcggctctgactccctggagtatgcttggctcattgacgtacaagctggatccttaacagccaaggtaacagccccacaactcgcatgtttacttgagtggggtcagactttcgtgtttcatgtggtttgtagggagtatgaactggaaagaccaaaatccgtgatcatctgtcaacatgggatcgatcgcaggttttgcgagagcaagctgtcctgcatccccggtccctgtcccacctccgatgatctcaagtataccatgattagactcgcagttgatggggcagacatttacatagttgagcacggctgcgctacgaacatcaagatgggcgctatccgcgtcgccaattgcaacctgcacaaccagtcagtgggggaggggatctcggccgcaattcaggactttcaagtgagacagtacatcgagcagttaaataactgtaggatcgggttacagcccgccgtgctgcgacgagcgtactggctggaagccgggagcgcgaacctggggttgataaccgtcgatatagctctggctgcagaccaccactcaaagcacgaagctcagaggcacttccttgaaacccatgatgcccgtacaaagcgtctgtggttcctgtggcccgacgatatcctgaaaaacaagcggtgcaggaataaatgcggatgcctgggcgggtgtagattcttcgggggaaccgtgactggactggatttcttcaagctcgaggagttgactccgtccagcagcagtgcgttttctagcactagcgccgagagtgacatgtactatggccagagtttattacaaccgggagaatggataatcacgaaagagatccctaaaattatcgacggcaacgtcaatggcatgaagagaaaagagtgggaaaacaaatctgtcggcatcgaggtggaacggaagactcagcacctctctctgcaggtgccactgcgtagccattcttcatccagcagttccgaagaaaacagctccagttccgcagcccaacctctgctggcaggtgagaaggaatcacctagttcagtcgccgatgaccatctcgtgcagaaagagttcttgcacgggaccaagagggacgacggacaggcttctatccctacggaaatctccgggaactctcccgtgagccctaatacacaggataagtcagtgggccagtcacccctaaggtcacccctaaagcggcaggcttccgtgtgttctaccagactaggctcaacaaaatccctcacagcagccttctatggcgataagcaacccgttacggtgggggtgcaattctcgtcagatgtgtcacgcagtgatgagaacgtactggactcccccaagcaaagacgctcctttggtagctttccatacaccccgtctgccgattccaactcttttcaccagtataggagtatggactcatccatgagtatggctgactccgaagcctacttttccgcggctgaggaattcgagccaatcagctcagacgaaggcccaggcacctacccaggacgcaagaaaaaaaagaaacagactcagcagatcgactactcccggggctccatttaccacagcgtggagggcccgttgacaggacatggagagtccatccaagacagccgtaccttgcccttcaagacgcaccccagtcaagcttcctttgtcagcgctctcggtggggaagacgatgtgatcgagcacctctacatcgttgagggggaaaagactgtggaaagcgaacagattacaccccagcaacctgtgatgaactgttatcagacgtatctcactcagtttcaagttatcaattggtccgtcaagcaccccacgaataagcggacatcaaagtcgagccttcatcgccctctggacctggatacgccgacctctgaggaaagctccagtagctttgaacagctctccgtgcctacgttcaaggtgatcaagcaaggtctgacagctaacagtctgctagatcggggcatgcaactgtccgggagcacaagtaataccccatatacacctttagaaaaaaagttggccgataacaccgatgacgaaaccttgacggaggaatggactttggaccagccggttagccaaactagaacgactgcgatagtcgaagttaaaggtaccgtggacatagtgctgacgcctctggttgccgaagctctggaccggtacatcgaggccatggtgcactgtgcgtctacgaggcaccctgccgcaatcgtcgacgatttacacgccaaggtgctgcgggaggccgtgcagaattccaagacaaccttctcggaaaacttgtccagtaagcaggacattaggggtactaagacggaacagtctaccattggcactaccaaccagggccaggctcagaccaatctgacaatgaagcaggataacgtcaccatcaaaggcctccagacaaatgtgagtatccctaaagttaatctgtgcctgctgcaggcaagtgtcgaggaatccccaaccaccgccccttcacgatctgtcacccatgtgagcctggttgcactgtgctttgaccgaattgcaactcaagtccgaatgaacagaggtgtggtggaagaaacatctaataatgctgaacctggtagaacatcaaatttcgatcgatacgtccatgccacaaaaatgcagccacagagcagtggaagcttgcgaagcaatgcgggagccgagaagggaaaggagatcgcagcaaagctaaacatacatcgtgttcacggtcaactccgcgggctggatacaacagatatcggcacttgtgcgattaccgccattccctttgagaaatctaaggtcctgtttacgctcgaagaattagacgaattcaccttcgtcgatgagaccgaccagcaagctgtgcctgacgtaacccgcatcggcccttctcaggaaaagtgggggtggattatgtttgagtgtggactcgaaaatctgaccatcaagggaggaagacaatccggagctgtgctctacaattcatttggcattatgggtaaagctagcgatacggaaaggggaggagtcttaactagcaacaattcatctgattcccccaccggttcaggctataacacagacgtctcagacgataacctgccttgtgatcggacgagccccagcagtgacctgaatggcaactccgtctccgatgaacaagatgaaggtgtagaatcggacgatctaaaaaaagacctgcccctgatgccgcctccgcctgactcttgcagcatgaagttaaccatcaaggaaatctggttttccttcgctgcgcctactaacgtgagatctcacacccacgcattttcacggcagcttaacctgttaagcacagcaacaccagccgtgggtgcctggctggtgcccatagatcagctgaagagttccctgaataaactggaaactgagggcacactgagaatttgcgcggtgatggggtgtatcatgaccgaggcactagagaataaatccgtccattttcctctgagatccaagtataatcgcctcactaaggttgctaggtttttacaggaaaatccatcttgcttgctgtgcaatattctgcatcactaccttcatcaggcgaactattccatcatcgatgatgccacgatgtccgatggattgccggccctggtgactcttaaaaaggggctagtcgctttagctcgtcaatggatgaaatttatcgtggtcaccccagccttcaagggggtctccctgcataggccagcccaacccctgaagccacagatcgccatggaccatgaacacgaagacggcctagggctcgataatgggggtgggcttcaaagtgacacctcagccgacggagcagagttcgaattcgacgccgctaccgtctcggagcacacaatgctgctggaaggaaccgccaatagacctcctcctggcagttcagggccagttacaggagctgagatcatgagaaaattgtcaaaaactcatacacatagtgatagcgccctaaaaatcaaagggatccatccgtatcactccctgagttacacctctggtgacactgctactgattctcctgttcacgtcgggagggccggcatgcctgtaaaggattctcctcgaaaggagagcttactgtcttatctgactgggagcttcccatccctccataacctccttgaaggcactccgcagcggagttctgccgccgtcaagtcttcttcactcaccagaaccggcaacaccgtcgctacagacatgctgtctgaacatcccctactgagtgagccatcctcagtgtctttttataattggatgtccaatgccgtgggcaacagaggcagtgtccttcaggaatctcctgtcacgaaaagcggccacaatagcctgcccactggtgtggcacccaatctccccactatccccagcgccagcgactttaacactgtgctcagtagtgatcagaacaccttagacgggactcactcccagcattctacctcacaggacgacgtggccggagtggaagaggcgaatcaaggcttccccgccgttcagctggctgacgcccaggtcgtgttcaagcccctcctctctcataccggcattcaaagccaagatacaatgccattctgctacagaatgtacttcggagagcatcttagcttttcggggactctggattgtctccgcgccgacatagtggatagcgatactgcaaaggaaagaaaggggaagcgcgccagacgacagggccacgtaaacttacctccccttgaatttaagccggccctgatgctggggacattctctatctccgccgtcgtaatggaaaagagcgtctgtacgccgcaaaattcaactagcgcgttgagttttcacgacctgtcaaagagatactacaatactttccactgcaactttactatttcctgtcagtctatttcacagcacgttgacatggcgttggtcaggctaatccaccagtttagcaccatgatagacgatataaaagcaacccagacagacattaagctgtcccggtacaccgcaggcagtgcctctcctacccccacattcaagaccagaaaacacagggactttaggagctctgatttctcccgctcatcgcggggaagtctaaatggtggcaaccgggtgaataacgctaaaaacaagcgcaccaacaatgagaataataagaaggagtcacgcaacaaaaactcgctcggtcgcagcgaacgaagaactagtaaagtgtccaggaaaggttctaaggacgtggtggaccatatgaccattcacatggacgatagcgatagcatcactgtgagtgagcagagtgaaccttcagccgaatgttggcagaacatgtacaaactgctaaacttctatagcttaatcagcgatcccactggcatcttggagaaatccagtgagacctttggacccgctggagtgaggtcacctacagaacccacttgtaaggtagtcttcgagaacgaacaggataactcttcgctgaccaagacccagcggaaacggagcctggtgacctctgagccacaacacgtgactctgattgtgttcggtataggaatggtgaatcgcacacatcttgaggccgacataggcgggctgaccatggagtctgagttgaaacggattcatggctcatttacgctaaaggagaaaatgaaagatgtcctgcaccagaagatgaccgaaacctgtgccaccgctcacatcggcggagtgaatatcgtgctgctagaaggcattacccctaatatccagttggaagattttcctacctctcctacctctacagccaaacaggagtttttgacggtcgtgaagtgcagtatcgccaagtctcaagccttatattcagcccaaaggggactcaagactaataacgccgcagttttcaaagtgggtgccatatcaatcaatatccctcaacatcctgcaaccctgcatagtatgatggtgagatcgtctcatcagttgtccaaacagatatcagacctaattagacagccaagtaccgcccctcaacctgtgaaagaggatatcgctacccctctccctagcgagaaaacgcctacttcagtgaatcagacacctgtggagactaacgaatttccacagctccctgagggcctggagaaaaagcctatagtccttaaattctctgccatgctagatggcatcgcaattggcgccgcgctgctgccatcgctaaaggcagagtacaagatgggacggatgcgaagtcatggaatgaccggagcacagactcggtttaccttcgaactgcctaatcatcggctgaggttcacgtcaaaggtttcagccaccgacatgtccacaatcccgccaagcgcttccctgaacttacctccggtgacaatgtcaggcaagtatatcatggaagagcatgacagttactctgatcaggtgtggtcaattgacgagcttcctagcaaacagggctactatctgcaggggaattatctgcggtgtgtagcagaggtgggctccttcgaacataacttaaccactgaccttctcaaccacttggtgtttgttcagaaagtgtttatgaaggaggtgaacgaagtgatccagaaagtcagcgggggtgagcagcccattccactgtggaatgaacacgacggcactgcagatggcgacaagcctaaaatcttactatatagcctgaatctgcagttcaaagggattcaggtgacagctaccacaccgtccatgcgggccgtgcgattcgagacgggattaattgagttagagctgagtaaccggctgcagactaaggcaagccccgggagctcttcctacctgaagttgtttggcaaatgtcaggtggacctgaacttggccctcggccagatcgtgaagcaccaagtatacgaagaggctggaagtgattttcaccaggtcgcctacttcaagacacgcatagggctccgaaatgcactgcgcgaggaaatctccggctcaagcgatagggaggctgttctgatcacactaaataggccaattgtgtacgcacagccagtcgcctttgacagggccgttctgttttggcttaattataaggcagcatacgataattggaatgaacagcggatggccctgcataaggacatccacatggctactaaggaagttgtggacatgctgcctggtatccagcagacatcagcacaagcttttgggacgctgtttctccaattgaccgtcaatgatttagggatctgtttgccaattactaacactgcgcagagcaaccacaccggcgaccttgacaccggttcagctttggtcctcacgatcgagtcaacattgatcaccgcatgtagttccgaaagcttagtttctaaaggacacttcaagaacttctgcattcggtttgcagacggtttcgaaacctcctgggatgactggaagcccgagattcacggagatctcgtcatgaacgcctgcgtagtgcccgatggaacgtacgaggtgtgtagccgaacaacaggtcaggccgccgctgagtcgtcttccgctggcacctggacattgaatgtgttgtggaaaatgtgtggcattgacgtgcacatggatccaaatattgggaagcggctgaacgcccttgggaacacccttaccaccctgactggtgaggaagatattgacgacattgccgacctgaattcagttaacatcgctgatttgagcgacgaggatgaggtggacactatgtccccgacaatccacaccgaggctaccgattatcggagacaggcagcctctgcatctcaacccggggaactgagaggacgcaaaatcatgaagagaatagtagacatccgggaactgaatgagcaagcaaaagtgattgacgacctcaagaaacttggcgcctccgagggaaccatcaaccaggaaattcagagataccaacagctggaatctgttgctgtgaacgacataagacgcgacgtgagaaaaaagctgcgtcgctcgagcatgcgggctgcatccctgaaagataagtgggggctatcttataagccgagctacagtaggtccaagagcattagcgcatctggccgaccccctctgaaacgaatggaaagggcctcgagtagggtaggagagacagaggaacttccagaaatccgtgtcgacgccgctagtcctggccctcgtgtgacctttaacatacaggatacctttccagaggagacggagctagatttgctctcagtgaccatagagggtcctagtcattacagttcaaacagcgaaggttcatgctcggttttttcttctccaaaaacaccaggaggcttctctccaggcattccctttcagacggaggaaggccgacgcgatgactctctgtccagcacttccgaggacagcgagaaagacgagaaggacgaagatcacgagagggagcggttttatatctacaggaaaccttcacacacctctaggaagaaggcaactggattcgccgcagttcatcagctcttcacagagcgctggcctactacccctgtgaaccgctcattgtctggtacagccaccgagcggaacatagactttgagcttgatattcgggttgaaattgatagcggaaaatgtgtcctgcaccccactacactgctgcaggaacatgacgacatctctctgagaagatcatatgaccgaagtagtcgaagtttggatcaagattctccttctaagaagaaaaagtttcagaccaattacgcctccaccactcatcttatgaccgggaagaaggttccaagtagcctgcagacgaagccgagcgacctggagacaacagtgttttacatcccaggagttgacgtgaaactgcactacaacagcaaaaccctgaaaaccgagagccccaacgcatctagaggatcctcgctgcctagaactttgtcaaaggagagcaaactttacggtatgaaagactccgccacctctcccccatcccctccccttccaagtacagtccaatctaaaacaaataccctgctgccccctcaaccacctccgatcccagcagcaaaggggaaggggtctgggggggtcaaaacagctaagctgtatgcctgggttgctttacaatctctgcctgaagagatggtgatttctccctgtcttcttgattttctagaaaaagcccttgaaactatcccaataacgccggttgagcggaactatacggccgtcagttctcaggatgaggacatggggcattttgagatacctgaccccatggaggaatccacgacctccctcgtttcttccagcacatccgcttatagtagcttccccgtggacgtggttgtgtacgtgcgtgttcagcctagccagattaaattctcctgtttgcctgtctcaagagtagagtgcatgttaaaattacctagtctcgacttggtcttttcatccaacaggggtgagctcgagacgctgggaaccacttatcctgctgagaccctgtcccctgggggcaacgcaacacagagtgggaccaaaacgtcggccagcaagaccggtataccagggtcaagcggtctcggcagcccactgggcagatctcggcatagcagcagccagtccgatttgacgtcatcatcctcatctagctcggggctcagctttaccgcctgcatgtcagacttctctctctatgtttttcatccctacggtgcaggcaaacagaagactgcagtaagtggactcaccccaggttctggaggtttgggtaatgtcgatgaggaaccgacaagcgtgaccggacgtaaggattctttatcgatcaatttggagttcgtgaaagtctcacttagtaggattcggcgatcggggggggcctcctttttcgaatctcaatcagtctctaaatctgcaagcaagatggataccactctgatcaacattagcgctgtgtgtgacattgggtcagcaagcttcaagtacgatatgagaagactgagcgaaatactcgccttccctcgcgcctggtaccgcagatctatcgcccggagactatttctgggcgaccagacaataaatctccctacgtccggtcctggaaccccagattcgatcgagggcgtgtcccaacatctgtcccccgaatccagtaggaaggcttattgtaagacttgggagcagccttcccagagtgcctcatttacacatatgcctcaatcgcccaatgtgtttaatgagcatatgactaacagtactatgtcaccagggacagtcggacagtccctgaagagccccgccagtatccgcagcagaagtgtgtccgatagttctgtacctcggcgcgactctctttcaaagacaagtactccatttaataagtccaacaaggctgccagccaacagggcacgccttgggagactctagtcgtgtttgccatcaacctgaaacagttaaacgtccagatgaacatgtctaacgttatgggcaacaccacttggaccacatctggactcaagtctcagggaaggttgagcgtgggctcaaaccgggatagagagatctctatgtcagtcggtttgggtcggagccagcttgattcgaagggtggcgttgtcggtggcacaattgacgtgaacgccttggagatggtggctcatatctccgagcacccaaatcagcagccttcacacaagatccagatcactatggggtcgacggaagctcgggtggactacatggggagctccattctcatggggatattctccaacgcggacctgaaactgcaggacgagtggaaggtgaatttgtataacactctggattcttctattaccgataagagtgaaatttttgttcatggcgatctgaagtgggacatattccaggtaatgatctctcggtctacaaccccagatctgattaaaattgggatgaagctgcaggagttttttacccagcagttcgacacttcaaaacgggcactgtcaacatggggacctgtcccatatctccctccaaagactatgacttcaaatctcgagaaatcgagccaggagcagcttctcgacgccgcccatcaccgccattggccgggggttctcaaagttgtctccggctgccacattagtctctttcagatcccccttcccgaggacggtatgcagttcgggggaagcatgtcattgcatgggaatcacatgacattggcatgctttcacggacctaattttaggtccaagagctgggcacttttccacctggaagaaccgaacatcgccttttggacggaggcacaaaaaatatgggaggacgggtctagcgatcattcaacctatattgtacaaacactggatttccacttaggacacaacacaatggttaccaaaccctgcggcgcactcgagtcccctatggccacgattactaagatcacgaggcgcaggcatgagaatccgcctcatggggtcgcctctgtaaaagaatggttcaactacgtgaccgccactaggaacgaagaacttaacctgctgcggaacgtggatgcgaataataccgagaactcgacaaccgtgaagaacagttctctgctgtccggcttccgaggaggctcctcatataaccatgaaactgaaacgatcttcgctcttccacgcatgcagctagattttaagtcaatccacgtccaggaaccccaggagcccagcctccaagatgccagcctgaaacccaaggtggaatgctcagtcgtcaccgaattcacagaccacatctgtgttactatggacgccgagttgataatgttcctgcacgacctcgtatccgcttacctgaaagaaaaggagaaagccatattccctcccaggatccttagcacaaggccaggtcagaaaagtcctatcataatccacgatgacaactcctcagacaaggaccgggaagacagtataacttacacaacagtggactggcgggattttatgtgtaatacctggcatctcgagccaacattgagattaatctcttggaccggccgcaagatcgatcctgttggggtcgattacatccttcagaagttgggcttccaccatgccagaacaactattccaaaatggctccagcggggggtgatggatcctctggacaaggtcctgagtgtcttaattaaaaaactgggaaccgcacttcaagatgagaaagagaagaaagggaaggataaggaagagcactag

SEQ ID NO: 130445 - DNA, 2772 bp, synthetic construct
  misc_feature 1..2772: note = Description of Artificial Sequence: Synthetic coding sequence
  source 1..2772: mol_type = other DNA
atgtcccagttcaagcgccagaggatcaatcctcttccaggcggcagaaacttctcagggacagccagtacatccctccttgggccgcctccgggactgctgactccaccggtcgcaaccgagctgtcccagaacgcaaggcatttgcagggaggagaaaagcagagagtattcacaggcatagttacatctctgcacgattactttggggtagttgacgaggaagtgttcttccagttaagcgtggtaaaggggcggttgccccagctgggtgaaaaagtgcttgtcaaagccgcctataaccccgggcaggccgtgccctggaatgcggttaaggttcagactctcagcaaccagcctctgctgaagagtcccgcccctccactcctgcatgtcgcggccctgggccagaaacagggcatcctgggggcccagccccaactgatcttccagcctcacaggattcccccactctttcctcagaagcccctctcgctatttcagacctctcatactttgcatctttcacatttgaacagattcccagctagggggcctcatggacgactcgaccagggcagatcagatgactacgactcaaaaaagcggaaacaaagagccggaggcgaaccatggggtgcaaagaaaccacggcacgatctcccaccctatcgcgtacatcttaccccctatacagtcgatagccctatctgcgattttctggaactgcagcggcgctatcggagcctgttggttccctccgatttcttatcagtgcatttgtcttggctgtctgctttccccctgagccagcccttcagcttgcaccaccccagcagaattcaggtgtcgtctgagaaagaggcggcaccagacgcaggcgcagagccaatcacagccgattcagatcccgcctattccagtaaagtgctgcttctgagcagcccaggactggaggagctctacagatgttgcatgctctttgtggatgacatggcggagcctagagagacgccagagcaccccctgaaacagattaaattcctccttgggaggaaggaggaggaggcagtgctggtcggcggcgaatggtcaccgtctctggatggtctggacccacaggctgatccacaggtgctagtgcgcacagccattcgctgcgcacaggcccagaccggcatagatctgagcgggtgtaccaaatggtggaggttcgctgagttccagtatctacagcccggccccccgcgtagactgcagaccgtggttgtctacctgccagatgtgtggactatcatgcctactttagaggaatgggaggcattatgtcagcagaaagccgctgaggccgccccaccaacacaagaggcgcagggggaaaccgagccaacagagcaggcaccggatgctctggaacaagcggccgataccagcagacgaaacgccgaaaccccggaagccaccacccagcaggagacagatacagatctgccagaggctccaccgcctcccctcgaacctgccgtgattgccaggcctgggtgcgtcaatctttccctgcacgggatcgtcgaggacaggcgtccaaaagaaaggatttcattcgaagtgatggtattggcagagctctttctggagatgctccagagggacttcggctatcgtgtctacaagatgctgcttagccttcccgagaaggtcgtgtccccccccgaacccgagaaagaagaggcggctaaggaagaggcaacaaaggaggaagaagccatcaaggaggaagtcgttaaagaacctaaggacgaagcacaaaacgaggggcccgccaccgagtccgaggcgcctctcaaagaggacggcctgcttcctaagcctctgagctccggaggcgaggaggaggaaaagcctagaggagaagcatctgaggacttgtgtgagatggcccttgaccctgaactgctgctgctgcgggacgacggggaagaagagtttgccggcgcgaagcttgaggacagcgaggtccggagtgtggcttcaaatcagtcagaaatggagttttcctccctccaggatatgccgaaggagctggacccctccgctgtgctccctctggactgtttgttggcttttgtcttttttgacgctaattggtgtggatacctgcatcggcgggatctggagaggatattactgaccctaggaatccggctgagcgctgaacaggccaagcagctagtctcccgcgtcgttacccagaatatctgccagtataggtctctgcaatattctaggcaagagggacttgatggcgggctcccagaggaggtcctctttggaaacctggatctcctgcccccacccggaaaaagtactaagcctggagctgcacctacagaacataaggcattagtgtcccataatgggagcctgataaacgttggctcactcctccagagagcagagcaacaggacagcggccgcctttacctcgaaaacaagatccacactttggaactaaaactggaagagtcacacaatcgatttagcgctactgaggtcaccaacaaaaccctggcagccgaaatgcaagaactacgtgtgaggcttgcggaagcagaagagactgccaggaccgcagagaggcagaagagtcaactgcagaggttgctgcaggagttaaggcgccgtctcactccgttacagctcgaaattcagcgggtcgtcgaaaaagcggactcttgggtggagaaggaggaaccggccccatctaactag

SEQ ID NO: 130446 - DNA, 2982 bp, synthetic construct
  misc_feature 1..2982: note = Description of Artificial Sequence: Synthetic coding sequence
  source 1..2982: mol_type = other DNA
atgggagcagcaggtcggcaggactttctgtttaaggccatgcttacaatctcttggctgaccctgacatgcttccctggagcaaccagcacagtggccgcagggtgtccagaccagagcccggagctgcaaccttggaacccgggacacgaccaggaccaccacgttcacattggccaaggtaaaacattgctactaacctcctcggctactgtgtactccatacacatctcagaagggggcaagttggtgattaaggaccatgatgagccgattgtactcaggactcgacacatattaattgataatggaggcgagctgcacgccggaagcgccctctgtccttttcagggcaatttcaccatcatcctatatgggcgggctgatgagggcattcagccagacccctactacggtctcaaatacattggcgtggggaaaggtggagctctagaattgcacggacaaaaaaaattgagttggacattcctgaacaagactctgcatccaggcggaatggccgaaggaggctatttcttcgagagaagctgggggcataggggtgtgattgtgcatgtgatcgatcctaagtctggaaccgtcatccactccgaccgctttgatacttatcggtctaagaaggaatccgagagactagtccagtacttaaatgccgtcccagatggaagaattctcagcgtcgccgtgaatgacgaggggtctagaaacctagatgatatggccaggaaggctatgaccaaactcgggtctaaacacttcctccatctgggctttaggcacccttggagcttcctgaccgtgaagggcaatcccagcagctctgtggaggatcatattgaataccatggccaccggggttcagcagccgctagggttttcaagctctttcagacagagcacggcgagtattttaatgtgtcactgtcctctgagtgggtccaggacgtggagtggacagagtggttcgatcatgataaagtcagccagacaaaaggaggggagaaaatttccgacctctggaaagcccaccccgggaagatttgtaaccgccctatcgacatccaggccactacgatggacggtgtgaatttgtccacagaggtggtgtacaagaaaggccaggactatcgtttcgcctgctacgatcgcggacgggcctgtcggagctatcgcgtcagattcttgtgtgggaagccggtgaggccaaagcttacagttaccatcgacacaaacgtaaatagcaccattttaaacctggaagacaatgttcagagttggaagcctggggatactttagtgatcgcaagcactgattactcaatgtaccaggcagaggagttccaggtgcttccctgcagatcatgcgcacctaaccaggtaaaagtggcaggcaaaccgatgtatctgcatataggcgaggaaatcgacggcgttgatatgcgggccgaggtcgggctgctgtcaagaaatattatcgtcatgggagagatggaagataagtgctatccttatcggaatcatatttgtaatttcttcgacttcgatacatttgggggtcacattaagtttgcactcggatttaaagctgctcacctcgagggcactgagttgaagcatatggggcaacagttagtcggacagtaccccatccattttcacttggcaggagatgtggatgagcgtggaggctacgatccaccaacctacatccgcgatctgagcattcaccacaccttctcccggtgtgtgactgttcacggcagcaacggcctgttgattaaagacgtggtcggatacaatagcctgggacactgcttctttactgaggacggccctgaggagaggaatacattcgatcactgtcttggactgctcgtgaagtccggaactctgcttccctccgatagagactccaagatgtgcaagatgattactgaggactcataccccggatatataccaaagccgcggcaagactgcaatgctgtatcaactttttggatggccaacccaaacaacaacctaattaactgtgcagcagccgggagcgaagagactggcttttggttcatcttccaccacgtaccgactgggccatccgtcgggatgtattctccgggctatagcgagcacatcccattaggcaagttctataacaaccgggcacattcaaactaccgtgccgggatgatcattgacaacggcgtgaagacaacagaggcaagtgccaaagataaacggccctttctgtcaatcataagtgcccggtattcccctcatcaggacgccgatcccctcaaacccagagagccggctatcatcagacactttatcgcttacaaaaaccaggatcacggcgcgtggctgagaggtggggacgtgtggctcgactcgtgtaggttcgccgataatgggattgggctcaccctcgctagcggcggcacgtttccctacgacgacggcagcaagcaggaaataaagaattctctgttcgtgggtgaaagcgggaacgttggcacagagatgatggacaatagaatctggggtcctggcgggcttgatcactccgggaggacgctgccgatagggcagaatttccctattcgaggtatccagctgtacgatggtccaatcaatatccagaactgcacgttccgaaagtttgttgctctcgaagggagacacacctctgcattggcctttcgcctgaataacgcatggcagtcttgtccccacaataacgtgacaggcattgcattcgaagatgtgcctatcacctcaagagtgttcttcggtgagcctggcccatggttcaaccagctcgacatggacggtgacaagacttcagtgttccatgatgtagacggatcggtttcagaataccctggctcctatctgactaaaaacgataacaaatggcactcccttgccagcaaagcggcatcaggcccatcggggtag

SEQ ID NO: 130447 - DNA, 4086 bp, synthetic construct
  misc_feature 1..4086: note = Description of Artificial Sequence: Synthetic coding sequence
  source 1..4086: mol_type = other DNA
atgggcgccgcagggagacaagacttcctcttcaaggccatgctgaccatttcctggctaactcttacctgttttcctggtgccacaagcacggtggccgccggctgtcctgatcaatctcccgaattacaaccatggaatccaggacacgatcaggaccaccacgtacatatcggccagggcaagactttgcttctgacttcatcagcaacggtgtatagtatccatattagcgaggggggtaagctggttattaaagaccatgatgaacccattgtgctacggacaagacatattctcatcgataacgggggtgagcttcacgccgggagtgcactgtgcccgttccagggaaactttactattatcctgtacggtagagccgacgagggcatacagccagatccgtattacgggttgaaatatattggtgtgggtaaaggcggcgcactcgaattacacggccagaagaagctttcatggaccttcctcaataagacattacaccccgggggtatggcagaggggggatatttttttgaacgctcttggggccaccgaggagtgatagtacatgtcatcgaccctaagtctggcaccgtgattcattctgaccggttcgatacatatcgctctaagaaagagtccgagagactcgtgcaatacttaaacgccgtcccggacggcaggattctctctgtcgccgttaacgacgaggggtcaaggaatcttgatgacatggctcggaaagccatgacgaaactaggatcaaagcacttcctgcacttagggttcagacacccttggagttttctgactgtgaaaggtaatccaagctccagcgtcgaggatcacattgagtaccacgggcatagagggagtgcagcggctagagtcttcaaactgtttcagaccgagcatggcgaatattttaatgtctctctttcctccgagtgggtgcaggacgtggaatggaccgaatggtttgaccacgacaaagtgtcgcagaccaaaggaggagaaaaaatttctgacctgtggaaagcccatcccggaaaaatctgcaatcggcctattgacattcaggcaacaacgatggatggcgtgaacctgagtaccgaagtagtgtataagaaagggcaagattacaggttcgcgtgctatgatagagggcgtgcttgccgctcctatcgcgtgagattcctctgcggcaagcctgtacggcctaagctcactgtgactatcgacactaatgtcaatagcaccatcctgaatctggaagacaacgtgcagagttggaagcccggcgacacactggtgattgccagcacagactacagcatgtatcaggccgaagagtttcaggtgctaccttgcaggagctgtgcacccaaccaggtcaaagtggctggaaaacccatgtatttgcatattggcgaggagatcgacggggtggacatgcgtgcagaggtcggcctgctcagccgcaacattattgtcatgggcgagatggaagacaaatgctatccataccgcaatcatatttgcaatttcttcgatttcgacaccttcggggggcacataaaattcgctctgggctttaaagcggcacatcttgaaggcaccgagctaaaacacatgggacagcagttagtcggtcagtatcctattcattttcatctcgcaggcgacgtggacgagcgtggagggtatgaccccccaacctatatcagggatctgtccattcatcatactttcagtcggtgcgtgactgttcacggcagcaacggactattgattaaagacgtggtcggctacaatagcctcgggcactgcttcttcacggaggacggaccagaggaacggaatacgtttgaccattgtctggggttattggttaagtccgggactttgctgcccagcgatagggatagcaagatgtgtaaaatgattactgaggattcatatccagggtatatacccaagcccagacaagactgtaacgccgtgtcaacattctggatggctaatcctaataacaacctgatcaactgcgccgctgctggatcggaagagaccggattctggttcatctttcaccatgtgcccaccggcccttccgtcgggatgtatagccccgggtactctgagcatattcccctgggtaaattttataataatcgggcacactctaactacagggctggtatgattattgataacggtgtgaagaccaccgaggcgtctgcgaaagacaagaggccttttctgtcaataattagcgcacggtactcaccccaccaagatgccgaccccctcaaaccaagggagccagccatcattaggcactttattgcctataaaaatcaagaccacggcgcttggctgcgcggcggcgatgtttggctggattcttgccggtttgccgacaacggcataggactgactcttgcatctggcggaacttttccttatgacgacggatctaagcaggagataaagaattctctgtttgtcggcgagtcagggaatgtagggactgaaatgatggacaataggatctggggccccggcgggttggaccattctgggaggacattgcctatcgggcagaatttcccgattcgggggatccaactgtacgatggcccaattaacatccaaaattgcacctttagaaaatttgtagcgcttgaagggcgtcatacctctgcattggctttccgtctgaataatgcctggcagtcctgtcctcacaacaatgtgaccggaatagcgtttgaagacgtacctattacaagccgcgtgttttttggagagccagggccctggttcaaccaactcgacatggacggggataagacctctgtgtttcacgatgtggacgggagcgtgtctgagtatccaggaagctacctcaccaaaaatgacaactggctagtgaggcatcccgactgcatcaacgtgccggattggcgcggtgccatatgttctggctgctatgcccagatgtatattcaggcatacaagaccagcaatctacgaatgaagatcatcaaaaacgacttcccatcacatccgttgtatttagagggcgctcttaccaggtcaactcactaccagcagtatcagcccgtcgtgacattgcaaaagggatataccattcattgggaccagaccgctcccgccgagctggccatctggctcatcaacttcaataagggcgactggatcagggtcgggctctgttacccccggggcactacatttagcatactaagcgacgtccacaacaggcttctgaaacagacctcgaaaaccggagtcttcgtgaggacactgcaaatggacaaagttgagcagtcatatcctggacgttcacactactattgggacgaggactctggtctactctttctgaagctcaaagcccaaaatgagagggaaaagtttgcattttgttcaatgaaaggctgtgaacggataaagattaaggctcttatacccaagaacgcaggagtgtcagattgtactgccacagcatacccaaagtttactgaacgggccgtagtggatgtgcctatgcctaaaaagctctttggaagccagctcaaaacgaaggaccatttcctcgaggtcaaaatggagtcatccaagcagcactttttccatctgtggaacgattttgcctatatcgaagttgacggtaagaagtatccatcctcagaggatgggatacaagtggttgtgatcgacgggaaccagggccgagtcgtgagccatacatctttcagaaactcaatcttgcagggcatcccatggcaactgttcaattatgtagcaacaatcccagacaatagcatagtgctgatggcctccaaggggcgatacgtctcccggggtccctggactcgagtgctggagaagctcggagcggacaggggcttgaaattgaaagaacagatggccttcgtgggttttaaaggttccttccgcccaatctgggtgaccctggatacagaggaccataaggcaaagatattccaggtagtccctattcctgtggtgaagaagaagaaactttag

SEQ ID NO: 130448 - DNA, 1947 bp, synthetic construct
  misc_feature 1..1947: note = Description of Artificial Sequence: Synthetic coding sequence
  source 1..1947: mol_type = other DNA
atggaagtcaagggcaaaaaacagtttaccggcaagtccaccaaaacagcacaggagaaaaataggttccacaagaacagcgacagtgggagtagcaagacgtttcccacacggaaggtggctaaggaggggggcccaaaagtgaccagcagaaattttgaaaaatctatcacaaagttaggaaagaagggcgttaaacagtttaaaaataagcagcagggggataagtccccaaaaaataaattccagccggcaaataagttcaataaaaaacgcaaatttcagcccgacgggcgctcagatgagtcagctgccaagaagcccaaatgggatgatttcaagaagaagaagaaagaactgaaacagtctcgacaactgtctgacaaaaccaactatgacatcgtagtccgggcaaagcaaatgtgggaaatcctcaggcgtaaggactgtgacaaagaaaaaagggtcaagctcatgtctgatctacagaaactgatacaaggcaagatcaaaaccatcgctttcgcacacgattctactagagtaatacaatgctatattcaatacggcaacgaggaacaacgaaaacaggctttcgaggagctgagggatgacctcgtggagctctccaaggcaaaatattcacgaaatatcgttaaaaaatttctgatgtacgggtctaagcctcagattgctgaaatcattcgatcattcaaggggcatgtccgcaagatgctccgccacgccgaggcttccgcaatcgtggagtatgcatataatgacaaagccatactggaacagcggaatatgctgaccgaagaattgtatgggaatacctttcagctgtataagtccgccgaccacaggacactggacaaggttcttgaagttcagccagagaagctggagctgatcatggatgagatgaagcagattttaacccctatggcacagaaagaggccgtgatcaagcactcgctggttcacaaagtctttctggatttcttcacatatgcccccccaaagctgcgttctgagatgatagaggcaataagagaggcggtggtctatctggctcacacacacgacggcgctagggttgcaatgcactgcctttggcatgggacaccgaaggacagaaaagtgatcgtcaaaacaatgaaaacttatgttgaaaaagtggccaatggccaatattcgcacctggtactgctggccgctttcgattgcatcgacgacacgaaactggtcaagcaaataattatatccgaaataataagctctctaccgagcatagtgaatgacaagtacggcagaaaagtgcttttgtatctcctctccccaagggatccggcacacactgtacgcgaaatcattgaagtgctccagaaaggtgatggaaatgcccactctaagaaagacactgaagttagaaggagggagctgctggagtctatttctccagccctcctatcctacctacaggaacatgcccaagaggttgtgctcgacaaatctgcctgcgttctggtgagtgatatcctcggctccgctactggcgatgtccagcccactatgaatgccatcgcctctctggctgccactggactccacccaggcggcaaggatggtgaactccacatcgctgagcatccagccggacaccttgtcttaaagtggttgatcgagcaggataagaagatgaaggaaaacgggagagagggctgcttcgccaagactctggtcgagcatgtgggcatgaaaaacctgaagagctgggcgagcgtcaaccggggagccatcatactgagctcgttgcttcagagttgtgatctggaggtcgctaataaggtgaaggctgctctaaagagcctgattcctaccctcgagaaaaccaaatcaacatctaaagggatcgagatcctcttggaaaagctgagtacctag

SEQ ID NO: 130449 - DNA, 339 bp, synthetic construct
  misc_feature 1..339: note = Description of Artificial Sequence: Synthetic coding sequence
  source 1..339: mol_type = other DNA
atgaaaaaccaggtttgcagcaagtgcggggaggggacatacagcctaggcagcggcatcaaattcgacgagtgggatgaactccccgccggattttccaacattgcaacttttatggacacggtggtgggcccatctgattctagacccgatggatgtaacaattctagttggatacctcggggcaactacatcgagtcaaaccgggatgattgtaccgttagccttatctacgcagtccatctgaaaaaatctgggtatgtgtttttcgaatatcagtatgtggataataacatcttcttcgagttttttatccagaacgatcaatgccaggagtag

SEQ ID NO: 130450 - DNA, 1842 bp, synthetic construct
  misc_feature 1..1842: note = Description of Artificial Sequence: Synthetic coding sequence
  source 1..1842: mol_type = other DNA
atgttcagcgccggcgcagagagtctgctgcatcaggcccgtgagatccaagacgaagagctgaagaagttctgttctagaatttgtaagctgcttcaggccgaagacctgggaccagacacgctggatagtctgcagcgtcttttcctgattatctccgccaccaagtactctagacgtctggagaagacctgtgtagatctcctacaagcaaccttgggattgcccgcctgtccggaacaattacaggttctgtgcgccgccatactgcgggaaatgtcaccatcagactcactgtccctggcatgggaccacacgcaaaactcgaggcagctgagtctggtggcatccgtactgctggcacagggcgatcggaacgaagaggtccgtgccgtaggacagggggttctccgtgccctcgaatcaaggcagccggagggcccctctctgcggcacctgcttcctgtcatggctaaagtggtcgtgttgtcaccaggcacactacaggaagaccaggctacccttctgtccaaacgactggtggattggctgcgttacgcttctctccagcagggtctgcctcatagcggggggtttttctctacccccagggccagacagcccgggcccgtgaccgaggtggatggcgcagtagcaactgatttcttcaccgtactttcttctggccaccgcttcacagacgatcaatggttaaatgtccaggcattttcgatgctgcgcgcatggctgctccacagcggtcctgagggtcccggcaccttggataccgatgacaggtccgagcaggaaggatccactcttagcgtgatatccgccacaagttctgccggtcgtctgctcccgcctagggagcggctgagggaggtggcgttcgagtattgccagcgccttatcgaacaaagtaacagacgagccctgcgcaagggggatagcgatctccagaaagcgtgcctggtagaggctgtgctggtgctggatgtgctgtgccggcaggatccgtcattcctctaccggagcctctcgtgcttgaaggccctgcacgggagggtgcgcggggatccagcttcagtccgcgtactcctcccactcgcccactttttcctcagccacggagaggcggcggctgtggacagcgaggcagtctatcagcacctctttaccaggatacccgttgagcagttccattcgcccatgctcgcctttgaattcatccagttttgccgcgacaatctccatttgttctcagggcatctgtcgaccctccgcctctcatttcccaacctgttcaagttcctggcttggaatagccccccactgacgagtgaatttgtggcactcctcccagcactggtggatgccgggacagccttagaaatgctgcatgctctcttggatctgccatgcttgaccgcagtacttgatttgcagttacgatccgcccctgctgcctccgagaggcctttgtgggatacttccctgagagctccctcatgcctggaggcttttcgcgatccacaattccaggggctgttccagtacctgctgagaccaaaagctagcggggcaactgaaaggttggcccctctgcaccaactgctgcagcctatggctggttgtgcccgggtcgcccagtgtgctcaggcggtgcctactctgctgcaggctttcttctctgccgtgacccaagtggctgacggcagtctgataaatcagctggcccttctcctgctggggcggtccgactctctgtacccagcgccggggtacgcggctggagtgcataggcctgatgcttgccgccccatacttgtacccttatag

SEQ ID NO: 130451 - DNA, 918 bp, synthetic construct
  misc_feature 1..918: note = Description of Artificial Sequence: Synthetic coding sequence
  source 1..918: mol_type = other DNA
atggagaaggagacatataaaaccgctaaattgattctagagcgattcgaccctgactcgaagaaagccaaagagtgtgagccgcccagcgccggggcagcggtgactgccaggccgggacaggagatacgccagagaacggccgcccagcgaaacctcagtcccactcctgcgtcgccaaatcaggggccaccacctcaggtaccagtcagccccggtccccccaaggactcatctgctccagggggacctcctgagcgaaccgttacccccgctctttcctctaatgtgctgccgcggcatttgggctccccggctacttcagtgcccggaatgggtctccaccctcctggaccacctctggctcgccctatccttcccagggaaagaggcgccctcgatcgcatcgtagagtaccttgtgggtgacgggccgcagaaccggtatgcactgatttgtcaacagtgcttcagccataatggaatggcactgaaggaagaatttgaatacattgccttccgctgcgcctactgcttttttctgaatcccgcaaggaagacccgaccgcaggctcctcgcctgcctgagttctcctttgagaaacgacaggtagtcgagggctcatccagcgtcggaccgctaccatcaggcagcgtgctgtcgtccgacaaccagttcaatgaagaatctttagaacacgacgtgctggacgataataccgaacagaccgacgataagattccagccactgaacagacgaatcaggtgattgagaaggcctcagactcagaagagcccgaggagaaacaggaaacagagaacgaggaggcctctgtcatcgagaccaactccactgtgcctggagctgattccattccggaccccgagctgagcggggagagcctgacagccgaatag

SEQ ID NO: 130452 - DNA, 2589 bp, synthetic construct
  misc_feature 1..2589: note = Description of Artificial Sequence: Synthetic coding sequence
  source 1..2589: mol_type = other DNA
atgcattcaagttggattccaaggggaaattacatcgagtccaacagggacgactgcaccgtttccctgatctacgcagtgcacctcaagaaatctggctatgtattcttcgaatatcagtatgttgataacaatatttttttcgaattctttatccagaacgaccagtgccaggaaatggacacaactactgacaaatgggtgaagctaaccgacaacggcgaatggggctcccattcagtcatgctcaaaagcggaaccaatattttgtattggaggactacaggtattttaatgggatctaaggccgttaaacccgttttggtgaaaaatatcaccatcgagggggtggcatatacttctgaatgctttccctgcaagccaggcacattttcaaacaagcccggtagtttcaattgtcaggtgtgcccacgaaatacatactctgagaagggggcaaaggagtgtatccggtgtaaggacgatagccaattttccgaagaaggctcatccgagtgtaccgaacgccccccctgcacaacaaaggattattttcagatccataccccatgcgatgaggaagggaagactcaaatcatgtacaagtggattgagccaaagatctgtcgcgaggacctgacagacgctatacgactgcctccatccggtgagaagaaagactgcccaccttgtaatcccggtttctacaacaacggtagcagttcctgtcacccatgccccccgggcactttctcggatggtaccaaggagtgcagaccatgcccagccggaacagagccggctctaggcttcgaatataagtggtggaatgtgttacccggcaatatgaagactagctgctttaacgtgggcaactccaagtgtgacgggatgaacggttgggaagtggccggggatcacattcagagcggagcagggggatcggataatgattatctgatcctgaacttgcacattcccggttttaagcctccaacttccatgacaggcgcaacgggaagtgaactcggacggatcacctttgtatttgagaccctctgctctgcagactgcgtcctatatttcatggtggacattaaccgaaaatccaccaatgtggtagagtcctggggcgggaccaaggagaaacaggcttacacccatattatttttaagaacgctacattcacattcacgtgggccttccagagaaccaatcagggtcaggataatcgcagattcataaatgatatggtgaagatttatagcattaccgccaccaatgccgtggacggcgtagcgtccagctgccgcgcctgcgccttaggatccgagcagtccggatcatcatgtgtcccatgtccaccaggccactacattgagaaagaaacaaatcagtgcaaagaatgcccgcctgatacttacctgtccatacatcaagtctacgggaaagaggcgtgtatcccctgtggccccgggagcaagaataatcaagaccactccgtgtgctattccgactgctttttttatcatgaaaaagagaatcagtctctccattatgacttctctaacttatcttcagtagggtccctcatgaacggtcccagcttcacttccaaagggacaaagtacttccacttttttaatatctcactgtgtggccacgagggaaaaaagatggctctctgcacaaataatattacagactttactgttaaggagattgtggccggaagcgacgactacaccaaccttgtaggagcctttgtctgtcagagtacaattatcccttcagagagcaaaggctttagagcagccctctctagccaatctattatccttgccgacacctttatcggagtaactgtcgagacaacactcaagaatattaatatcaaggaggacatgtttccggtgcctacttcacagattcctgatgtgcatttcttttacaagtccagcaccgctaccacctcatgtattaatggtaggtccacggcagtcaagatgagatgcaaccccaccaaaagcggggccggcgtgatttcagttccatcgaagtgcccagcaggcacgtgcgacggctgtactttttatttcctgtgggaaagcgctgaagcgtgccccctttgcacagaacatgatttccacgagattgagggggcctgtaagcgcggctttcaagagaccctgtacgtttggaacgagcctaaatggtgcattaaaggcatcagcctgcccgagaaaaagctggctacatgtgagacagtcgacttctggcttaaagttggggccggagttggtgctttcaccgcagtcttgctcgttgctttgacctgctacttctggaagaagaatcagaagctcgaatataaatactccaaactagtaatgactactaactcaaaggaatgcgaattgcctgccgccgattcctgcgccattatggagggcgaggacaacgaagaggaagtggtgtattctaataagcagagcttattgggaaagcttaaatcgctagcaaccaaggaaaaagaggaccatttcgagtcagttcagcttaagacttcacggtcccccaacatatag

SEQ ID NO: 130453 - DNA, 5853 bp, synthetic construct
  misc_feature 1..5853: note = Description of Artificial Sequence: Synthetic coding sequence
  source 1..5853: mol_type = other DNA
atgccgggggcacgcagacgccgccggggagcagcaatggagggcaaaccaagggcgggagtagctctggctcccggaccatccggcagacgcccctcagctagatgcgctagacgacgaaggccgggactattgctgcccggactgtggttgctcttactggcgaggccagccagctgtgctcctgacgagctgtccccagaacaacataatctgtccttgtacagtatggaactcgtacttaaaaaatcaacaggtcatagcgctgcccaggtggctctcacagaaacagcccccggttcacagcacagctcacccttacatgtgaccgcacctcctagcgctacaactttcgacaccgctttctttaatcaagggaagcagacaaaatccacggcggacccttccatctttgttgccacgtatgtaagcgttacatccaaggaagtggcagtgaatgacgatgagatggataactttttgcctgacacacactggaccacacctagaatggtgagccccattcaatacataaccgtgtccccccccggtctcccccgcgaggcacttgagccaatgctgaccccatccttgcccatggtgagtctgcaagacgaagaggtaacctcagggtggcaaaacacaacaagacagcccgctgcttacgcagagtccgcttcccacttccatacattccgctccgcttttcgtacttctgagggaatcgttccgaccccaggcagaaatctagtgctctaccccacagacgcgtattcccacctgtcgagccgtacgctcccggagatagtggcatcgctgaccgaaggagtggagacgacactgttcctgtctagccgctctctgatgcctcagccgctcggcgatggcatcactataccactccctagccttggagaggtgtctcagcctcccgaagaggtgtgggccaccagtgctgaccggtatactgatgtgacgaccgtcttgagccagtctctggaggaaacgatctcccctcgcacctatcctacagtgaccgcttcccatgctgccctggccttctcacgcacccatagccccctgttgtccacgccgttagcatttgcttctagcgcctctcccactgatgtttcgtctaacccgttcctgccctccgattcaagcaaaactagcgagctccactcaaactctgccctccccggcccggtggataacacccatatcctcagtccagtgtccagcttcaggccttacacatggtgtgctgcatgcacagtacccagtccacagcaagtattggccacaagtctgatggagaaagatgtgggctctggggatggggccgagaccctgtgcatgactgtgctggaggagagtagcatcagtctgatgtcaagcgtggttgccgatttcagcgaatttgaagaggacccgcaagtcttcaacaccttgttcccaagtaggcccatagtgcccctctctagcagatcaatggaaattagtgaaacaagcgtgggtatatcagcagaagtagacatgtccagtgtgaccacgacacaggtaccgccagcacacggccgtttaagtgtgcctgcatctctggacccaacagctggtagtcttagtgtcgcggaaactcaggtgaccccctcttctgtaacaaccgcgttttttagcgtaatcaccagtattctcctcgacagcagtttcagtgttatagccaataaaaacacaccgtcacttgccgtgcgagacccttcagtgttcacaccttacagtctcgtgccctctgtggagtcatcattatttagcgatcaggagaggtcctccttctccgagcataagcctaggggcgcccttgatttcgccagctcctttttttccacgccacccctcgagttgagcgggagcattagcagcccaagtgaagctccagctagtttatccctgatgccttcggatctgtccccttttaccagccaatcattttctccactcgtagaaacattcacattgtttgactctagcgatcttcaatctagtcaattgagcctgcctagcagtacaaatctagagttctctcagctccagccgtcttcagaactaccactgaatacaatcatgttgctacctagtagatcggaggtttctccgtggtcttcattcccttctgattccctcgagtttgtcgaagcttctaccgtttcactcactgactccgaagcccacttcacatctgcctttatcgaaaccacctcttacttagaatcaagcctcatctctcacgaaagcgcagtaaccgccctcgtaccgcccgggtctgagagcttcgatatcctcacagccggaattcaggccaccagtcccctaacaactgtccatactaccccaatcttaaccgagagctccctcttcagtacccttacacctcccgacgaccagatttcggcacttgatgggcacgtgagcgtccttgcgagtttctcaaaagccattcccacagggaccgtgcttatcactgatgcctatctaccttctggctctagcttcgtttctgaggcgaccccattccctctccccactgaactgaccgtggtgggcccgtccttaactcccacagaggtgccactcaacacctcgaccgaggtgagcacgaccagtaccggcgctgctacaggcggcccccttgattctactctgatgggagatgcagcgtcgcaatctcccccagaatcttctgccgctcctccactgccctcactgcgaccagtaactgcattcactctcgaggccaccgtggatactcctacactagccaccgcgaagccaccctatgtttgtgacattacagttcctgacgcgtacttaattaccaccgtgctcgctcgtagagctgtgcaggagtacatcataacagccataaaagaggttctccggattcactttaatagagcagtggaattgaaggtctacgagttatttaccgactttactttcctggtgactagcggcccattcgtctatacggctatatctgtaattaatgtgctgattaactcaaagttagtgagggaccagacccccctaatcctgtcggttaaaccttcttttctcgtccctgagtctaggttccaggttcagacggtcctgcagtttgttccgccgagcgtggacaccgggttctgcaactttactcaacggattgagaagggtcttatgaccgccctctttgaagtccgcaaacaccaccaagggacctataacttaacagtgcagatcttgaacatcaccattagctcctcccgagtgacaccccgccgaggtcctgttaatattatttttgctgtgaagtcaacacagggctttctcaatggttctgaggtgagtgagctgttaagaaacctgtcggtggtggaattttcattctacctggggtaccccgtcctgcagattgcagagccttttcagtatcctcaactgaatctaagtcaactgctaaagagttcctgggttagaacagtcctgttgggggtgatggaaaaacagcttcagaatgaagttttccaagccgagatggagcgcaagctggctcaactgctgtccgaggtaagtacgcggcgccgtatgtggaggcgcgctactgttgctgcaggaaattcagtggtgcaggtggtgaacgtttcaaggctggagggagacgacaatcccgtccagcttatttatttcgttgaagatcaggacggcgagcggctatctgccgtgaaatccagtgacttgattaacaaaatggacctgcagcgagctgcgatcatactaggataccggatccaaggggtgatcgcgcagccagtcgatagggttaagcgccccagtcccgagtcccaaagcaacaatttgtgggtcattgtcggagtggtgattcctgttctggtagttatggtcatcgtggtgattttgtattggaaactgtgcaggactgataagttagacttccagccagacacagtagccaacatccagcagagacagaagttgcaaattccaagtgtcaaaggcttcgacttcgctaaacaacaccttggtcagcacaacaaggacgacatactgatcatccacgagccagcccccctgccaggtcccttgaaggaccacacgaccccgagcgaaaatggggatgtaccctcacctaaaagcaaaataccaagcaagaacgtgcgacataggggacgagttagcccatcagatgccgattcaacagtgagcgaggaatcgagtgagcgagacgccggtgacaaaactcccggtgccgtaaacgatggcagaagccatcgcgccccgcaaagcggccccccactcccctcatccgggaacgagcaacattcatccgcctccatcttcgaacatgtggatagaattagtcggcctcccgaagcaagtaggagagtgccctcaaaaattcagctgattgctatgcagcctatcccagcgccgcctgtacagagaccatcccccgctgatcgggtggccgagagcaacaaaattaacaaggagatacagaccgccttgaggcataagtccgagatcgagcaccacaggaacaagattcgacttcgtgctaagcggagaggccattacgaattccctgtggtcgacgacttgtcgtcaggtgatacaaaggagaggcacagggtatataggcgtgcacagatgcagatagataaaattcttgacccgacagcgagcgttcccagtgtgttcattgagccaaggaagtcctccagaatcaagaggtcccccaagcctagacgcaaacaccaagttaatggttgccctgcagatgcagagaaggatcgtctgatcacaacggacagtgacgggacctaccgaagaccaccaggcgtacacaattctgcatatatcggatgcccctcagaccccgacctgcctgcagatgttcagactcccagcagcgtcgagctggggcgctatccagcgctacccttcccagcgtcacaatatatccctccacaacccagtatagaggaagcgcgccagaccatgcacagcctcctggacgacgcattcgctcttgtggccccttccagtcagcccgctagtaccgccggggttggacccggcgttccaccaggcctcccagcgaactccacacccagtcaagaagagaggagagcaacccaatggggcagcttttactctcctgctcaaacggcaaataatccctgctcgagatacgaagattacggcatgacgcccccaaccggcccactccctcggcctgggtttggccccgggcttcttcagtccaccgagctagtgccacctgatccccaacagccacaggcatctgcggaggcgccatttgcagcgcgaggcatctactcagaagagatgccaagtgtcgcccggcccaggccagtcgggggtacaacagggtcccagatccagcacctgactcaagtgggcattgcgtctagaatcggtgcccagcctgtggaaatccctccctcaaggggatctcagtacggcggtccaggatggccaagctacggagaggacgaggctggtaggcgagaggccactcatatgctcggccatcaggagtattcctcttcaccattatttcaagttcctcgaaccagcggacgggagcccagcgccccaagcggaaacctcccccacagagggttgcaaggtccaggcctgggctatcccaccagttccacggaggacctgcagcccggccattcttccgcctccctgattaaggcaattagagaagagctcctgcgactctcccaaaagcagagcacagtacagaatttccatagctag

SEQ ID NO: 130454 - DNA, 357 bp, synthetic construct
  misc_feature 1..357: note = Description of Artificial Sequence: Synthetic coding sequence
  source 1..357: mol_type = other DNA
tgaaagagtaacggaaaaacagccatcggggatcctgggagagctaatatgcctggttataatgaagactctaggtcgacctttttcgacaaaaagtattctaacatgagtacattgggaaacaacggccctacacataagaagctctatagacataagagctcttctaaggcccttcgggatgagaagtgtaagggaaagcacatggaacgagagcaggtgcataaggatgagtcaggcacagcttccttcgagaaattgagagatagtgactacaacctcctgaaagccgaaaccaccttctgggtgctgcccgtgttcgaggaagaaaccagaatctttcagaaggatatctag

SEQ ID NO: 130455 - DNA, 3084 bp, synthetic construct
  misc_feature 1..3084: note = Description of Artificial Sequence: Synthetic coding sequence
  source 1..3084: mol_type = other DNA
atgagggtatctcacacattccccgtcgtggattgtaccgccgcttgttgtgatctgagtagttgcgatttagcatggtggtttgaagggcgttgttatctggtttcttgtccacacaaagagaattgcgagcctaaaaagatgggccccatccgatcctatctaactttcgttctgcgacccgttcagagaccagcccagctgttggactacggggacatgatgctcaacaggggatcccccagcgggatctggggagattcaccagaggacatccgtaaagacctgacattcctaggcaaggactggggattggaggaaatgtcagaatacagcgatgattaccgggagctcgaaaaagatctgctgcagccttccggaaaacaggagccacgaggaagtgctgagtacaccgactggggcctgctgcccgggagtgagggcgcttttaacagctcagtgggcgactcacctgctgtgccagcagagacacaacaggacccagaattacactatcttaacgagtccgcttcaacccctgcacctaagctgcccgaaagaagtgtcctgctgcctctgccaaccaccccaagctctggcgaagttctggagaaagaaaaggccagccaactgcaggaacagagctccaactcttcagggaaggaagtcctgatgccttcccatagtcttccaccagcttctctggaactcagctcagtcaccgtggagaaatctccagtgctcaccgtgaccccgggttcaacggagcacagtatccccactcctcctacttctgccgcccccagtgagagcactccgagcgaactgccaataagtccgaccacagcccctaggaccgtgaaggaactgaccgtatcagctggtgataatctcatcatcaccttgccagacaacgaggtagaactgaaggcatttgtagctccagcgccccccgtcgaaaccacttacaattatgaatggaacctgatctcccaccctacagactaccagggagaaatcaaacaggggcacaaacagacacttaatctatcccagctgagtgtcggattgtacgtgtttaaggtcacagtgtcaagcgagaatgcttttggggaaggtttcgtgaacgtgactgtgaagccagcacggagggttaaccttccccctgtggccgttgtgtctccccagttgcaggaattgactctgcccctgaccagcgccctcattgacggttctcagagcactgatgataccgaaatagtcagctaccactgggaagaaatcaacggcccatttattgaggaaaaaacttctgtcgacagcccagtcctcaggctgtcaaatctcgacccaggtaattatagcttcaggttaacagtcacggattcggatggggctacgaattccacgaccgccgccttgattgtcaacaacgctgtcgactacccaccggtcgctaacgctggaccaaaccacacaatcactttgccacagaactccattaccctgaatggaaatcagagttccgatgaccatcaaatcgtactgtacgagtggtccctcggcccaggctctgaagggaagcatgttgtgatgcagggcgttcagactccctacctgcacctatctgctatgcaagagggagattacacatttcagctcaaggtcaccgactcatcaaggcagcagagtactgcggttgtcacagtcattgtccaaccagaaaacaaccggccccccgtagccgtcgcaggccccgataaagagctgatcttccctgtggagtccgctaccctcgatggctcctcatctagcgatgaccatgggatagtgttctaccattgggagcatgtgcggggcccctccgctgttgagatggagaacatagacaaagctatagccaccgtgactggccttcaggtcggcacttatcacttccgcctgacagtaaaagaccagcagggtttgtcctcaactagtactctcaccgtagccgtgaaaaaagaaaataactcccctccccgagcacgggccggcggtcgccacgtcttggtgctgcccaataacagcattactctggacggcagccggagcaccgatgatcagagaattgttagctatctgtggatccgcgacggtcaaagcccagccgctggggacgtgatagatggttcggaccattcagttgctctgcagctgacaaatttggttgagggagtttacaccttccatcttcgggttacagacagccagggcgccagtgatacagacactgcgacggttgaagtgcagcccgacccacggaagagtggactggtagagctcaccctgcaggtgggggttgggcagcttaccgaacagcgcaaggacactttagtgcggcaacttgcagtcctcctcaacgtattggattcagacataaaagtccaaaaaatacgcgctcacagcgacttaagcactgtgattgtcttctatgttcagagccgccccccttttaaggtgttgaaagctgcagaggtcgcccggaacctccacatgagactctctaaggagaaagcagacttcctgctgtttaaggtgttgcgggtggacaccgccgggtgcctgctaaagtgctcagggcacggccattgtgatcccctcacaaaacgttgcatctgttcgcacctgtggatggaaaatctgatccagcgttacatctgggatggagaaagtaattgcgaatggtccatcttctacgtcaccgtcctcgcctttaccctgattgtactaactggaggcttcacgtggctgtgtatttgctgctgtaaaagacaaaaacgcaccaagatccgcaaaaaaacgaaatacaccatcctcgacaacatggatgagcaggagaggatggagctgaggccaaagtatgggattaaacacagatctacggaacataatagctcgttgatggtgagtgagtcagagttcgattccgatcaggataccatattttcccgtgagaaaatggaacgaggcaacccaaaagtgagcatgaacggtagtatccggaacggcgcatccttttcatattgttctaaggatcgttag

SEQ ID NO: 130456 - DNA, 1821 bp, synthetic construct
  misc_feature 1..1821: note = Description of Artificial Sequence: Synthetic coding sequence
  source 1..1821: mol_type = other DNA
atgggaaacacctgtagggtgtgctaccaactggaagccatcaagagaagtaacgaaatgtcaaacgtgatgggcaataccacctggacaacatctggcttaaaatctcagggcagacttagtgtcggatcaaacagagaccgagaaattagtatgagcgtgggtttgggccgaagccagctggatagcaaagggggcgtggtcggcggcaccatagatgtgaacgcactggaaatggtggcccacattagtgaacacccgaaccaacagccatctcacaagatccagatcaccatgggttccactgaggctcgcgtggattacatgggcagctctattctgatgggcatcttctctaacgccgaccttaagcttcaggacgagtggaaggtgaatctctataacactcttgatagctctattactgataagagtgaaatctttgtgcatggagatctgaagtgggacattttccaggtgatgatatcccgcagtacgacccccgaccttatcaagattggaatgaagctgcaggagttctttactcagcaatttgatacatccaagcgagctctatctacatggggccccgtgccctatctgccacctaaaacaatgacgagcaatctcgaaaagtcttcccaggagcagcttctggacgctgcccaccacaggcactggcctggggtattgaaggtcgtcagcggctgccatatctcactgttccagatcccacttcccgaggacgggatgcaatttggcgggtctatgagcctgcacggcaaccacatgacacttgcatgcttccatgggcccaattttcgtagtaaatcttgggctctttttcacctcgaagagcctaatatcgccttctggaccgaagcccagaaaatctgggaagacggaagcagtgatcacagtacgtacatcgtgcagacactagattttcatctggggcacaacacgatggtcactaaaccatgcggagctctggaaagtcctatggcaaccatcacaaaaataactcgccggcgccacgaaaatcccccacacggagtcgcctccgtgaaggagtggttcaattatgtaacagcgacacgcaacgaagaacttaatctcctgcggaatgtcgatgcaaataatactgagaactcaacaaccgtgaaaaattctagtctcctcagcgggtttcgaggcggtagctcttacaatcacgagactgagactatcttcgctcttcctcgaatgcaactggatttcaagagtattcacgttcaggagccacaggaaccttctctacaggacgcttccctcaagcccaaggtggagtgctccgtggtgacagagtttactgaccatatttgcgtgacaatggacgccgaactgattatgtttttgcacgacctggtttctgcctatttgaaagaaaaggagaaggcaatatttccgccaagaatcctcagcacacggcccggccaaaaatcgccaattattattcatgacgacaacagtagcgacaaggacagggaagacagtatcacatacacaactgtcgactggcgcgattttatgtgcaacacctggcacctcgaaccaacattgcgcctgatctcatggaccggaagaaagattgatccagtgggggttgattacatcttacagaaactcgggtttcatcacgctagaaccacaattcccaagtggctccagcgaggcgtcatggatcctctagacaaagtactgagcgttctaataaagaagctgggaaccgccttgcaggacgagaaagaaaaaaaaggaaaagacaaggaagagcactag

SEQ ID NO: 130457 - DNA, 5805 bp, synthetic construct
  misc_feature 1..5805: note = Description of Artificial Sequence: Synthetic coding sequence
  source 1..5805: mol_type = other DNA
atgcctggtgccaggcgacgcagaagaggggcagccatggaaggaaaacctcgagccggggtggctctcgcgcccgggccctccggccgccgcccgagcgcacgctgtgcgcgccgcagaagacctggtctcctgttgcccggtctgtggctcctgctcttggcccgccccgcttcatgcgcaccagacgagctgagccccgagcaacataatcttagtttatacagtatggagcttgtgctcaagaagtctaccggccactccgccgcgcaggtggcccttacagaaacagcacccggctcccagcactcctcccctctgcacgttactgcacctccaagtgccacgacttttgacactgctttctttaaccagggaaagcagactaagtcaacagccgatccgtcaatcttcgtggccacttatgttagcgtgactagtaaggaggttgcagtgaacgacgacgagatggacaatttcctccccgacactcactggaccacacctagaatggtttcacctattcagtacatcaccgtcagtcctcccggactgcctagagaagcattagagccaatgctgaccccgtcactgccaatggtgtcccttcaagatgaggaagtgacaagcggctggcagaacaccacacgacagcctgccgcatacgccgagagcgctagtcatttccacacctttcgcagtgccttccggactagcgaggggattgttcctacgccaggcaggaacctggtactgtaccctacagatgcttattcacacttgtcttctagaaccttgccggagattgtggcctctcttactgaaggtgtggagaccacattgtttctgagctcaagatctctgatgcctcagcctctgggggatggtatcactatccctctgccgagtctgggggaggttagtcagcctcctgaggaggtatgggccactagtgccgaccggtatacggacgtgaccaccgtactgtcacagagcctggaagaaaccatatccccccgtacgtatcctactgtgaccgcgagccacgcagcactggcattttctaggacacattcccccctcttatctacgcctctcgccttcgcaagcagcgcctcgcccaccgacgttagcagcaatccgttcttaccgtcagactcttcaaaaacctctgagttacactcaaactctgcacttcctggaccagtagacaacacccacattttgtcccccgtcagtagctttcgaccatacacgtggtgcgccgcctgcaccgtcccatctcctcagcaagtgctggctacatcactgatggaaaaagatgttgggagcggagacggcgcggagacattgtgcatgacagtgctagaagaatcctctatctcactgatgagctcagttgttgctgacttcagcgagttcgaggaagatccccaagtgttcaacacgttattcccaagtcggcctattgtccccctgtctagcagaagcatggaaatttcagagacgagcgtgggcatcagcgccgaagtcgacatgtcaagtgtgaccactacacaagtccctcccgctcacggcaggttgtccgtaccggctagtcttgaccccactgctgggtctttgtccgtcgcggaaacacaagtcacccccagcagcgtgaccaccgcattcttctcagtgatcacttcaattctattggatagcagcttctccgtcatcgctaacaagaacacaccttctcttgctgttcgggacccatccgtttttacaccatatagcctcgtaccctctgttgagtcaagtttgtttagcgaccaggagcggtcctctttctcagaacataaaccccgcggggctctcgattttgcttcatctttcttctctactccaccattagagctgtctggcagcataagcagccctagtgaagccccagcttccctcagcttgatgccgtccgatctctctccgttcacctcacaatccttttcacccctggtagaaacatttacactgtttgactcttccgatctgcagagttcccagctttccctgccctccagcaccaacctcgaattctctcaactgcagccatcttctgaattgcctttgaacactattatgctgttaccttcccgcagcgaagtgagcccttggagctctttcccaagtgacagtctggagtttgttgaggcatccaccgtctccctcaccgatagcgaggcccacttcacaagtgcctttatcgagacaacttcatatctggaaagcagcctgatcagtcatgagtccgcagtcacagcgctggtgccccccgggtccgagtcttttgacattctcaccgccggtattcaggctactagtccgctcacaaccgtccatacaacccctattttgacagaaagcagcttattttcaaccctcacaccaccggatgaccagatcagtgccctggatgggcatgttagcgtactcgcctcctttagtaaagctatacccacaggaacggtgctcattactgacgcctacttgccatcgggaagctcctttgtcagtgaggccaccccgtttccattgcccactgagctgacagttgtggggccctcccttacacccactgaggtgcccctgaacacaagtaccgaggtatcaacaactagcactggcgccgccacggggggacccttggattctacactgatgggcgacgccgcctcacagtcccctccggaatccagtgcggccccacccttaccctcacttcgtccggtgacagcttttacccttgaggctacagtagatacaccaacgctcgctaccgccaagcctccatatgtatgtgatattactgtgcctgacgcctacctgataacaaccgtgcttgcgcgcagggcagtgcaggagtacattataactgctatcaaagaagtgctcaggattcactttaatagggcagtggagttgaaggtgtatgaactgtttactgatttcacttttctcgtaactagcgggcccttcgtgtacaccgcaatttctgtcattaacgtgctgatcaattccaagctagtacgggaccaaacccctttgatcctgtctgtgaagcctagcttcctggtgcccgagtcccggtttcaggtgcaaactgtgcttcagttcgtgcccccctcagtggacactggattctgtaatttcacccagcgtatcgaaaaagggctgatgacagccttatttgaggtccgcaagcaccatcagggaacctacaatttaacagttcaaatcctcaacatcacgatctcttcatctcgagtgacaccacgacgcgggccggtaaacatcatatttgctgtcaagtcaactcagggatttcttaacggatccgaggtgtctgagctcctgcgcaatctgtcagttgtggaatttagcttctatctgggatacccagtgcttcagatagctgagccttttcagtatccccagctgaacctgagccagctgctcaagagttcatgggtgaggacggttctgctgggcgttatggagaaacaactgcaaaatgaagtgttccaggctgagatggaacgcaaattggcccagctactgagcgaggtgagcacccgcaggaggatgtggcggcgagccacggtagctgccggcaattccgtggttcaagtggttaacgtgtcacgcctggagggggacgacaaccctgtgcagcttatctacttcgtggaagaccaggatggcgagagactgtcagccgtgaagtcgtcggacttaattaataaaatggatctgcagcgggctgccatcatcctgggatatcggattcaaggcgttatcgcacaacccgtggatagggtgaagcggccatctccagagtcgcagagcaacaatctgtgggtaatcgtaggcgttgtgatccccgtgcttgtggttatggtgatcgtcgtaatactgtattggaaactttgtcggactgacaagctcgattttcagccagacacagtcgccaatatccaacagcggcagaaactacagatccctagtgttaagggtttcgactttgccaagcaacatctaggacagcacaacaaggacgacatactgattatccatgagcccgcccccttgcctggaccgctcaaagaccatactactccctctgaaaatggagacgtaccaagtccaaaaagtaagattcctagtaagaatgtacggcaccgcgggagagtgagtccttctgacgctgactccactgtgtcagaggagagctcagaacgggacgccggggacaagacaccaggcgctgtaaacgatggacgctcacacagggccccacagtcaggccctcccttgccctcctcagggaacgagcagcactcaagcgccagtattttcgagcacgttgacagaattagtaggcctcctgaggcgtcgaggagagtgccttcaaagattcagctgatagctatgcagcccattcccgccccgccagtgcagcgaccatcacccgctgatcgtgtagcggagtcaaacaaaatcaataaggagatacagacagcactgcgccacaagtcagagatcgaacatcaccgtaataagatacgcctcagagccaagaggcgcggccattacgagtttccagtggtggacgatctctcctctggcgataccaaagagaggcatcgggtgtaccggcgagctcaaatgcagatcgataagattctcgaccctaccgcaagtgtaccttcagtgttcattgagccaagaaagtcgagccgtattaagaggtcaccaaagcctcggcgcaagcaccaagtaaatggttgccccgcggatgccgagaaagaccgcctcatcaccaccgattcagatggaacatacaggcgacctccaggtgttcacaacagtgcatatattggatgtccgtctgatcctgacttaccagcggacgtccagactccgtccagcgtggagctgggtcgttatcctgcccttcctttccccgcgagccagtacatcccccctcagccctctatagaagaggctcgccaaacaatgcacagcctgttagacgatgccttcgctttggtcgccccctccagccagccggcttccacagctggagtgggtcccggagttcccccgggcctccctgcaaattcaaccccgtcacaggaggagaggagggccacccagtggggatctttttacagccccgcgcagacagccaataacccttgcagccgatacgaggactatggaatgaccccacccacgggtccgctgcctcgccccggatttggccccgggttgctgcaaagcacagaactagtgccccctgacccccagcagccacaagcctctgccgaggccccctttgccgccaggggtatctattccgaggagatgcccagtgtggcacgccctaggcccgtgggaggaacgacaggcagccagatccagcatctgacccaggttggcatcgcatcacgtatcggggcgcagccagtggaaattcctcccagcaggggttcccaatacggcggaccagggtggccatcatacggagaagatgaagccggacgccgtgaggccgtgcccagaacatccggtcgagagccatccgccccatccggcaacttgccgcatagaggtctacaagggcccggcctggggtacccaacaagttctaccgaggatctgcagcctgggcacagctccgcttcactgattaaagccatccgcgaagagttactacgactgtcccagaagcagtcaacagtccagaatttccactcttag

SEQ ID NO: 130458 - DNA, 252 bp, synthetic construct
  misc_feature 1..252: note = Description of Artificial Sequence: Synthetic coding sequence
  source 1..252: mol_type = other DNA
atggggggtcttttctctagatggcggactaagccatcaacagtcgaggtgctggaatcaattgataaagagatacaagctttagaagaatttagagagaaaaatcagcgactccagaagctttgggtgggccgcctcatcctctacagctccgtcctttatctgttcacatgtctgatcgtttacttatggtacctgcctgacgaattcacggcaagattggctatgactcttcccttcttcgctttctag

SEQ ID NO: 130459 - DNA, 3090 bp, synthetic construct
  misc_feature 1..3090: note = Description of Artificial Sequence: Synthetic coding sequence
  source 1..3090: mol_type = other DNA
atgctcttccgcgccagaggcccagtgagaggtcgaggttgggggagacccgctgaagctcccaggaggggcaggtccccaccttggagtcccgcctggatctgttgctgggccctcgcaggatgccaagcagcttgggcaggcgacttaccaagtagttcaagccgacctctccctccctgtcaggagaaggactaccacttcgaatatacagaatgcgactcatccggttctaggtggcgggtggctatccctaattctgcggtggactgcagtggcttgcctgacccagtccggggtaaagagtgcaccttctcttgcgcctccggcgaatacctggagatgaaaaatcaggtctgttccaaatgtggcgagggcacctattctctgggcagcgggatcaagtttgacgagtgggacgagcttcctgctggttttagtaacatagccacttttatggacacagtcgtggggccatcggatagcaggcctgacggctgcaataattccagttggattccgcggggaaactacatcgaaagcaatagagatgactgtaccgtctccctcatctatgctgtgcacctgaaaaaatccggttacgtgttctttgagtatcaatatgtcgataataatatcttctttgagttttttatccagaacgaccagtgccaggaaatggatacaaccacagacaagtgggtgaaattgaccgacaatggtgaatggggtagccattccgtgatgctgaaatccggcacgaatatcctctattggaggactaccggcatcctcatgggcagcaaggctgtgaagccagtgctagttaagaacatcacaattgagggagtggcatacaccagcgaatgcttcccatgtaagcccgggaccttttcgaacaaaccgggcagctttaattgtcaggtctgtcccaggaacacctacagtgaaaaaggcgcaaaggagtgcattcgttgcaaagacgattcgcagttttctgaagaggggtcatctgagtgcactgagaggcccccctgtactaccaaggactacttccagatccacaccccctgcgatgaggaaggtaagacgcagattatgtacaaatggattgagccaaagatctgtagagaagatttgacggacgctataagattgccaccctccggcgagaagaaggattgtcctccttgtaatccaggcttttacaacaatggaagctcatcttgccacccctgcccccctggcacgttcagtgacgggactaaagaatgtaggccatgcccagccggcacggagcccgctttaggtttcgagtataagtggtggaacgttctgccgggtaacatgaagacgtcctgtttcaatgtggggaactcgaagtgcgatggcatgaacggttgggaggttgccggagaccacattcagtccggcgccggaggctcggataatgactatcttatcctaaacctgcacattcccgggttcaagccgcccaccagcatgaccggggcaacaggttccgaactcggccgaattaccttcgtgtttgagacattatgtagcgcagactgcgtgctctatttcatggtcgatattaataggaaatccaccaatgtcgttgagtcctgggggggcaccaaggaaaaacaggcatacacccacatcatttttaaaaatgctacgtttacgtttacctgggcattccagcgcactaatcagggtcaggacaatcggcggtttattaatgatatggtgaagatttactcaatcacagccacaaatgcagtggacggcgtggcaagttcctgccgagcctgtgcccttgggtctgaacagtcgggatcaagctgtgtgccctgcccccctggtcattacatcgaaaaggaaaccaatcagtgcaaagagtgtcccccggacacctacctctcgatccaccaggtttacggtaaggaagcctgcattccttgcggtcctggctccaaaaataatcaggaccacagtgtatgttacagtgactgctttttctatcatgagaaggagaatcaatcgctgcactacgacttttcaaacctgagttccgtaggtagccttatgaatgggccttctttcacttctaagggcactaaatatttccacttcttcaacattagcttatgtggacatgagggtaaaaagatggcattatgcacaaacaatatcaccgactttacggtcaaggagatagtagccgggtcagatgactatactaacttagtgggagcttttgtctgccaatctactattattccttctgagtcaaagggtttccgtgctgccctgtccagccagagcataattctggcggataccttcatcggagtaactgtcgagactactctgaaaaatattaacatcaaagaggatatgtttcccgttccgacttcccagattccagacgtacacttcttctataaatccagcaccgctactacttcatgtattaatggcaggtcaactgccgtgaaaatgcggtgcaatcccacaaaatctggtgcgggtgtcatcagtgtgccctcaaaatgtccagccgggacatgcgacggatgtactttctatttcttatgggaaagtgctgaggcctgtcctctgtgtacagaacatgacttccacgaaatcgaaggagcttgtaaacgcggttttcaggagacactctacgtatggaacgaaccaaaatggtgcatcaagggaatctctcttccggagaaaaaactcgccacttgcgagaccgtcgacttttggctaaaggtgggcgccggagtgggggcttttacagccgtcttgcttgtggcccttacatgctacttctggaaaaagaatcaaaagctcgaatataaatattctaaacttgtgatgacgacaaatagcaaggagtgtgaacttcccgccgccgactcttgcgctatcatggaaggtgaggacaacgaggaggaggtggtgtactcaaataaacagagcctcctcggcaagctgaagagccttgctaccaaagagaaagaggaccacttcgagtcggttcaactgaaaacgtctcgcagccccaacatatag

SEQ ID NO: 130460 - DNA, 11043 bp, synthetic construct
  misc_feature 1..11043: note = Description of Artificial Sequence: Synthetic coding sequence
  source 1..11043: mol_type = other DNA
atggaccagcgaaagaatgagtccattgtaccgtctattactcaactcgaagacttccttaccgagcacaattctaacgtggtgtggctcctagtggcgacgatcctatcctgcggttggattatttacttgacatactacaattcacggaatgtcggcctgattttgacactcgttctcaacagactctataagcatggctacatccatataggatcattttcattctccgtcctgagcggaaaagtcatggtaagggaaatttactacattactgaggacatgtctataaggatccaggacgggtttattatcttcagatggtggaaaatgtataaccccaagcagaagcagcacgatccgaaagccgaaacccgcctgtacattactgtcaatgactttgaattccacgtttacaacagatcagatctgtacgggcggttgcaggagttattcgggcttgagcctaccatcattccacctaagaaagatgatgacaagacccgtgaaatcgggcgcacacgcactcagagtaaaatagaacgggtcaaggtcaaaactgaatcacaggatcccacctctagctggaggtccttaatcccggtcattaaggtgaacgtgtcaacaggaagactggcctttggcaatcattaccagccacagaccctgtgtatcaacttcgacgatgcatttctgacttacaccacgaagccaccatctagtcaccttgatcagttcatgcatatcgtgaaaggcaagctggaaaatgtcagagtgatgctcgtgccttcgcccagatacgtgggccttcagaacgatgaacctccaagattaatgggggaggggtttgtcgtgatgcagagtaacgacgtagacatctactactacatggacgagcccgggctggttcccgaagaaacagaagagaacattgaaggggaaatgtcctccgaggattgcaagcttcaggacctgccaccttgctggggactggatattgtgtgtgggaagggaacagatttcaattacggaccctgggctgataggcaacgcgactgcctgtggaagttctttttcccaccagattaccaggtcctcaaggtgtcagaaatcgcccagcctggacggccacggcaaatcctggccttcgagttacgtatgaatatcatagccgacgcaactatcgatctgctgttcactaagaatcgagagactaacgccgtgcacgttaacgtgggagccgggtcctatctggagataaatatccctatgaccgtagaagaaaatgggtatactccggcgataaaaggccagctgctgcacgtggatgctacgacctccatgcagtatcggacactactggaggccgagatgctcgcattccacatcaatgcctcctaccctcggatttggaacatgccccagacatggcagtgcgaacttgaagtctataaagccacttatcatttcatttttgcacagaagaattttttcacggatctgattcaagattggtccagcgatagtccaccagacattttctcgttcgtaccctacacctggaactttaagattatgttccaccagttcgagatgatttgggcagccaaccagcacaactggatagactgctcaaccaaacagcaggaaaacgtgtacctagctgcatgcggggaaacactcaacatcgatttcagtctgccttttaccgatttcgtacccgccacctgtaataccaagtttagtcttaggggcgaggacgttgacttacacctgttcctacctgactgtcatccaagtaaatattcattgttcatgctcgtcaagaattgtcatcccaataagatgatccatgatacaggcatccctgccgaatgccagtcagggcagaaaaccgtgaagcctaagtggagaaatgtcacccaggagaaaagcggctgggtggaatgttggacggtgccctccgttatgttaactatagattacacttggcatcctatttacccacagaaggcggacgaacagcttaagcagtccctgagcgaaatggaagaaaccatgctgtccgtgctccgacccagtcagaagacatccgacagggtggtgagctccccttccaccagttcccgacctcccatcgacccctctgaactgccccccgataagctgcatgtagaaatggagctgagccccgactctcaaattacactgtacggaccattgctcaatgccttcctgtgcattaaagaaaattactttggagaggacgacatgtacatggactttgaagaggtcataagcagcccggtcctgtctctgagcacctcttctagctccggatggactgccgtcgggatggagaatgataagaaagaaaatgagggctcggcaaagtctatccacccactagccttgcgaccctgggatattacagtgcttgttaatctctacaaagtgcatggcaggctgcctgtgcatgggacgaccgacggcccggaatgccctactgccttcttggaacggttgtgtttcgagatgaagaaaggcttcagagagacaatgctgcaactgattctgtccccacttaacgttttcgtgagtgacaactaccaacagcgcccacccgtggatgaagtgcttcgcgagggtcatataaacttgtctggtttgcagctgcgtgcccacgctatgttctctgcggagggcctcccactcgggtccgattctttggaatacgcttggttaatagacgttcaggccggttccctgacagcgaaggtcaccgctccacagctggcatgcctactcgagtggggtcagactttcgtgttccacgtggtctgtagagagtatgaactggaaagacccaaaagcgtgattatatgccagcacgggatagatcgccgcttctgcgaatcaaagctttcatgtataccagggccctgtccgacatcggacgacttaaagtacacaatgatccgtctggctgtggacggagccgatatatatattgtagagcacggctgcgcaaccaatatcaaaatgggggctataagggtggccaattgtaatttacataaccagtctgtgggtgaaggcatctctgcagctattcaggattttcaagtgcgtcagtacatcgaacagctgaataattgccgcattgggttgcagcctgctgtgctccggagggcttattggctcgaggcggggagcgctaatctgggcttaatcacagtggatatagcccttgcggctgaccaccacagtaaacatgaggcccagagacactttctggaaacccatgacgcgcgaaccaagcggttatggttcctgtggcccgacgacatacttaaaaacaaacgctgtagaaacaagtgcggatgtttaggcggctgcagattctttggaggaaccgttaccggtttggacttctttaagcttgaagagctcacaccatcttcatctagtgctttttcatctaccagtgccgaatctgatatgtactacgggcagtctttgctccagcccggtgaatggatcatcacgaaagagatacccaaaatcatcgacggtaacgtgaacggaatgaagaggaaagagtgggagaataagtccgtcggcatcgaggtggaaaggaagacacagcacttatccctccaagttcccctcaggtcacatagttcctcgagcagcagcgaagagaattcatcgtcatcagcagctcagccattgttggctggggagaaggaatcaccctcctccgtggcggatgaccacctcgttcaaaaggagtttctccacggcacgaaacgtgacgacggtcaggccagcatccctaccgaaataagcggcaattcccctgtatcgccaaatacacaagataagtctgtggggcagtccccactgcgcagccctcttaaacgccaggcttccgtatgttctactcggctcggctcaaccaagagccttactgcagcattctacggggacaaacaacccgtaactgttggagtgcagttcagttctgacgtgtccagatccgatgaaaacgtattggactcccctaagcagcggagatccttcggaagtttcccatatacgccttctgctgactctaatagctttcaccagtaccgaagtatggattcctccatgtccatggctgattcggaggcatatttcagtgctgctgaggaattcgaacctataagctcagacgagggccctggcacctatcccggacgaaagaaaaagaaaaaacagacccagcaaattgattattcccgaggcagcatataccactctgtcgagggcccactcacaggtcacggtgagtctattcaggatagccgcaccctcccattcaagacccacccctctcaagcctccttcgtgtccgccttggggggtgaggacgatgtgatagaacacctgtacatcgtggagggtgaaaaaaccgtcgagagtgagcagataacccctcagcaaccggtgatgaactgttaccagacttacctgacgcaatttcaggttattaattggagtgttaagcaccccacgaataagaggacttctaagagctccctgcatagaccccttgacctggatacccctacctctgaagaaagctcttcgagctttgagcagctgtcagtgcctaccttcaaagtgatcaagcaagggctgactgccaacagtctgctggataggggaatgcagctgtcaggatcaactagcaataccccatatacccccctggaaaagaagctggccgacaacacagacgatgagacattaaccgaggaatggaccctggaccagcctgtaagtcagacacgcacaaccgccatcgttgaggtgaagggtaccgtggacatcgtactcactcccctggtggctgaagccctggacagatatatcgaagcaatggtgcactgtgcttccacccgacatccggccgctattgtagatgatctgcatgccaaagttctgcgcgaggccgttcagaattccaagactacctttagcgaaaatctaagtagcaagcaagatattcggggtacaaaaactgaacagagcacaattggaactaccaaccagggtcaggcccaaacgaatctgacaatgaagcaggataatgttactattaagggccttcagacaaatgtgtctatccctaaagtcaacctgtgtctgctgcaggcttccgtggaggagtctcccactactgccccgagtcgcagtgtcacccacgtaagcctagtggccctgtgctttgataggatcgccacccaagtgcgcatgaatcggggggttgttgaagagacatctaataacgccgagccaggcaggacgagcaacttcgataggtatgtgcatgccactaagatgcagccccagtcaagtggatctctgagatctaacgctggcgcagagaagggtaaagagattgcagccaagctgaatattcaccgtgtgcacggccaactgcgcggtttagatacaaccgacatcggaacttgtgctatcaccgcaataccttttgaaaaatccaaggtcctgttcacgcttgaggagctggacgaatttacttttgtcgatgaaactgaccagcaggccgtacccgacgtcacgagaatcggcccctcgcaggaaaaatgggggtggatcatgtttgaatgtggcctggaaaaccttacaataaagggcgggcggcagagcggggcggtgctgtacaacagcttcggcattatgggtaaggcgtccgatactgaaagaggtggagtcctcaccagcaataatagtagtgacagcccaacggggtctggatacaataccgatgtctccgatgataacttaccctgtgaccggacctctccttctagcgacctgaatggaaactctgtctctgatgaacaggatgaaggggtcgagagcgacgacctcaagaaagacctaccacttatgcccccccctccagacagttgctctatgaaattaacgattaaggaaatttggttttcgttcgctgcccccacgaatgtacgtagccatacccacgcctttagtaggcagttaaaccttctctcgacggcgaccccagccgtgggcgcctggcttgtgcccatagaccaacttaagtcgagtctcaacaaactggagaccgagggcactctgcgtatctgcgcagtgatgggctgcattatgactgaagctctggaaaataagagcgttcatttccctctgcggtcaaaatacaacaggctgacaaaagtggcccggttcttgcaagagaatccatcctgtctcttgtgtaatatcctccaccattacttgcatcaggcaaattacagcatcattgacgacgctactatgtcagacggcctgcccgctctcgtgaccctgaagaagggactggtggcccttgctcggcaatggatgaaatttattgtggtgacgcctgcctttaaaggcgtctcccttcatcgacccgcccagcctctcaagccccaaattgccatggatcatgaacacgaggacggactcgggctcgacaacgggggcgggcttcagtctgacacttcagcggatggggccgagttcgagtttgacgcggcaactgtttctgaacacaccatgctcctggaaggaacagccaacagaccccccccgggctccagcggacccgtgactggcgcagaaatcatgcggaagctgtccaagacacatacacactcagatagtgcccttaaaatcaaaggaatccacccataccatagcttgtcctacacaagtggtgatactgcaaccgattctcccgtgcacgtgggccgtgccgggatgccagtcaaggacagcccccgaaaagagtcccttctctcgtatctgaccggatccttcccaagccttcataatctgttggaagggactccccaaagaagttcagccgccgtcaagtcctcgtcactgaccaggacaggcaacacagttgctaccgatatgctctctgagcatccacttttgagtgagcccagcagtgtcagtttttacaattggatgtccaatgctgtgggaaaccgcggtagcgtcctgcaggagtccccggtgacaaagtccggacataactctttgcccaccggcgtggcgcccaacctgcccaccatcccgtccgcctcggatttcaacaccgtcctgtcttctgaccagaatacactcgatggtactcacagccaacatagtacctcacaggacgatgtcgccggggtggaggaggcgaaccaagggttccccgccgtgcaactggccgacgctcaggtagtctttaaaccacttctgtcacatactgggatccagagtcaagacaccatgccattctgctatcggatgtatttcggcgagcacttaagtttttccggcacgcttgactgccttcgagcagatatcgtcgactccgatacagcaaaggagagaaaaggcaagcgggcaagacgccaggggcatgtaaatctgcctccgttagagtttaagcccgcactcatgctcgggaccttctcgatctccgcggtggtgatggagaaaagcgtgtgcactccccagaactctactagcgccctctcctttcatgacctcagtaaacgttattacaatactttccattgtaatttcactatatcgtgtcagtctatatcccagcacgtcgacatggcactggttagactgatccaccagttcagtaccatgatcgacgatatcaaagctacacaaacagacatcaagctctctagatataccgcgggcagcgctagccctactccgacattcaaaacaagaaagcatcgcgacttcaggtcttccgacttctcgcgctcctctcgggggtccctgaacggaggcaacagagtcaacaatgccaaaaacaaacgcaccaacaacgagaacaataagaaggaatccaggaacaaaaattctctcgggcgttcagaacgcagaacatccaaagtctcgagaaaagggagcaaagacgtggtcgaccatatgaccatacacatggacgattctgattcaataacggtaagcgaacagtccgagccaagtgccgagtgctggcaaaatatgtacaagctactgaacttttactcactgatctctgaccccactggcattctggaaaagagctccgaaacctttggtcctgcaggcgttaggagccctacggagcctacctgtaaagtggtcttcgaaaacgagcaggacaactccagtctgacaaagacacagaggaagcggtccctggtcacctcagaacctcagcacgtgacactgattgtcttcggaatcggaatggtgaaccgaacacacctggaggcggacatcggcggcttgacgatggagagtgagttgaagagaattcacggctcctttaccctgaaggaaaagatgaaagacgtgctgcatcagaagatgacagagacgtgcgcaactgcgcatattggcggcgtaaatattgttctccttgaaggcatcacacccaacatccagctcgaggacttcccaacgtcgcctacctctacagccaaacaagagtttttgactgttgtgaagtgttccatcgcaaaaagtcaggcactgtacagcgcgcagagaggtcttaagacaaataacgccgccgtgttcaaggtcggcgccatatccatcaacattccgcagcacccggccacgctgcattctatgatggtcagaagttcccaccagttaagtaaacagatctctgacctgattagacagccctccaccgctccccagccagtcaaagaagacatcgcaacccctctgccttccgagaagacacccacgagcgtaaaccagacaccagtggagacaaacgagtttccccagttaccagaaggactagagaagaagccaattgttctgaagttttcagcaatgcttgacggcattgccatcggtgccgcattgctgccaagcctaaaggcagaatacaagatgggccggatgcgctcacatgggatgaccggcgcccagacaaggttcactttcgagctgcctaatcacagactacggtttacttcaaaagtttcagctaccgatatgtcgactataccaccaagtgcaagtctcaatctgcccccagttacgatgtctggtaagtacattatggaagagcacgatagttactcagaccaggtgtggtccatcgatgagctgccgagcaaacagggttactacctgcagggcaattacttacggtgcgtggcagaggtgggcagctttgaacacaacctcacaactgacctgctaaatcatctggtattcgtgcaaaaggtgttcatgaaagaggtgaatgaggtgattcagaaggtttctggcggagaacaacctatcccgctctggaatgagcacgatggcaccgcagacggcgataagccgaaaattctgctgtattcacttaacctccagttcaaagggatccaggtgaccgccaccactccttcaatgcgagctgttaggttcgaaaccggactcattgaactcgagctgagtaaccgtctgcagaccaaggcgtcgccaggtagtagtagctatctaaagctgttcggtaaatgccaggtcgatttaaatttggctttgggccagatagttaagcaccaggtgtacgaggaggctggatctgacttccaccaggtcgcttactttaagactcgaatagggctgaggaacgccctgagagaagaaatttctgggtcttcagatcgggaagcggtgctgatcaccctaaaccgtccaatagtgtacgcacagccagttgccttcgaccgggcagtgctcttctggctgaattataaggctgcctacgacaactggaacgagcagaggatggcactgcataaggacatacatatggcaactaaggaggtggtcgatatgctcccgggcattcagcagaccagcgcacaggcctttggaactctattcctgcagctcactgtgaatgacctgggaatttgcctgccaatcactaataccgcccaatcaaaccataccggagatctagatacagggagcgctttggtccttactatagaatccacactcattacagcctgctctagtgagtccctggtaagcaagggtcacttcaaaaatttttgtatcaggttcgcagacggcttcgagaccagctgggacgattggaaaccagagatccacggcgatcttgttatgaatgcgtgcgttgtgcctgacggtacatatgaggtgtgcagccgtacgactggccaagcggcagcggaaagcagctccgcaggcacctggacgctgaatgtattatggaaaatgtgtgggatcgacgttcatatggatcctaatatcggaaagcgactgaacgccctagggaacaccctcaccactctgaccggtgaggaagacatcgacgacattgccgatctgaacagcgttaatattgccgatctgtccgatgaggacgaggttgatacgatgtcacctaccattcatacggaggctacggactacaggcgacaggctgcctccgccagccaaccaggggaactgaggggaagaaagatcatgaagcgcattgtggacattagggagctaaacgagcaggcaaaggtgattgatgacttaaaaaagttaggagcatccgaggggaccatcaaccaagagatacagcgctaccaacagctggagtctgtggctgtcaatgacatccggagggatgtccgcaagaaactgagaagatcttccatgagggccgcctccttaaaggacaaatggggcctatcatacaagccttcttactcacgctctaaatctatctccgcctcgggccggccaccactgaaaagaatggagcgcgcctccagccgggtcggcgagactgaggaacttccagagattcgcgtcgacgccgcctccccgggaccccgagtaactttcaatattcaggatacaatcgctgagatacgacggaaaaagatctcgttcaaagtggtattctag

SEQ ID NO: 130461 - DNA, 2241 bp, synthetic construct
  misc_feature 1..2241: note = Description of Artificial Sequence: Synthetic coding sequence
  source 1..2241: mol_type = other DNA
atgccatgcctcggactgctcgcgaacctgtgccgccacaatctctctgttcagacgcatataaagaccctgtctaatgtaaagtccttctataggacattaattacattattggcccacagcagcctgacagtggtggtctttgctctgtcgattttatctagcctcaccctgaatgaagaagtcggagagaagttgttccacgcaaggaacatccatcagacattccagctcatttttaacatattaatcaacggggatggcacattaacccggaagtactctgtggatctccttatggacttattaaaaaaccctaaaatcgcggactacctgacgcgttacgagcacttctccagctgcctccaccaggtccttggtctcctgaacggtaaggaccctgatagtagcagtaaggtcctcgaattactcttagcattctgctccgtcacacagctccgccacatgctcacacagatgatgttcgaacagagtccgcccgggtcagccactctcgggtctcataccaagtgcctggagccaactgtagctctcctccggtggctgtcccagcccctggacggctccgagaactgctcggtgctggcattggagctatttaaagagatcttcgaagatgttattgatgctgccaactgctcgtcagccgatcgctttgttacgcttctgcttcccacgattctggaccaactgcagttcactgaacagaatctcgatgaagcgctcacccgcaaaaaatgtgagagaattgcaaaagccatcgaggttctgctgacgctctgtggggacgataccctcaagatgcacatcgcaaaaattctcacaaccgtcaagtgtaccaccctgatcgaacagcagttcacctacggaaaaatagatctgggcttcgggacaaaagttgcggacagcgagctatgtaagctggctgccgacgtaatcttaaaaacactggacttaatcaacaaactcaaaccacttgtgcccggcatggaagtctcattttacaaaatccttcaagatccccgccttatcacacccctagcattcgccctcacgtccgacaaccgggaacaagtgcagtctggactaagaatcttgctagaggctgcaccccttccagactttcccgcactcgtgctgggggaatcaatcgccgcaaataacgcttatcggcagcaggagaccgagcatattccgcggaaaatgccctggcagtcaagcaatcactcatttcctacatccatcaagtgcttaacaccgcaccttaaggacggagtgcccgggttgaacattgaggaactgatcgaaaaactccagtctggaatggtagtaaaggaccagatctgtgatgtgcgcatctccgacatcatggacgtgtacgagatgaagcttagcacactggctagcaaggagtcccgactgcaggacttactcgaaaccaaagccctcgccctcgcgcaggcggaccgcctaatcgcacagcaccgatgccagcggacccaggcagagacagaggcacggaccctcgcctcaatgctgagggaagtagaacggaaaaacgaggagcttagtgtactgctgaaggcacaacaagtggaaagcgagagggctcaatctgacatcgaacacctgttccaacacaatcggaaacttgagagtgtggctgaggagcacgaaattctgaccaaaagctacatggagctgctgcaacgcaacgagtctactgagaagaagaataaagacctgcagataacatgtgatagcttaaacaaacaaatagaaacagtaaagaagttaaatgaatcattgaaggagcagaatgagaagtccattgcacagcttatcgaaaaagaggagcaaaggaaggaggtgcagaaccagctggtggacagagaacacaagctcgccaacctgcaccaaaaaaccaaagtccaggaggaaaagattaagactctccagaaggagcgggaagacaaagaggagacaatagatatcttacgaaaagaactgtcaagaacagaacaaattaggaaggagttgagtataaaggcatctagtttagaggtgcagaaggcacaactggagggacgcctcgaagaaaaggagtctctggtgaagctgcagcaagaagagctgaataaacactctcatatgatcgcaatgattcacagtctctccggcggtaaaatcaaccctgagaccgttaatttgagtatctag

SEQ ID NO: 130462 - DNA, 840 bp, synthetic construct
  misc_feature 1..840: note = Description of Artificial Sequence: Synthetic coding sequence
  source 1..840: mol_type = other DNA
atgactctgccattcttcgcttttcctttgattatctggagcattagaaccgttatcatcttcttcttttctaagaggaccgaaaggaataacgaggccctcgacgatctgaagtcgcagcgcaaaaagatccttgaggaagttatggaaaaggaaacgtacaaaacagctaaactcatactagagcgttttgacccagactcaaagaaggccaaggagtgtgagccaccatctgccggcgccgccgtaaccgcccgtcccgggcaggaaatccgacagcgcactgcggctcagcggaatctgtctcccacccctgcctcacctaaccaagggcctccaccacaggtgcctgttagtcccggccccccaaaagattcctctgcccctggtgggcctccagaaagaactgtgacaccggcactcagctcgaacgtgcttcctcgacatctgggctcccctgcaacatcagtcccaggaatgggcctacatccgcctggtccccctctcgcaagaccaatcctaccccgcgagagaggagctcttgatagaattgtcgagtacctagttggcgacggcccccagaatcgctacgcccttatctgccagcagtgcttttctcataatggcatggctctaaaagaggagttcgagtatatcgcctttcgatgtgcctactgttttttcttgaaccctgcaaggaagaccagacctcaggcgccccggctcccggaattttccttcgagaaacggcaggtggtggaaggctccagcagcgttgggcctctgccctctggaagtgtgttgtccagtgataatcaatttaatgaggtccagtactag

SEQ ID NO: 130463 - DNA, 3192 bp, synthetic construct
  misc_feature 1..3192: note = Description of Artificial Sequence: Synthetic coding sequence
  source 1..3192: mol_type = other DNA
atgacccggctgggttggccctccccatgttgtgcaagaaagcagtgttccgaaggccgcacctactcaaatgcggtgatttctcccaacttggaaaccactcgtataatgcgggtgagtcacacatttcccgtggtagattgtactgcagcgtgttgcgacttatctagctgcgatttagcatggtggtttgaaggtaggtgttaccttgtgagctgccctcataaagaaaattgtgagcccaagaagatgggcccaattaggagttacctcacctttgttctgagacctgtgcagcgacctgcccagttactagattacggggatatgatgctcaacagaggcagccctagtggtatctggggagattctcccgaagacatccgaaaagatcttacttttctcggcaaggattggggactggaggaaatgtccgaatactctgatgactatagagagctggaaaaagacctactccagccttctgggaaacaagaaccccggggctccgccgaatacacagattggggcctgctccctgggagcgagggggcattcaattcttctgtgggcgattctccagcagtgccggcagagacccagcaggatccagagctgcattatcttaatgagtccgcctcaacacccgctccaaagctgcccgaaagatccgtgctgctccctctcccgacgacccctagctctggggaagtcctggaaaaagagaaagcgagccagctgcaagaacagagcagtaattcctcgggaaaggaggtgctgatgccctcccattctctgccgcccgccagcctggaactctctagcgtcacagtggagaagagccccgtgctcacagtgacaccaggaagcacagaacacagtatcccaacgccaccaacttctgctgccccatcagagtctacaccgagcgagctccctatcagcccaacaactgccccccgtaccgtgaaggagctgactgtgtccgccggggacaatctgattattacgttgcccgataacgaggtggaactgaaggcatttgtcgccccggccccaccagttgagactacttacaattacgagtggaacctgatcagtcacccaaccgattaccagggagaaattaagcagggccacaagcagacactgaacttgagccagctgtcagtcggactctatgtattcaaggtgacagtctccagcgagaatgcctttggcgaaggattcgtgaacgtcacagttaaacccgctcgcagagtgaacctccccccagtcgccgtagtgagccctcaacttcaagaactaaccctgcctctcacctctgccctcatcgatggatcccaatccaccgatgacaccgagattgtctcctaccactgggaagaaattaatggtcccttcatcgaagagaagacttccgtggattctccagtgctgagactgtccaacctggaccctggaaactacagcttcagactgactgtaacggacagcgacggcgcgactaatagcacgaccgccgccttgatcgtcaacaatgccgtggactaccccccagtggccaacgccggccctaatcacaccatcactctgccccagaactcgataacactgaacgggaaccagagcagtgatgatcatcaaatcgttctttacgaatggagtctggggccaggaagtgaaggcaagcacgtggtcatgcaaggagtacaaaccccttacctgcacctgtcagctatgcaggaaggcgactatacctttcagctgaaggtgacagactctagtaggcagcagagcacagcggtggtcaccgtgatcgtgcagccagagaataacagaccgccggtggcggtggctggccctgataaggagctgatttttcccgtcgagagcgccaccctagacggcagctcgagctccgacgatcacggtattgtcttttatcattgggagcacgtgagaggccccagcgctgtggaaatggaaaatatcgacaaggccattgccaccgtgaccgggctgcaggtgggaacctatcactttcgcctaaccgttaaagaccagcagggccttagcagcaccagtacactaactgtggcagtgaaaaaggaaaataatagcccccccagagccagagccggcggcaggcatgtcctggtcctgcccaacaatagcatcaccctcgacggatctaggagcacagacgatcaaagaattgtcagttacctgtggataagggacggccagagcccagccgctggtgatgtgatcgatggtagcgatcactcggtggccctccagttaactaacctggtcgagggtgtctacactttccatcttagagtcacagattcccagggagcatccgacacagatacggctacagtagaggttcagcctgatcccaggaaaagtggacttgtggaactgacattacaggtgggcgtgggacagttaacagagcagagaaaagacacactagtaagacagcttgcagtgctcctgaacgtgctcgactcggacattaaggtacagaagattcgagcacattccgatctgagcactgttattgtgttctacgtccagagtcgaccccccttcaaagtgctgaaggcagcggaggtggcacgcaatctgcacatgcgattaagtaaagagaaagcagattttctgctattcaaggtattaagagtcgataccgcagggtgtttgctgaaatgttcgggccacgggcactgcgaccctttaacaaaaagatgtatatgttcacatctgtggatggagaaccttattcagcgctacatttgggatggcgagagcaattgcgagtggtcaatcttttacgtgactgtactcgcctttaccttgattgtattgactggagggttcacctggctgtgcatctgttgttgcaagcgtcagaagcggacgaagatccggaagaagacaaaatacacaatcctggataatatggacgaacaggagcgcatggaactccggccaaagtacggcataaaacatcgctcaacagaacataacagctcccttatggtgtctgagtccgagtttgactcagatcaggacacaattttcagtcgcgagaaaatggaaagaggaaacccaaaggtgtcaatgaatggttccatacgaaacggggcttccttcagctactgctcgaaagatcgatag

SEQ ID NO: 130464 - DNA, 1293 bp, synthetic construct
  misc_feature 1..1293: note = Description of Artificial Sequence: Synthetic coding sequence
  source 1..1293: mol_type = other DNA
atgggtcgcagctggccaggactgagtttgtgccaatggcgacttctgccggccttggaagcaggatgggcagttgcagccgagaccggtggcggaggacgacccggaagagccgcaccagcctcctgttcatgcgaattcctgtggaccatagatgacatctatcactgcgcccagtttctacagatcaaggatgggtggataatatttagcatggaagccagacttgcaatgacactgccttttttcgcattccccctgatcatttggagcattaggacagtcattattttcttctttagtaagcgcactgagagaaataacgaagccctcgacgatctcaaatcccagaggaaaaagattttagaggaggtgatggaaaaggagacctataaaacagccaagctgatcttagagcggttcgaccccgatagtaagaaagcaaaggaatgcgagcccccaagcgccggagctgccgtaaccgccagacctggacaggagattcgtcaacggactgccgcccagagaaacctgtcccctacacccgcatccccaaatcaggggccacccccgcaggttcccgtgagtcctggtccgcccaaggacagcagcgcccctgggggacctccagagcgcactgttacgcccgctctgagcagcaacgtcttacccaggcacctcgggagtcccgcgacctctgtccccggaatgggcctccacccccccggcccacctctggcccgtcccatattgccaagagaaagaggagctttggacagaatcgttgaatacctggtcggcgacggcccacagaaccgctatgccctgatctgtcagcagtgtttctcacacaacgggatggccctgaaggaagagtttgaatacatcgcttttaggtgtgcttactgcttcttcctcaacccagcccgtaaaacgagaccccaagcacccagactcccagagttcagttttgaaaagcgccaggtggtggaaggctcctcctccgtggggccgctcccatccggtagcgtgctgagctcagacaatcagtttaatgaggagagcctggaacacgatgttctggacgacaacactgagcagacggatgacaagattccagcaacagagcagaccaaccaagtgattgagaaggcctcagattccgaagaaccggaggagaagcaagaaacagagaacgaggaggcctccgtgatcgagactaattctaccgtccccggcgcagattctatacctgatcccgaactgagtggtgagagcttgacggcagagtag

SEQ ID NO: 130465 - DNA, 3036 bp, synthetic construct
  misc_feature 1..3036: note = Description of Artificial Sequence: Synthetic coding sequence
  source 1..3036: mol_type = other DNA
atggccccaccaaccggggtgctgtcttccttgcttcttctcgtaacaatcgctggatgtgcccgtaaacaatgtagcgaaggccggacatattccaatgccgtgatcagtcccaatttagaaaccacccggataatgcgggtgtcacacacatttcccgtggttgactgcacagctgcttgttgtgacttaagctcttgtgatctggcatggtggttcgagggtcgctgctatctagtcagctgtccccataaggagaattgcgaacccaagaagatggggcctatccgaagctaccttacctttgttctcaggccggtccaacgccccgcccagctgttggattatggcgatatgatgctgaaccgaggcagccccagcgggatttggggcgactctcccgaggatatccggaaggatttgacattcctgggtaaggactggggtctggaagagatgagcgagtattcggacgattaccgtgaattggagaaggacctgttacagcccagcgggaagcaggaaccacgaggatccgctgagtatacagactgggggctgctcccaggttctgaaggcgccttcaactcgtctgtgggagatagtccggctgtccccgccgagacacagcaggatccagaacttcattacctcaatgaatctgccagcactccagccccaaaactgccggaacgcagcgtacttctccctttgcccaccaccccctcaagcggcgaggtcctggaaaaagagaaggcatctcaacttcaggaacagagcagcaatagtagcgggaaggaggtcctgatgccctctcattctctcccacccgcctccctggagcttagttccgttaccgtggaaaagtcccctgtgctaacggtgaccccaggcagtactgagcacagcattcccacacctcccacatctgctgccccgtccgagtccacaccaagcgagttgcctatctctcctactaccgccccgcggacggttaaagaactgactgtatccgcaggagataacttaatcatcaccctgcccgacaatgaggtagagttgaaggcatttgtggcaccagcgccgcccgtggagaccacctataactacgagtggaaccttattagtcacccaaccgactatcaaggggagattaagcagggccacaaacaaactttgaatctatcccagctgtcagtggggctatatgtgtttaaagtgaccgtaagctccgaaaatgcgttcggggagggcttcgtgaacgtgacagtgaaacccgcccgcagggttaatttaccacccgtggcagtggttagtcctcagctccaagaactgactcttccactcacttcagccctaattgatggaagccagtccactgacgacacagagattgttagctaccactgggaggagattaacggcccattcatcgaagagaaaacctcagttgattcccctgtcctgagattgtcaaatttggaccccggaaactacagcttcaggctgactgtgacagactcagacggagcaaccaacagcacaactgcagctctcattgtgaataacgctgtggattaccctcctgtggctaatgccggacccaaccacaccatcacgctgccccagaattcgatcaccctcaacgggaaccaatcgtccgatgaccaccagatagtactgtatgagtggtccttgggtccaggatccgagggcaagcatgtggtcatgcagggagtccagacgccatatttacacctgtccgcgatgcaggaaggcgactacaccttccagctgaaagtcaccgacagttctcgtcagcagtccacagcggtggtgacagttattgtccagcctgagaataatcggccacccgtggcagttgcaggccccgataaggagcttatctttcccgtcgagtctgccaccctagatggcagtagctccagcgatgatcatggcatcgtgttctatcattgggagcatgtgcgcggtcctagcgcagtagaaatggaaaacattgataaagcaatcgcaactgtgaccggtttgcaggtcggcacctaccacttcagactcactgtcaaagatcagcagggacttagctcgacctcgacactcacagtagctgtcaagaaggaaaacaatagccccccaagggccagagctgggggcaggcacgttttagtgctgcccaataactcaatcaccctggatgggagtcggtctactgatgatcagcgaattgtttcgtacctgtggatcagagatggacagagccccgctgccggcgatgtaatcgatggatctgatcactcagtagcgctccagttaacaaacctggtcgagggggtgtacaccttccacctcagagtaaccgattctcagggcgcttcagatacggataccgctacagtggaagtgcagccagatcctcgtaaaagtgggctggtggagctcactctgcaggttggtgtgggtcaattaaccgaacaaagaaaagatacacttgtgaggcagttggctgtgctgcttaacgtcctggacagtgatatcaaggtccaaaaaataagagcacactctgatctgagtactgtaatcgtgttctatgtccagtctcgcccaccgttcaaggtgctgaaggccgctgaggtggctcgcaacctgcacatgagactttccaaggagaaggccgactttcttctttttaaagtccttagggtcgataccgctggctgcctcctcaaatgcagcggccatggccactgtgatcctctgaccaagcggtgtatctgttctcacctatggatggaaaacctcattcaaagatatatatgggatggggaatccaattgcggtatcaaacacaggtctactgagcataattctagcctaatggtctcagaatccgagttcgattccgaccaggataccatattcagtagagagaaaatggagagaggaaatcctaaagtgagcatgaatggctctataagaaacggggctagcttcagttattgtagcaaagataggtag

SEQ ID NO: 130466 - DNA, 1206 bp, synthetic construct
  misc_feature 1..1206: note = Description of Artificial Sequence: Synthetic coding sequence
  source 1..1206: mol_type = other DNA
atggagacacccgaagtgcctgtgggatcccttatagactttggccctgaagcccccactagctcccccctggaggctcctcctcccgtattacaggacggagacggttctctcggggacggcgcaagcgagtcagagaccacggaatcggccgatagcgaaaacgatatgggggagtcaccatcccatccctcctgggaccaagatagaaggagcagctccaatgagagcttctcttccaaccagtcaaccgagtcgacccaggatgaagaaacgctcgcccttagggactttatgaggggatacgtcgaaaagattttttcaggtggcgaggatttggaccaggaggagaaggcaaagtttggagagtactgttcctccgaaaacggaaagggacgtgagtggttcgccaggtacgttagcgcccagcggtgtaattccaagtgcgtgagtgaagctacattttataggctggtgcaatctttcgccgtagtgctatttgagtgtcatcaaatggacgacttcggccccgccaagaatttaatgactatgtgctttacttattaccacattggcaagcctcagcttctgcctccagaatcaagagagaaacctgcggggtccatcgactcatatttaaagagtgcaaactcctggctcgctgagaagaaggacatcgcggaacgtctcctgaagaacactagcgcaagaacggagaatgtgaagggattttttggcggtctcgaaacgaagctcaagggccctctcgcccgtcggaatgaagaggatgagaataaaccgcaagagaaacgcccacgtgccgtgaccgcgtactctcctgaggacgaaaagaagggcgagaagatttatctgtatacccacctgaaacagcagccgatttggcacacgctccggttttggaacgcagccttcttcgacgccgtgcattgtgaacggaccaaacggagcccaaccactcgcgagaaatggtgccatatgacacaggaggaacgcgacgacagcctgcgatttaacgaaaatatcacatttggacagttagggacattcactcataatatgctggccttcgggctgaacaaaaaactgtgcaatgacttcctaaagaagcaggctgttatagggaacctcgacgaagagcagtacaagctgctgtcagaccatattgagcagatggctaccgaatag

SEQ ID NO: 130467 - DNA, 3219 bp, synthetic construct
  misc_feature 1..3219: note = Description of Artificial Sequence: Synthetic coding sequence
  source 1..3219: mol_type = other DNA
atggccccacctactggggtacttagttcactactgttgttggtcaccattgctgggtgcgcgaggaagcaatgctctgagggccgcacttacagcaacgccgttatcagtcctaatctcgaaacaaccagaatcatgagggtgtctcacacattccctgtagtggattgtacagcagcctgttgtgacctgagctcatgtgatctagcatggtggtttgagggacggtgttatttagtcagttgtccacataaggagaattgtgagcccaagaaaatgggtccaatcaggtcttatctgacattcgtcctacggcccgtgcagagaccagcccagttgctggactacggcgatatgatgcttaatagaggcagcccatctggaatttggggcgactcgcccgaagacataaggaaggatctcacctttctgggaaaagattggggactcgaagagatgtccgagtactctgatgattatcgggaactagagaaagatttgttgcagccaagcggcaaacaggagccccgaggctctgccgagtacacagactggggcctgcttcccggctctgagggagcctttaactccagcgtgggggactctcctgccgtgcccgccgaaacgcagcaagaccccgaattacactacctgaacgagtcggctagcacccccgcccccaagctaccagaaagatcggtcctgctgccactcccaaccactcctagcagcggagaagtgctagagaaggagaaagccagccaactgcaagagcagagcagcaactctagcggcaaggaagtgctgatgccatcacacagcctaccccccgcttctctggagctctcgtccgtgaccgtggaaaagtctcccgttctcaccgtcacccccggttcaacagagcacagtatcccaactcctccgacctccgctgcgcctagcgaaagcaccccttccgagcttcctatttcacccaccaccgccccccgcacggttaaagaattaaccgtaagcgcaggtgacaacttgattattacactaccagataacgaggtggagctaaaggccttcgtggctcccgcccctcccgttgaaactacatacaactatgagtggaatctcatatcccatcccaccgattatcagggggagatcaagcaggggcacaagcagacactaaacctgagccagttgtctgttggcctgtatgtgttcaaggtgactgttagttcggagaacgctttcggtgaaggcttcgttaatgttacagtaaaacccgccaggcgagtgaacctaccccccgtggccgtagtcagtcctcagctgcaagagctgaccctgccgctgacttcagcactcattgacggaagccagtcgaccgacgacacggagatcgtgtcataccactgggaggagatcaacggtccctttatcgaggagaaaacatccgtggacagtcctgtgcttcgactgtctaacctcgatccaggaaactatagctttcggctgaccgttaccgactccgatggcgctacgaactcgaccacagcagcactcattgtgaacaacgccgttgattacccacccgttgccaacgcaggccctaatcacaccataactctccctcagaattccattaccttgaatggaaatcagagcagtgacgatcatcaaattgtgctgtatgagtggagccttggcccggggtcagaaggaaagcatgtcgtgatgcagggggtgcaaacgccctacctgcacctgagtgcaatgcaagagggagactacacttttcagctgaaagttaccgacagctcccgccagcagtcaacagccgtcgtcactgttattgttcagccagagaacaatagacccccagttgcggtggccggacccgacaaggagttaatttttccagtcgagtccgccaccttggacggctcaagcagctccgacgaccatgggattgtcttttaccattgggaacatgtaaggggcccgtcggcagttgagatggagaacatcgacaaagctatcgccaccgtgacagggttgcaggtaggtacttatcacttccgactgaccgtgaaagaccaacagggcctgagcagtacctcaacattgacagtcgccgtgaaaaaggagaacaactcaccgccgcgcgcacgcgctggtggacggcatgtgttagtgctgcctaacaactcgattaccctggatggcagtagaagcaccgacgaccaaagaatcgtgagttacctgtggatccgcgatggtcagtcgcctgccgcgggcgacgtcatcgacggctctgatcattctgtggctctccagttgacaaacctggtggagggcgtgtacaccttccaccttagggtgaccgactcccaaggggctagtgataccgatactgcgaccgttgaggttcagccagacccccgtaaaagcgggctcgtggaactgactctccaggtgggcgtgggacagctgaccgagcaaagaaaggatacactagttcggcagctagctgtgttactgaatgtgctggattccgatattaaagtccagaagattcgggcacattctgatttgtccacagtcatagtgttttacgttcaatcccggcctcccttcaaggttctgaaagcagcggaggtggctcggaacctgcacatgcgactgagcaaggagaaagccgactttttattgtttaaggtgctgcgggtcgacactgcgggctgcttgttgaaatgtagcggccacggccactgtgacccactgactaagaggtgcatctgcagtcatctgtggatggagaacctcattcagcgctatatttgggacggtgaatccaactgtgagtggagcatcttctatgtgaccgtcctcgctttcactctgatcgtcctgaccgggggctttacttggttgtgcatctgctgttgtaagcgacagaagcgaaccaaaatccggaagaagacaaagtacaccatactggataacatggatgaacaggagcggatggagctccgcccaaagtacggcatcaagcaccggtctaccgagcataattcaagtctgatggtgagcgaatctgagttcgactccgaccaagatacaatcttctctagagaaaagatggaacggggcaaccctaaggtctctatgaacgggagtatacgtaacggggcatccttctcttactgcagcaaagataggtag

SEQ ID NO: 130468 - DNA, 1380 bp, synthetic construct
  misc_feature 1..1380: note = Description of Artificial Sequence: Synthetic coding sequence
  source 1..1380: mol_type = other DNA
atgggtggactattcagccgatggcgcacaaaaccctccacggtggaggtcctagagtctatagacaaagagatacaggccctggaagagtttcgcgaaaaaaaccagcgattgcaaaaactctgggttgggagactgattttgtacagttctgtgctgtacctcttcacgtgtctaatcgtatacctgtggtacctcccagatgaattcactgcccggcttgcaatgacactccccttctttgcctttccactgatcatatggtctatcagaaccgtgattatcttcttcttcagcaaacgcactgagcgcaataacgaagctctcgacgacctcaaaagccagaggaagaaaatactggaggaagttatggagaaagagacatataaaacagccaaactcattctggaacgcttcgacccggacagcaaaaaagcaaaggagtgcgagcctcctagtgcaggagccgcagtaacggctcggccaggccaggaaattcgacaaaggacagccgctcaaagaaacctgtcccctaccccggcctctcccaatcaaggtcccccgcctcaggtgccagtttcgcccgggccccctaaagactcgtcggcccccggcggacccccagaacgcactgtaaccccggccctgagttccaacgtgttaccgagacacttgggttcccccgccacaagtgttccaggcatggagatggggctgccccacatcgcccaggccggattggagcacttgagtagcagtgatctcagtacatcaaccagccagtctgcaggtatcacagggttacacccgcccggccctccactagcccggccaattttacctagggagagaggggccctagacagaatcgtcgaatatcttgttggtgacggtccccagaaccggtacgccctcatatgccaacaatgcttctcccataatggaatggcgcttaaagaggagtttgagtacatcgccttccgctgtgcgtattgttttttcttaaatccggctagaaagactcggccacaggccccacggctgccagaattcagctttgaaaagcggcaggttgtggaagggtcaagctctgtaggtcccttgccctctggttctgttctgtcatctgacaatcagttcaatgaggagtctctggaacacgacgtcctggacgacaacaccgaacagaccgacgacaagatccctgcaacagaacagacaaaccaggtgatcgagaaggccagcgactcggaagaacctgaagagaaacaggaaaccgagaacgaggaagcttcagttatcgaaacaaactccacggtgcccggagcagactctatcccagaccctgaattaagcggcgaaagcctaactgcagagtag

SEQ ID NO: 130469 - DNA, 240 bp, synthetic construct
  misc_feature 1..240: note = Description of Artificial Sequence: Synthetic coding sequence
  source 1..240: mol_type = other DNA
atgcatcctgatctctccccacacctacatacggaggagtgtaatgtgcttataaatctgctcaaagaatgccataagaatcacaatattctcaagtttttcgggtattgcaacgatgtcgatcgggaactgcggaagtgcctgaaaaatgaatacgtcgagaataggaccaaatctagagagcacgggattgctatgcgtaaaaagctcttcaacccgccagaggagtccgaaaagtag

SEQ ID NO: 130470 - DNA, 1569 bp, synthetic construct
  misc_feature 1..1569: note = Description of Artificial Sequence: Synthetic coding sequence
  source 1..1569: mol_type = other DNA
atgagccggcaactcctgccagttcttctcctgctgttgttacgggcctcctgtccctgggggcaggagcagggcgcgcggagtccaagtgaagagcccccagaggaggaaatccccaaggaggatggaattctggtcttaagtaggcacaccctgggccttgctctgcgggagcaccccgccctgctggtcgagttctacgcaccctggtgcggccattgccaagctttggcacccgagtatagtaaagccgctgctgtccttgccgccgagtcgatggtcgtaaccctcgccaaggtcgacggtccagctcagcgagagttagccgaagaatttggggtgactgagtatcccactttaaaattcttccgcaatggcaaccgaacccatcctgaggaatacaccggtccccgtgacgccgagggaatcgcagaatggctgaggcggagggtgggtccttctgcaatgagattagaagacgaagctgcagcacaggcccttatcggaggcagagatttagtcgtcatcgggttctttcaggacgaagacgtcgccacgttcttagccctggcccaggacgctttagatatgaccttcggacttaccgaccgccctcgcttgtttcaacagttcggactaacgaaagacacagttgtgctctttaaaaaattcgatgagggcagggctgattttccagttgacgaagaactgggcctggacctgggggatttgtcacggttcttggttactcattctatgcgcctagttactgaattcaacagccaaacaagcgcgaaaatcttcgctgctaggatcctgaaccacctgctgctttttgtgaaccaaaccctggccgcccatagagagctgttggccggattcggtgaggctgcaccaagatttcgaggccaggttctgttcgttgtcgttgacgtcgcggccgacaatgaacacgtgttgcaatattttgggctgaaggcagaagccgcccctacactccgcctggtgaacctggaaacaacaaaaaagtacgcgccagttgatggtggtcctgtgaccgcggctagcatcactgccttctgccatgccgtgctcaatggacaggtaaagccatatctcctgtctcaggaaatccccccagattgggaccagcgccccgtcaaaaccttagttggaaaaaacttcgaacaggttgcctttgacgagacaaagaacgtgttcgtcaagttctacgcgccatggtgcactcactgcaaggaaatggccccagcttgggaggctctggcagaaaaataccaggatcatgaggatatcattattgcagaactggacgcaactgccaatgaactggacgcctttgctgtgcacggctttccgactctcaagtactttcccgctggacccggtcgcaaggtgattgagtataagagcacgagagatttggaaacttttagcaagtttctagacaacggcggtgtgctccccaccgaggaaccaccagaagaacccgccgcgccttttcctgagcctcctgccaattccactatgggcagcaaggaagaattgtag

SEQ ID NO: 130471 - DNA, 1485 bp, synthetic construct
  misc_feature 1..1485: note = Description of Artificial Sequence: Synthetic coding sequence
  source 1..1485: mol_type = other DNA
atgggcagcggaaccgggagcgaggagccgctaggcggtgcctctcgaggggggaatcctcaagggggctgggatctgggcgcagagcccccccaccctggccctgggcctgctggggcgccatgccccgccgggggcatcctttgcccagttgtttgggctcttccaggaccaggacctagggttcaacagggtagttgtagggcccgagggcgagttaacggggggcacgccgaggagtttggcgtgacagaatacccaacattaaagttctttcggaacggcaaccgaactcaccctgaagaatatactggaccacgagatgccgaaggaattgccgaatggctgcggaggagagttgggccctcagctatgcgtctcgaggacgaagctgctgcgcaggccctcatcgggggccgcgacctggtggtcatagggttctttcaagatttgcaggacgaagacgttgccacgtttctggcacttgctcaagatgcccttgatatgactttcggacttaccgatcgcccacgactgtttcagcagttcggactgactaaagacacggtggtccttttcaagaagttcgatgagggccgcgctgacttcccagtggacgaggaactgggactggatttaggggatctgagccgcttcctcgtgacccatagcatgagacttgttaccgaattcaacagccagacctctgcgaaaatctttgcagctcgaatcctcaaccacttgttgctgttcgttaatcagacactggctgcccatagagaactcttggcaggtttcggggaggccgcacctcgatttagaggacaggtgctgttcgtagtggtggatgtggctgctgataacgagcacgttctgcagtacttcggcctgaaagccgaggctgcgcccactttacgcctcgtgaaccttgaaaccaccaagaagtatgctccagtcgacggtggccctgtcacagccgcttcaatcaccgcgttctgccacgccgtactaaacgggcaagtgaaaccatatctcctaagtcaggagattccgcccgactgggatcagaggcccgtgaagacgcttgtggggaagaactttgaacaagtcgcatttgacgagactaagaacgtttttgttaaattttacgcgccgtggtgcacccattgtaaggagatggctcctgcctgggaggccctagccgagaagtaccaagaccacgaagacattattatcgctgagctggacgctaccgccaacgagttggacgcattcgccgtgcacggattccccaccctgaagtattttcccgcgggcccgggacggaaggtgattgagtataagagcacgcgggacctggaaactttctctaagtttctggacaatggaggggtccttccgacagaagaaccccccgaggagccagccgccccattccccgaacccccagctaattccacaatggggtccaaggaggaactttag

SEQ ID NO: 130472 - DNA, 1323 bp, synthetic construct
  misc_feature 1..1323: note = Description of Artificial Sequence: Synthetic coding sequence
  source 1..1323: mol_type = other DNA
atggctttgctcgtccttggactcgtgtcgtgcacgttctttctcgcggtcaatggactgtactcatcatccgacgacgttatcgagttaaccccatcaaatttcaaccgcgaggttatccagtctgatagcctgtggctggtggagttttacgccccctggtgtggacactgccagcggctgaccccagagtggaagaaggccgctacagctttaaaagacgtcgttaaggtgggagcagtggatgctgacaagcatcattctctaggtggacaatacggtgtgcaggggtttcccactatcaaaatttttggctccaacaaaaaccgccctgaggactatcagggcggtcggaccggagaggctatcgtagatgctgctctgtctgctctgagacagttagtgaaagacaggctcggtggcaggagtggcggttacagcagcggaaaacagggacgctccgatagctcttctaagaaagatgtgatcgagctcactgacgacagctttgacaagaatgtgttggactctgaagacgtctggatggttgagttctatgctccgtggtgtggccattgcaaaaatttggagcctgagtgggccgctgcagcttctgaagttaaagagcagactaaaggcaaagtcaagctagccgcggtggacgctactgttaatcaggttctggcttctcgttatggtattcgcgggtttccgacgatcaagattttccaaaagggtgagagccccgtcgattatgacggtggcaggactcgctcagacatagtttcaagagccctggacctgttttctgataacgcgccaccaccggaacttttagagattattaacgaggatatcgcaaaaagaacatgtgaagagcaccagttatgcgttgttgcggtgctgcctcatatcctggatacaggagctgctggaaggaattcatatctggaagtcctcctgaagttggcggacaagtacaagaaaaaaatgtggggatggctatggacggaagcaggggcacagtcagagctcgagaccgctctcggaatcggaggtttcgggtacccggctatggcagccattaacgcccggaagatgaagttcgcactgttaaaaggaagcttctccgaacagggcatcaatgagttcttaagggagctgtctttcggcagagggtccaccgctcccgtcggtggcggggcgttcccaacaatcgttgagcgcgagccctgggacggtagggatggcgagctacctgttgaggacgatattgatctttccgacgtggaattggacgaccttggcaaagacgagctctag

SEQ ID NO: 130473 - DNA, 1338 bp, synthetic construct
  misc_feature 1..1338: note = Description of Artificial Sequence: Synthetic coding sequence
  source 1..1338: mol_type = other DNA
atgtacccgtctacaaccatggccaacgcccctggcttggtcagctgtacattctttcttgctgtcaatggtttgtattcctcaagtgacgatgtcatagaactgactccttctaatttcaaccgtgaggttatccagtctgatagcctgtggttagtcgagttctacgctccctggtgcggacattgccagaggctgacgcccgagtggaaaaaggcagccacggctctgaaggacgttgtaaaagttggtgccgtcgacgccgacaagcaccactccctgggtggccagtatggagtgcaaggctttccaaccatcaagatctttggttctaataagaaccgacctgaggattatcagggcgggcggactggcgaggccattgtcgacgctgccctgtccgctctgagacaactcgtgaaggacaggctgggaggacgaagcggtggctacagttctggtaagcagggccgaagtgattctagctccaagaaggacgttatcgagctgacagatgattcattcgacaaaaacgttctggactccgaggatgtgtggatggtagagttttacgccccatggtgtggacactgcaaaaatttagagccagagtgggcggccgcagcttctgaagtcaaggaacagacaaagggcaaagtcaaactggcggcggttgacgcaactgtgaatcaggtccttgcgagcagatacgggatacgcggcttccctacaatcaaaatctttcagaagggcgagtctccggtcgactatgacggggggaggacccggtccgatatcgtgtctcgggcactggacctgttctccgataatgcgcccccccccgagttattagagattatcaacgaggatattgccaagagaacgtgcgaggagcatcagctgtgtgtggttgcggttcttcctcacattcttgataccggggcagcagggcggaatagctatcttgaagtcctccttaaactggctgataagtacaagaaaaagatgtggggctggctttggaccgaagcgggcgcccaatccgaattagagactgccttggggattggcgggttcggttacccagccatggctgccattaatgccagaaagatgaagtttgctctgcttaagggttccttttctgagcaggggatcaacgagttcctgcgggaattgtcattcggcagagggtccacagctcctgttggtggaggcgcattccctacaatcgttgagcgcgagccttgggacgggcgggatggggagctccctgttgaagacgacattgatctatccgacgtggagctcgacgatctgggcaaagacgagctctag

SEQ ID NO: 130474 - DNA, 36 bp, synthetic construct
  misc_feature 1..36: note = Description of Artificial Sequence: Synthetic coding sequence
  source 1..36: mol_type = other DNA
atgtatcccagcacgaccatggcaaacgccccatag

SEQ ID NO: 130475 - DNA, 1314 bp, synthetic construct
  misc_feature 1..1314: note = Description of Artificial Sequence: Synthetic coding sequence
  source 1..1314: mol_type = other DNA
atgatcttaggtctggtgtcttgtacctttttcctggccgtgaatggattgtactcaagttctgacgacgtcatagagttgactccctctaactttaatcgggaagtcatccaaagtgattccttgtggctggttgagttttatgccccctggtgcggccactgccagaggttaactcctgaatggaaaaaagccgccaccgccttaaaggatgttgtaaaggtgggcgccgtggacgccgataagcaccatagtctaggcggacagtacggggtgcagggttttcctacaatcaagatctttgggtcaaataagaataggccggaggactatcagggtggaaggaccggcgaggccatcgtggacgctgctctctccgcgctgcggcagctggtgaaagaccgcctgggtgggcggtccggcggatacagctcaggaaagcaaggcaggtccgatagcagctctaagaaggacgtgattgagttgactgacgactccttcgataagaatgtgcttgatagtgaagacgtctggatggtggagttctacgcaccctggtgtggacattgtaagaatttagaacccgagtgggcggcagccgcctccgaggttaaggaacagacaaagggcaaagtgaaactggcagcagtcgatgccaccgtaaatcaggtacttgccagcaggtacgggatcagaggcttccccactatcaaaatcttccagaagggggagagccctgttgattacgacggaggaagaacccggagtgacatcgtgagtagagctctagacctgtttagcgacaatgctccccctcccgagctgctggagatcattaacgaggatatcgccaagcgcacctgcgaggagcaccagctgtgcgtggtggcggtcttgccccatattctcgacacaggcgcggccggccgaaactcgtacctcgaagtcttactgaagctagctgacaaatacaagaagaagatgtggggctggctttggacggaggcaggcgcacagtcagagttagagaccgcattaggtattgggggattcggctatcccgcaatggcagcaataaatgcccgcaagatgaagtttgccctcctcaaaggcagtttcagcgagcagggcattaatgaattcctgcgggagctgtcatttgggaggggctccaccgcccctgttggtgggggagcattccccaccattgtggagcgcgaaccttgggacggtagagacggcgaactgcctgttgaggacgacattgacctgagtgatgtcgaattagacgatctgggtaaggacgaattgtag

SEQ ID NO: 130476 - DNA, 1956 bp, synthetic construct
  misc_feature 1..1956: note = Description of Artificial Sequence: Synthetic coding sequence
  source 1..1956: mol_type = other DNA
atggcggactcagccgagttgaagcagatggtgatgagcttacgggttagcgaactgcaggttttactaggatacgccggacgcaacaagcacggcaggaagcatgaactgctgacaaaagcactgcacctcctgaaggctggctgtagcccagcggttcaaatgaaaatcaaggaactttatagaaggcgatttccccaaaagattatgacacctgccgatctcagtatccctaacgtgcactcatcccctatgcccgcgaccctgtctccctcaacaattccacagctgacgtatgacgggcaccctgcatcaagtcctctgcttccagtgtctctcttaggccctaaacacgagctcgagctgcctcacctgacgagcgccctccaccccgtccacccggatatcaagttacagaaactgccattttacgacttactggacgagctgattaagccgactagccttgcttccgacaactcacagaggttccgagagacgtgcttcgcctttgctcttacaccacagcaggttcagcagatcagcagcagtatggatatcagtggaaccaagtgcgatttcaccgtccaggtccagctcaggttctgcttgagtgaaacatcatgtcctcaggaggatcacttccctccgaacctctgcgtgaaggttaacaccaagccctgttctctcccagggtacctgccccctaccaaaaacggggtggagccaaaaaggccctctcggccaattaacattactagtctagttcggctttccacgactgtgccgaataccatcgtggtgtcctggactgcagagatcggaaggaattatagtatggctgtttatttggtcaagcaattaagttccacagtcctgctccaaagattgcgggcaaaggggatacggaatcctgaccacagcagggccctaatcaaggaaaaactgaccgccgaccccgattccgagattgcaacaacatccctgagagtgagtctcctgtgccccctggggaaaatgcgactgactatcccgtgcagggcccttacttgctcacacttgcaatgtttcgatgcgacgctgtacatccagatgaacgaaaagaaacctacatgggtctgccccgtgtgcgataaaaaggcaccgtatgagcacttaatcatcgacggcttgtttatggagattctcaaatactgtaccgattgcgacgaaatccagttcaaggaagatggtacttgggccccaatgagatcaaaaaaagaagttcaggaggtgtcggcaagttataatggtgtcgacggctgcctttcctcgacgctcgagcaccaggttgcctctcatcaccaatcctctaataagaacaaaaaagtggaagtaatagatctgacaattgactcctccagcgatgaagaagaggaggagcctagcgccaaacggacatgcccatctctttcaccaacgtcaccacttaataacaaagggatcttgtccttgcctcatcaggctagccctgtatctaggacaccaagtttgccagctgtcgacacgagctacatcaacacaagcttgatccaagactacagacaccccttccacatgactcccatgccgtacgatttacaaggactggactttttcccttttctatcgggtgacaaccaacattacaacacttcccttctagcagccgccgccgccgccgtgagcgacgaccaagatcttcttcattcatctcgattctttccatacacatcttcacagatgttcctagaccagctgtcagctgggggttccacctctctgcccactacaaacgggtccagttcagggagtaattcgtccttggtgagcagtaattctctccgagaatcccattcacatacggtaacgaaccgaagtagcactgacaccgccagcattttcggcataatccctgatattattagtcttgattag

SEQ ID NO: 130477 - DNA, 1962 bp, synthetic construct
  misc_feature 1..1962: note = Description of Artificial Sequence: Synthetic coding sequence
  source 1..1962: mol_type = other DNA
atgtttaccctgcaggatagttacgttaagcagatggtaatgagcttgagggtgagcgaactgcaagtcttacttggatacgccggacggaataagcacggacggaaacacgaactcctcacaaaagcccttcatttgctgaaggccggatgctcaccagccgtgcagatgaagatcaaggagctgtaccgacggcgctttccacagaaaatcatgaccccagccgaccttagcatccccaacgtgcatagcagtcccatgcccgctacattgagcccatcaaccattcctcagttaacatacgacggacatcctgcgagctctccccttttgccggtgtccctgctcggacctaaacatgaactcgaattgccacatctgacatctgcactacacccggtccaccccgacatcaagctccagaagctccccttttacgacctgcttgatgagctgattaagcccacatccttagcgagtgacaactcccagagattccgcgaaacctgctttgctttcgcccttacgcctcaacaggtgcaacagatttccagcagtatggacatttcaggcacaaagtgcgactttacagtccaagtgcagttgagattttgcctaagtgagacctcgtgtccgcaagaggatcatttcccccctaacttatgtgtaaaggtaaacaccaagccctgttcattaccaggataccttcctcccacaaaaaatggcgtagagccaaaaagacctagccggcccataaatattacatctctggttcggctgtctaccacggtgccaaatacgatcgtcgtgagttggaccgccgaaatcggaagaaactattcgatggccgtgtatctggttaagcagcttagcagtacagtgctactgcagaggctgcgtgctaaaggtatacgcaatcctgaccacagtcgcgcactgattaaagagaaattgaccgcagacccagactccgagatcgctactacttcattaagggttagtcttctttgcccacttggtaaaatgcggctgaccatcccttgtcgggctctgacttgttcccacttacagtgtttcgatgcaactctgtacattcaaatgaacgagaagaagcccacatgggtgtgtcctgtgtgcgataagaaagcgccgtacgagcaccttattatcgacggtcttttcatggagatcctcaaatactgtacagattgcgacgaaatccagtttaaagaagatgggacatgggctcccatgcggagtaagaaagaggtgcaagaggtcagcgcctcgtacaatggcgtcgatggctgtctcagttctactctggaacatcaggttgctagtcaccaccagagttctaataagaataaaaaggtagaagtgatcgatctgaccatagacagctcgtccgacgaggaagaggaagaaccatctgcaaaacgtacctgcccatcgctaagcccaacaagtccgctcaacaacaaggggatcctatccttgcctcaccaggccagtcccgtttccaggacccctagcctgccagccgtggacaccagctatatcaacaccagcctcatacaagactatcgacatcccttccacatgacccctatgccatacgatctgcaaggactggacttctttcctttcctctctggggacaaccagcattacaacacctcgctgcttgccgccgcagcagccgcagtgtccgatgaccaggatctgctgcacagtagcagatttttcccttacactagttctcagatgtttctggaccagctcagcgctggtgggtccacatccctgcccacaacaaatggaagttcatccggttccaactcctcactcgtgtcttcaaatagtttacgagaaagccactcgcatacagtcaccaaccgctcctccactgacacagcctctatatttggtatcattcctgatatcatctcactggattag

SEQ ID NO: 130478 - DNA, 1782 bp, synthetic construct
  misc_feature 1..1782: note = Description of Artificial Sequence: Synthetic coding sequence
  source 1..1782: mol_type = other DNA
atggcagagctgggcgagttgaagcacatggtaatgtcgttccgcgtgtctgagctgcaggtcctgctgggttttgcaggacggaacaaatcaggacgtaagcacgagttgctggcgaaggccctccacctattaaagagcagctgcgcccccagtgtgcagatgaaaattaaagagctgtaccgacgccgctttccccgaaagacgctgggtccctccgacctttctttgcttagtctgccaccagggaccagccctccggtccatcccgatgttacgatgaaacccctgcccttttacgaggtctacggtgaactgatccgtcctacaactcttgcttccactagctcccagcgattcgaggaggcccattttacattcgcactgactccccaacaggtgcagcaaatattgacctcgagggaagtgttgcctggagcgaagtgtgattatactatacaggtgcagctccggttctgcctgtgtgagacctcctgtccccaagaagactacttccctcctaacctttttgtgaaggtgaatggcaaattgtgtccgctccctggctatcttccacccactaaaaacggcgcagaacccaaacgtccttcccgcccaataaatattacccccctcgcccgtctgtctgccacagttcctaacacgattgtcgtgaactggtcctccgaattcggcagaaactactcactgagtgtatacctcgtgaggcaattaacagccgggactctgctgcaaaagctgagggccaaagggatcaggaaccctgaccatagccgcgcactgattaaggagaagcttacagccgacccagacagcgaggtggcgactacgagcctccgcgtgtctctgatgtgccctctggggaagatgcgtctgacggtaccgtgcagagctttgacctgcgcccacctgcagtccttcgacgcggctctgtacttgcagatgaacgagaagaaacccacatggacatgcccagtctgtgacaagaaagcaccttacgagtctttgattattgatggcctgtttatggaaattctctcgagctgtagtgactgcgatgagatccagttcatggaagacggcagttggtgtccaatgaagcctaaaaaggaggccagtgaagtgtgccctcccccgggttatggtctagacggactccaatatagtcctgttcagggcggcgacccgagcgagaataaaaaaaaggtggaggtaatcgacctgacaattgagagctcgtcggatgaagaggacttgccacctactaaaaagcactgttcagtgacttcggccgctatccccgcccttccaggaagcaagggtgtgctgaccagtgggcatcagccatcctctgtcctgcgctcccccgcgatgggcacgctgggtggcgattttttgtcatctctccccttacatgagtatcctcccgcttttcctttgggcgctgacattcagggactcgacctgttctcctttttgcagaccgaatcgcaacattacggaccatcagtgataactagccttgatgaacaggacgccctgggccattttttccaataccgcggcactcccagccactttttaggtcctctagcccccacattggggagctctcattgctcagctactcctgcgccaccccccggacgtgtgtcatctattgtcgcgcccggaggggcactgagagaagggcacgggggccccctcccaagcggtccttcccttacaggctgccgatctgacataattagtttagattag

SEQ ID NO: 130479 - DNA, 873 bp, synthetic construct
  misc_feature 1..873: note = Description of Artificial Sequence: Synthetic coding sequence
  source 1..873: mol_type = other DNA
atggtgatgtccttccgcgtgtctgagttacaggtactgctggggtttgctggaaggaacaaaagcggacggaaacacgaactgttggcaaaagctctgcacctgctcaaaagctcatgtgcaccgtcagtccaaatgaagatcaaggagttgtaccgcaggcgttttccgcggaagacacttggcccatccgacctgtcactgcttagcttaccacctgggacatccccggtgggatcccctggcccactggctcctattccaccaacactgctagctcccggcacacttctgggccccaagagagaggtggatatgcatcctccactgccacagccagttcacccagatgtgaccatgaaacctctgcctttctatgaggtatacggtgagctcatcaggcctactacattagcctctacctcgtcgcagagatttgaggaagcccatttcactttcgcactcaccccacagcaagttcagcagattctgacttctagagaagtcctgcctggtgctaaatgtgattacacgatacaggtgcagctgaggttctgcctatgcgaaacgtcttgcccacaggaagattactttccaccaaacctgtttgtcaaagtaaatggcaagctgtgcccactccccggatatctgcccccaactaagaatggtgcagaaccaaagcgaccgtcgaggccaataaatataactccactggctcgcctttcggcaactgtgcctaacactattgtggtgaattggagcagtgagttcggccgggttagcactgctaaagccggggcttggaagagcttgctacgcgtaaaaggaaaccaccctgtgagctgggtcggggaggccttctctagcctctag

SEQ ID NO: 130480 - DNA, 1887 bp, synthetic construct
  misc_feature 1..1887: note = Description of Artificial Sequence: Synthetic coding sequence
  source 1..1887: mol_type = other DNA
atggcagaactgggggagctgaagcatatggtcatgagttttagagttagtgagttacaggtcctgcttgggttcgcaggccgtaataagtctggtaggaaacacgaactgttagccaaggcccttcaccttttgaaatctagctgtgctccctcagtgcagatgaaaatcaaagaactgtaccgccgcaggtttcccaggaagacacttgggccatcagacttatccctgctaagcttgcctcccgggacctcccccgttggatcacccggtcctctagccccaatcccaccaaccttgctggcgcccggcacattactgggaccaaaacgcgaggtggacatgcacccaccgttgccacagccagtacatccagatgtgacaatgaagccactgcctttctacgaagtgtacggtgaactcatcaggccaacgacacttgcctcaacctcctcccagcggtttgaggaggcccacttcaccttcgcgctgacacctcagcaggtccaacagatcctgacatcccgcgaagtgctccccggcgccaaatgcgactacaccattcaggttcagctgagattctgtttatgtgaaacctcatgtcctcaagaggactacttcccacccaacctcttcgtcaaagtgaatggtaagctgtgccccctgcccgggtacctcccccccaccaaaaacggagctgagccaaaaaggccctctcgcccgattaacatcacgccactcgcccgtctaagcgctaccgttcctaacacaatcgttgtgaattggagcagcgagtttgggcgaaactattctttgagtgtttatttggttcgccagctaaccgcaggcaccctcctgcagaagctaagagcaaaggggattaggaatccagaccacagtcgagctttgattaaggagaagctcacagctgaccccgattctgaggttgctacaacgtctttgagggtatcactgatgtgcccgctcgggaaaatgagacttaccgtgccttgccgagccctaacttgtgctcatctccagagttttgacgccgcactctatttacagatgaacgagaagaagcccacctggacttgtcccgtgtgtgataaaaaagccccatatgaaagccttattattgatggcctgtttatggagatactctcatcatgctcggattgcgacgaaattcagttcatggaagatggctcttggtgtcccatgaaaccaaaaaaagaggcctccgaggtgtgtccaccaccgggttacggcctggatgggctgcagtacagccctgtacagggcggagacccatctgaaaataaaaaaaaggttgaggttattgatctaacaatagaatcatcctctgacgaagaagatcttccacctaccaaaaagcactgtagcgtgaccagtgccgctattccagcacttccgggaagcaagggcgtcctgacaagtgggcaccagccatctagcgtgctgagaagccctgcaatgggaaccctgggcggagacttcctgagcagtctaccactacacgaatatcctccagccttcccactgggggctgatatccagggcttagacctgttctcgtttctacagacagagtcgcagcactatgggccgagtgtaataacctcactcgacgagcaggatgcactgggacacttttttcagtacagaggcaccccaagccactttctgggaccgctggcaccaaccttgggcagcagccattgctctgcaactccggcccctccaccggggcgggtgtcgtcaattgtggcacccggaggggcgctgagggaggggcacggcggccccctcccgagcggtccgagcctcaccgggtgccggtctgacattattagcctcgattag

SEQ ID NO: 130481 - DNA, 780 bp, synthetic construct
  misc_feature 1..780: note = Description of Artificial Sequence: Synthetic coding sequence
  source 1..780: mol_type = other DNA
atggtcatgtcctttcgagtgagtgagttacaagtgcttctaggcttcgctggacgcaacaaaagtgggaggaaacatgagctgcttgcaaaggccctccatctgctgaaatcttcttgtgccccctctgtgcagatgaagatcaaggagctctacaggagaaggttccctaggaagacactgggaccctccgacctctcgcttctgagcctgcccccagggacctccccggttggatctccagggcccttggctcctatacctcccaccctattagccccgggcaccctcctgggtccaaagcgggaagtcgacatgcacccaccgctgcctcagccagtccacccagacgtgaccatgaagcccctgccgttttatgaggtctacggggagctcatcaggcccacaacccttgccagcacttccagccagcgcttcgaggaggcccacttcacattcgctctgaccccacagcaggtacagcagattctcacttcgagggaggtactgccaggggccaagtgtgactacaccatccaggtccagttgcggttctgcctctgcgagacctcttgcccccaggaagactattttcccccaaatctgtttgtcaaggttaatgggaaactctgtccactgcccgggtacctacccccaacgaaaaacggcgcagagcccaaacgtccaagtcggcctattaatattacaccactggccaggcttagcgccacggtcccaaacactattgtagtcaattggagctctgagttcggccgctag

SEQ ID NO: 130482 - DNA, 1248 bp, synthetic construct
  misc_feature 1..1248: note = Description of Artificial Sequence: Synthetic coding sequence
  source 1..1248: mol_type = other DNA
atgttcgctgacctggactatgatatcgaggaggataaactgggcatccctacagtaccagggaaagttacacttcagaaggatgctcagaacctgatcgggatatccataggtgggggcgctcaatattgtccatgcctttacatcgttcaagttttcgacaacactccggccgccctcgacggaacagttgccgctggagatgagataaccggagtcaatggccggtccatcaaagggaagacaaaggtcgaggtcgctaagatgatccaggaggtgaagggtgaagtcactattcactacaataaactccaggctgaccccaagcagggcatgtccctcgacattgtgctgaagaaggttaaacataggctcgtagagaatatgagttccgggactgccgatgctcttggtttaagccgtgcaatcctttgcaatgacggcctggtgaaaagactagaggagcttgagagaactgctgagctttacaaagggatgacagagcatacaaagaatctgctcagagcattctacgagctaagccagacccaccgtgctttcggggacgtcttctctgtgataggcgtgcgagaaccccagcccgcagctagtgaagccttcgtcaagtttgccgacgctcataggagcatcgaaaaattcggtatacgactcctcaaaaccatcaaaccgatgctaactgaccttaacacttatttaaataaggccatacctgatacaagattgactattaagaagtacctggacgtaaagttcgaatacctttcctattgtcttaaggtcaaagaaatggatgacgaggaatactcgtgtattgctctgggggaaccgctttaccgcgtgagtaccggaaactatgagtatagacttattctacggtgccgtcaggaagcaagggctagatttagtcagatgaggaaagacgtcctagagaaaatggagctccttgatcaaaaacacgtgcaggatatagtatttcagctccagagactggtgagtaccatgtccaagtactataacgattgctatgcggtgctccgagatgctgacgtgttcccaatcgaagtcgatttggcgcacactactttggcctatggcctgaaccaggaggaattcaccgatggggaagaggaagaggaggaggaggacacagctgcaggtgagccaagtcgcgatacacggggagccgctggacctctggataaaggcgggtcttggtgtgatagctag

SEQ ID NO: 130483 - DNA, 1248 bp, synthetic construct
  misc_feature 1..1248: note = Description of Artificial Sequence: Synthetic coding sequence
  source 1..1248: mol_type = other DNA
atgttcgcggatttggattatgatattgaggaggacaaattagggattcccacagtgcctggtaaggtgaccctgcaaaaagatgcacagaatctcatcggcatctccataggaggcggggcgcaatactgtccatgcctgtacattgtgcaagtctttgataacacccccgcagcactggacggtactgtcgcagccggggacgagatcactggtgtcaacggccggtcaattaagggcaaaacaaaagtggaagtcgcaaaaatgattcaagaggtgaagggtgaggtgaccatccattacaataaactgcaagccgatcccaagcaaggaatgtctcttgacattgtccttaagaaggtgaagcaccggctcgttgaaaacatgagctcaggcacggccgatgcactcggtcttagtcgggcaattctgtgcaacgacggacttgtgaaacggcttgaggaattggagcggaccgctgagctgtacaaggggatgacagaacatacaaaaaacctgctgagagctttctatgaacttagccaaacacaccgggctttcggggatgtgttctcagtgattggagtgagagagccacagccagctgctagcgaagctttcgttaagtttgctgatgctcatcgatcaatcgagaagttcggtatcagactccttaaaacaatcaagcccatgctcactgatctaaacacgtacctgaacaaggctatacccgatactcggcttacaatcaagaaatacctggatgtcaagtttgagtatctgtcctattgcctgaaagtcaaggagatggacgacgaggagtattcttgtattgccttaggcgagcccctgtacagagtaagcaccgggaactatgaatacagactgattttgcggtgtcggcaggaagctagggctagattttctcaaatgcgaaaagacgtactggaaaagatggaattgcttgatcagaaacacgtccaggatatagtcttccagctgcagcgtttagtatccacaatgagtaagtactacaatgactgctacgccgtgctacgcgacgctgacgtctttccaatcgaggtagatttggctcacaccaccctggcttatggtctgaaccaggaagagtttaccgacggtgaggaggaagaagaagaagaggacacagcggccggagagccaagccgggacactagaggggccgctggccctctggacaagggcggctcctggtgcgattcatag

SEQ ID NO: 130484 - DNA, 690 bp, synthetic construct
  misc_feature 1..690: note = Description of Artificial Sequence: Synthetic coding sequence
  source 1..690: mol_type = other DNA
atgtttgccgatctcgactacgacattgaggaagataaacttggcatccccacggtacctggcaaagtgacattacaaaaggacgctcagaaccttattggaatctcaatcggcggaggcgcccaatattgtccatgtctgtacatcgtgcaggtgtttgacaacacaccggctgcattggatggaactgtagctgctggcgacgagataaccggagtgaacggtagatccatcaagggaaagaccaaggtggaagtagcaaagatgattcaggaggtcaaaggcgaggttactatccattataacaaactgcaggccgatcccaagcagggtatgtcgctggacatcgttctgaaaaaagtgaaacacaggctcgtcgagaacatgtctagcgggactgctgatgctctgggacttagcagagcaatactatgtaatgatgggcttgttaaaaggctggaggaactggagaggacagccgagctttacaagggaatgacagaacacactaaaaacctgcttcgggctttttatgaactttcacagactcatagggcatttggcgatgtcttcagtgtaatcggtgttcgagagccacaaccagcggcttctgaagctttcgtgaagtttgctgatgcccacaggtcgattgaaaaatttggaatcaggcttctcaaaacgataaagtag

SEQ ID NO: 130485 - DNA, 405 bp, synthetic construct
  misc_feature 1..405: note = Description of Artificial Sequence: Synthetic coding sequence
  source 1..405: mol_type = other DNA
atgtttgcggacctcgactatgacatagaggaggacaagctggggattccaaccgtccctggcaaagttaccctgcagaaggacgctcagaatctcataggcatctctatcgggggcggcgctcaatactgtccgtgcctttacatcgttcaggtgttcgacaacacgcccgctgctctggatggaaccgttgccgcgggcgacgagatcactggtgtcaacgggcggtccattaagggcaagacaaaagtagaagtagccaaaatgattcaggaggtgaaaggcgaggtgactatacactacaacaagctacaggctgatcccaagcagggtatgtcactcgacatcgtgcttaaaaaagtcaaacatcggctcgtggagaatatgagctccggcacagcttag

SEQ ID NO: 130486 - DNA, 393 bp, synthetic construct
  misc_feature 1..393: note = Description of Artificial Sequence: Synthetic coding sequence
  source 1..393: mol_type = other DNA
atgttcgccgacttggactatgacatcgaagaggacaaacttggaatcccaaccgtccctgggaaggtcacattgcaaaaagatgctcagaacctgattggcattagtatcggagggggcgctcagtactgtccttgtctttacatcgtccaggttttcgataataccccagccgcccttgatggaaccgtagctgccggtgacgaaatcacaggtgtcaatggccgcagcatcaagggaaaaactaaagtggaagtggccaaaatgatccaggaggtgaaaggggaggtcacaatccactataacaagctgcaggcagatcctaagcagggcatgtctctggatattggccagagactcggatttcatggccctggcccacatagctcgtag

SEQ ID NO: 130487 - DNA, 117 bp, synthetic construct
  misc_feature 1..117: note = Description of Artificial Sequence: Synthetic coding sequence
  source 1..117: mol_type = other DNA
atgttcgccgacctggattacgatattgaggaggataagctgggaatcccaaccgtccccggaaaggtcacactgcagaaggacgcgcagaaccttataggaatctccattggatag

SEQ ID NO: 130488 - DNA, 231 bp, synthetic construct
  misc_feature 1..231: note = Description of Artificial Sequence: Synthetic coding sequence
  source 1..231: mol_type = other DNA
atgaccgatgtggagacaacatatgccgacttcatcgctagcggccggaccggaaggaggaatgccatccacgacatcttggtgagcagcgcctcagggaactcgaacgaactggcccttaagttagctggtctggatatcaacaaaacagagggtgaggaggatgcccagcgctcttccaccgaacaaagtggcgaagcacagggagaggccgctaagtcggagagctag

SEQ ID NO: 130489 - DNA, 231 bp, synthetic construct
  misc_feature 1..231: note = Description of Artificial Sequence: Synthetic coding sequence
  source 1..231: mol_type = other DNA
atgactgatgtggaaactacatacgccgatttcatcgcgtcggggaggacggggcgccgcaatgcaatccacgacattttggtgagcagtgcctctggaaactccaacgagctcgctctgaagctggccggacttgatataaacaaaaccgaaggggaggaagacgcccagagatcttcaacggaacagtctggcgaggctcaaggagaggcagccaagtccgagtcatag

SEQ ID NO: 130490 - DNA, 231 bp, synthetic construct
  misc_feature 1..231: note = Description of Artificial Sequence: Synthetic coding sequence
  source 1..231: mol_type = other DNA
atgacggatgttgaaacaacctacgcagacttcattgcctctggaagaactgggagacggaacgctatccatgacatactggtatcttctgctagcggaaacagcaatgagctggctctgaagctggcgggactcgacattaataagacagagggggaagaagacgctcagcgaagttctaccgagcagtccggagaggctcagggagaagccgctaagagcgaatcctag

SEQ ID NO: 130491 - DNA, 258 bp, synthetic construct
  misc_feature 1..258: note = Description of Artificial Sequence: Synthetic coding sequence
  source 1..258: mol_type = other DNA
atgagtcaccaagacgtggccatgcggacggattcatccaaaatgacagacgttgagagcggagttgctaattttgcctcatcagcaagggctgggaggaggaacgccctccctgacatccaatcatccgccgccactgacggtacgtcggatctccccctgaagcttgaggccttgagcgtcaaagaggacgccaaggagaaggatgagaaaacaactcaggatcagttggaaaagcctcaaaacgaagagaagtag

SEQ ID NO: 130492 - DNA, 237 bp, synthetic construct
  misc_feature 1..237: note = Description of Artificial Sequence: Synthetic coding sequence
  source 1..237: mol_type = other DNA
atgcgtactgactcgtccaagatgactgatgtagagtcgggagtggccaactttgcatcgtctgctagagcgggcaggcggaacgcgctacccgacatccaatctagtgctgccaccgatggaacctctgacttaccactcaagttagaagctttatccgtgaaggaggatgccaaggaaaaggacgaaaaaactacccaggaccaactggaaaagcctcagaacgaggagaagtag

SEQ ID NO: 130493 - DNA, 264 bp, synthetic construct
  misc_feature 1..264: note = Description of Artificial Sequence: Synthetic coding sequence
  source 1..264: mol_type = other DNA
atgcacatcctctttgtggacgtggccatgcgcaccgactcatccaagatgacggatgtcgagagcggcgtcgccaacttcgcctcttcagctagagccggccgacgcaatgccctcccggacatacagtcaagtgctgcgaccgatggcacgagcgatctgccactgaagctagaggcactttccgtaaaggaagatgctaaggagaaagacgaaaaaaccacgcaggaccagttggaaaaaccacaaaatgaggagaagtag

SEQ ID NO: 130494 - DNA, 237 bp, synthetic construct
  misc_feature 1..237: note = Description of Artificial Sequence: Synthetic coding sequence
  source 1..237: mol_type = other DNA
atgcggactgacagttcgaagatgaccgatgtggagtctggcgtggctaattttgcaagcagcgcccgggccggtcggagaaacgcactccctgacatccaatcaagcgctgccaccgacggcacctccgatctgcctctgaaattggaggccctatctgttaaggaggacgctaaggaaaaagacgaaaaaacgactcaggaccagttggaaaagccacaaaatgaggaaaagtag

SEQ ID NO: 130495 - DNA, 237 bp, synthetic construct
  misc_feature 1..237: note = Description of Artificial Sequence: Synthetic coding sequence
  source 1..237: mol_type = other DNA
atgcgtacagacagttctaaaatgaccgacgtggagtcgggcgtggctaacttcgcttcctcagccagggcaggccgtagaaacgctctccccgatattcagtcatcagctgccaccgatggaacttctgacctaccattaaaattggaagctctaagcgttaaggaagatgcaaaggaaaaggacgaaaaaactacccaggaccagctggagaagccccagaacgaggagaagtag

SEQ ID NO: 130496 - DNA, 237 bp, synthetic construct
  misc_feature 1..237: note = Description of Artificial Sequence: Synthetic coding sequence
  source 1..237: mol_type = other DNA
atgcgcactgactcaagcaagatgaccgacgtggagagcggagttgcgaattttgctagttctgccagagcgggacggagaaatgcattgcctgacattcaatcaagcgccgccacggacggaacatcagatctgccactgaaactcgaggccttgtccgtcaaagaggatgcaaaagagaaagatgagaagaccacacaggaccagcttgaaaagcctcagaacgaagaaaagtag

SEQ ID NO: 130497 - DNA, 237 bp, synthetic construct
  misc_feature 1..237: note = Description of Artificial Sequence: Synthetic coding sequence
  source 1..237: mol_type = other DNA
atgcggaccgattcatcaaagatgactgacgttgaaagcggcgtcgcaaatttcgcatcatctgcccgcgcagggagaagaaatgcactgcccgatatacaatcaagtgccgcaacagacggtacctctgacctgccactgaagctggaagcattgagtgtcaaagaagacgcaaaggagaaggatgaaaagactacccaagaccaactggagaaaccccagaatgaagaaaagtag

SEQ ID NO: 130498 - DNA, 231 bp, synthetic construct
  misc_feature 1..231: note = Description of Artificial Sequence: Synthetic coding sequence
  source 1..231: mol_type = other DNA
atgatggaggtagagtcctcctactctgactttatttcctgcgatcggaccggtcggcgtaacgccgtgccagacatccagggggactccgaggcagttagcgtgaggaagctcgccggagacatgggcgagctggctctcgagggcgcggaaggacaagtcgagggatctgcccccgataaggaggccgggaaccagccccagagctcggatgggaccacctcctcttag

SEQ ID NO: 130499 - DNA, 195 bp, synthetic construct
  misc_feature 1..195: note = Description of Artificial Sequence: Synthetic coding sequence
  source 1..195: mol_type = other DNA
atgatggaagtggaaagctcatacagcgactttataagttgtgaccggacgggtcggagaaacgcagtcccagacatccagggtgactctgaggccgtgtccgttcgtaagctggcgggtgatatgggcgagctggccctggaaggtgccgagatggacttgacaatgctaccatggttagtcagcaatagctag

SEQ ID NO: 130500 - DNA, 231 bp, synthetic construct
  misc_feature 1..231: note = Description of Artificial Sequence: Synthetic coding sequence
  source 1..231: mol_type = other DNA
atgatggaggtggaatcttcctacagcgatttcatatcctgcgacagaacaggaagaaggaacgcagtgcctgatatacaaggtgactccgaagccgtgagcgtgagaaagttagccggggatatgggcgaattggcactcgagggagcagaaggccaggttgagggaagtgccccagacaaagaagccggaaaccagcctcagagcagcgatgggactacaagcagttag

SEQ ID NO: 130501 - DNA, 231 bp, synthetic construct
  misc_feature 1..231: note = Description of Artificial Sequence: Synthetic coding sequence
  source 1..231: mol_type = other DNA
atgatggaggtggagtctagctatagcgatttcatcagctgtgatcgtacgggcaggaggaatgccgtaccagatatccagggcgactccgaggccgtgagcgttcgcaaacttgccggtgatatgggcgagctggcccttgagggcgctgagggccaggtagagggctctgccccggacaaggaagccgggaaccagccgcaatcttccgacggcaccacaagttcgtag

SEQ ID NO: 130502 - DNA, 231 bp, synthetic construct
  misc_feature 1..231: note = Description of Artificial Sequence: Synthetic coding sequence
  source 1..231: mol_type = other DNA
atgatggaggtcgagtcctcttactcagatttcattagttgcgatcggaccggccgtcggaatgccgtgcctgacatccagggagattctgaggccgtctctgtacggaaattggcaggcgacatgggagagctcgcattggagggcgccgaaggtcaggtagaaggatccgcccccgataaagaggctgggaatcagccccagtcctctgacggcaccacatcctcttag

SEQ ID NO: 130503 - DNA, 231 bp, synthetic construct
  misc_feature 1..231: note = Description of Artificial Sequence: Synthetic coding sequence
  source 1..231: mol_type = other DNA
atgatggaagtagagtccagctactccgatttcatctcatgtgatagaactggtcgccgaaacgctgtgccggacattcagggagattccgaggctgtgtccgtcagaaagctggcaggcgatatgggagaattggcactcgagggcgccgaagggcaagtcgagggatccgcaccagacaaggaagccggtaatcagccacagtctagcgacggcaccacctcttcatag

SEQ ID NO: 130504 - DNA, 231 bp, synthetic construct
  misc_feature 1..231: note = Description of Artificial Sequence: Synthetic coding sequence
  source 1..231: mol_type = other DNA
atgatggaagtcgaatccagttatagtgattttatctcatgtgaccgcactggacggcgcaatgccgtgcctgacatccagggggattccgaggctgtctccgttcgaaagctggcgggcgatatgggagagctggcgttggaaggggctgaaggccaggtcgaggggagcgcacctgataaggaggccggcaaccaaccccagtcttctgacggcaccacctcctcctag

SEQ ID NO: 130505 - DNA, 1578 bp, synthetic construct
  misc_feature 1..1578: note = Description of Artificial Sequence: Synthetic coding sequence
  source 1..1578: mol_type = other DNA
atgcctttactcgacggcgacctcgagggtagtggaaagcatagctcccgcaaggtggattctccgttcggacctggatcgccttctaagggatttttcagtagggggccacagccgcggccgtccagtccgatgtctgcccctgtgcggccaaaaacctcccctggttcacccaagacagtttttcccttcagctaccaggaatctccccccagaagcccgaggcggatgagtttctctggaatattccggagtagctccaaagaaagttctcctaactctaatccggccactagtcctgggggtattcggtttttttctcgaagtcgcaagactagcgggctttccagctcaccttccacgccgacacaggtgacaaagcagcatacttttccattggagtcgtacaagcacgagcccgagaggcttgaaaatcggatctacgcatctagttccccccccgatactggccagcgcttttgtccttcttcttttcagtcacctacacgtccccctttagccagcccaacacattatgccccgtcaaaggccgccgctctggctgctgccctcggccccgcagaagcgggaatgctggagaagcttgagtttgaggatgaagcagtcgaggacagcgagtcaggtgtttatatgcggtttatgaggtcccataagtgttatgatattgtgcccacgagtagcaaattggttgtcttcgacacaacgctccaggtcaaaaaggcctttttcgctctggtcgctaatggggttcgggctgcacccctttgggaaagtaagaaacagtcattcgtggggatgctgaccattactgacttcattaatattctgcataggtactataaaagccccatggtgcagatctatgagctggaggaacacaagatcgagacatggcgcgagctttacctgcaagagacttttaagcctttagtcaatatctctcccgacgccagcctgtttgatgcagtgtactccctcattaaaaataaaattcatcggttacctgttatcgacccaatcagtggaaacgcattgtacatccttacacataagcgaatattgaaatttctgcaactatttatgtccgacatgccgaagccagcattcatgaaacaaaacctggatgagctggggatcggaacataccataacatcgccttcattcatccagatactccaataataaaggctctgaacatctttgttgagcgccgaatcagcgctctgcccgtggtggacgaatcaggcaaggtagtagatatctacagcaaatttgatgttattaatctcgctgccgaaaagacatataataacctcgacattactgttacccaggcccttcaacatcgctcccagtactttgaaggcgtggttaagtgcaataaacttgagattctggaaactattgtagacaggattgtgcgtgcagaagtgcacaggcttgttgtggtgaacgaggctgattctatcgtgggcatcatctccctctctgacatcttgcaggccttgattctgaccccggccggagctaagcagaaggagaccgaaaccgagtag

SEQ ID NO: 130506 - DNA, 987 bp, synthetic construct
  misc_feature 1..987: note = Description of Artificial Sequence: Synthetic coding sequence
  source 1..987: mol_type = other DNA
atgttagagaagttagagtttgaggatgaagccgtggaggactcggagtccggggtgtatatgcgcttcatgcgctcccataagtgctatgatatcgttccaacaagctctaagctggtggtgttcgacaccacactgcaggtgaagaaggctttttttgccttggtggcgaacggggtgcgtgctgcaccgctctgggaatcaaagaaacaatcctttgtcggaatgctgaccatcaccgactttattaacattttgcacaggtattacaagtctccgatggtgcagatttacgaacttgaggagcacaagattgagacctggcgagaactctacctccaggaaacgtttaagccactggtgaacatttctcccgatgcttcactatttgatgctgtgtacagcctgatcaaaaataagatccaccggctgccagtgattgatcccatttcgggaaatgctctttacattttgacccacaagcgcatcttaaagttcctacagctgttcatgagtgacatgcctaaacctgccttcatgaaacagaatctggacgagttgggaatcggcacctaccacaacatagctttcatccacccagatacaccaataataaaggctctgaacatctttgttgagcggcgcatttccgcattaccagtcgtggacgagagcggaaaagtagtggatatctattcgaaattcgacgtaatcaacctggcagctgaaaagacttataacaacctggatatcaccgtcactcaggctttgcagcacaggagccaatattttgagggcgttgtgaagtgtaataaactagagatcctggagaccatagtcgaccggatagtccgagccgaggttcaccgactggtggtcgtaaatgaggcagactccattgttggcatcatcagtttgtccgacatcctgcaggcactaatcctgacccctgctggcgctaagcagaaggagaccgaaacagaatag

SEQ ID NO: 130507 - DNA, 1335 bp, synthetic construct
  misc_feature 1..1335: note = Description of Artificial Sequence: Synthetic coding sequence
  source 1..1335: mol_type = other DNA
atgtcatcgagctacgacgaagcttctctggcgcccgaggagacaaccgattcattctgggaggtgggaaactataaacgaaccgtgaagcggattgatgacggccaccgactgtgtaacgatctgatgaactgcgtccaagaacgagctaagattgagaaagcctacggccagcagttaacggactgggccaagcgttggcggcagttgatcgaaaagggcccacagtatggtagcctggaacgagcctggggcgctattatgaccgaggccgataaggtgtccgagctgcaccaggaggttaagaacaacctcttaaacgaagacctcgagaaggtgaagaattggcagaaagatgcataccacaaacagatcatgggcggatttaaagaaacaaaagaggcggaggatggattcagaaaggcacaaaaaccttgggcaaagaagatgaaagagctggaagccgccaagaaggcatatcacctggcttgtaaggaggaaaagctggcaatgacccgcgagatgaattccaaaacagagcagagcgtcacccccgaacagcaaaagaagttgcaagacaaagtggataagtgtaaacaggatgtgcagaagacgcaggaaaagtacgaaaaagtcctggaggacgtaggcaaaactactccacagtatatggaaaatatggagcaggtctttgagcagtgtcagcaatttgaggaaaagcgtctggtattccttaaagaggttctgctggacatcaaaagacatctgaaccttgccgagaactctagctacatccacgtgtaccgcgaacttgaacaagcgattcggggtgctgacgctcaggaagatcttaggtggttccgttctacctccggcccgggcatgcctatgaactggccccaattcgaggagtggaatccagatttgcctcacacgaccaccaagaaggagaaacaaccaaaaaaggccgagggtgtggctctgaccaatgccacaggtgcagtggagagcacctctcaggctggcgataggggaagtgtttctagctacgatcgaggtcagccctatgcgacagagtggtcagatgacgagtcaggtaaccccttcgggggatccgaaacgaacgggggtgcaaatccattcgaagatgattccaagggtgttagggtccgcgcactctatgattacgatggccaggagcaggacgaactgagcttcaaagccggcgacgaacttactaagctcggcgaggaagatgaacaggggtggtgccgtggaaggctagactccggccagctgggtctctatccggcgaattacgttgaagccatatag

SEQ ID NO: 130508 - DNA, 1281 bp, synthetic construct
  misc_feature 1..1281: note = Description of Artificial Sequence: Synthetic coding sequence
  source 1..1281: mol_type = other DNA
atgagcagtagttatgacgaggcctctcttgccccagaggagactacagactctttttgggaagtaggcaactataaacgcaccgtcaaaagaattgacgatggacaccgtctttgcaatgacttaatgaactgcgtccaagagcgtgcgaagatcgaaaaggcctacggccagcagctgaccgattgggcaaagcgatggcggcaactcattgagaaaggtccacagtacggatccctcgaaagagcctggggagctatcatgacagaggccgataaagtctccgaactacaccaggaagtgaaaaataacctgctcaatgaggatctcgaaaaggtgaagaactggcagaaggacgcttaccataagcagattatgggaggatttaaagagacaaaagaggccgaagacgggtttagaaaggctcaaaaaccttgggccaaaaaaatgaaggagttggaagctgccaagaaggcctaccacctcgcctgcaaagaggagaaactcgccatgactagagaaatgaactccaagactgaacaaagtgtgacaccagagcagcagaagaaattgcaggataaagtcgacaaatgtaaacaggacgttcagaagacccaggagaagtatgaaaaagttctggaagatgttggcaagactacgccacagtacatggagaacatggagcaggtcttcgaacaatgccaacagttcgaagagaagaggctcgttttcctaaaagaggtgctactggatattaagcggcacctgaatctggctgaaaactcttcatatatccacgtatacagggagctagaacaggccattagaggcgccgatgctcaggaagacctgagatggtttcgctctacctctggtccaggcatgcctatgaactggcctcaatttgaggagtggaacccagatcttccccataccacaactaagaaggaaaagcagcccaagaaagcagaaggtgtggccctcaccaacgccaccggggctgtcgagtccacttcccaagccggcgacaggggctccgtttcttcttacgacaggggccaaccttatgccactgagtggtccgatgatgagtcgggtaacccgtttggggggtctgagaccaacggcggggccaatccattcgaggacgactccaaaggcgtgcgagtgcgggctctgtacgattacgacggacaggagcaggacgaattaagtttcaaggctggcgatgaactgaccaagctgggcctgtaccctgctaattacgttgaagctatctag

SEQ ID NO: 130509 - DNA, 1335 bp, synthetic construct
  misc_feature 1..1335: note = Description of Artificial Sequence: Synthetic coding sequence
  source 1..1335: mol_type = other DNA
atgtcatcatcctacgacgaagcctccctggccccagaagaaacaactgattctttttgggaggttgggaattacaagagaacagtcaaacggattgacgacgggcaccgcctatgcaacgaccttatgaactgtgtgcaggagcgcgccaaaatcgagaaagcctatggacagcagctcaccgactgggccaaaaggtggcgccaactcatcgaaaaggggccacagtacggttctctggagcgagcttggggggccatcatgaccgaagcagacaaagtgagcgaattacaccaggaagtgaagaataatttgctgaatgaagatttggagaaggttaagaactggcagaaggatgcctaccacaagcagattatgggcggtttcaaagagacgaaagaggctgaagacggttttagaaaagctcagaagccatgggccaaaaagatgaaggagctggaggctgctaagaaggcttaccacctggcctgtaaagaggaaaaactggcaatgacccgggagatgaactctaaaaccgagcagagcgtgactcccgagcagcaaaagaaactgcaagacaaagttgataagtgcaaacaggacgtgcaaaaaacccaggaaaaatacgagaaagtgctggaggatgtaggcaagaccacgccgcagtacatggaaaatatggaacaagtttttgaacagtgtcaacaatttgaggaaaagcgcctcgtgttcctcaaggaggtgctgctcgacataaagcggcaccttaacctcgccgagaactcctcttacatccacgtttacagggagctggaacaggctatccgcggcgccgacgctcaagaggatcttcgctggttccgctccaccagtggccccggaatgcccatgaactggcctcagtttgaagagtggaaccccgatctcccacatacaacgaccaaaaaagagaagcagcccaagaaggcggagggcgtggcgcttacaaacgccaccggggctgtggagagcacaagccaagctggcgaccgtgggagtgtgtcttcttacgatagaggacaaccatatgccactgagtggagcgacgatgaatccggaaatccatttggaggctccgaaacaaacggcggagcgaatccttttgaagatgactcgaaaggcgtccgggttagggccctgtacgactatgatggccaggagcaggatgagctcagctttaaggctggtgacgaattgaccaaactaggcgaagaggacgagcagggatggtgccgcggccgcctggactcgggccagcttggactctacccggctaactatgtggaagctatatag

SEQ ID NO: 130510 - DNA, 1275 bp, synthetic construct
  misc_feature 1..1275: note = Description of Artificial Sequence: Synthetic coding sequence
  source 1..1275: mol_type = other DNA
atggccccagaagaagacgctggaggtgaagccctgggaggaagtttctgggaggccggaaactacagacgcaccgtgcagagagtcgaagacggccataggctctgcggagatctggtaagttgtttccaagagagagctagaatcgaaaaagcatatgcccagcagcttgctgattgggcccggaaatggaggggcacagtggaaaaggggcctcaatatgggactttagagaaggcatggcatgctttcttcacggcagccgagagactttccgcccttcatctggaagtcagagagaagcttcaaggccaggactccgaacgagttagagcttggcagaggggagctttccaccggccagtgcttggcggttttcgggagtcgcgcgccgcggaggacggcttccggaaagctcagaagccatggctgaaacgcttgaaagaggtggaggcaagcaagaagagttaccacgctgccagaaaggatgaaaagactgcccagacaagagagagccacgctaaagcagattctgccgtgagccaggagcagctgcgaaaactccaggagcgcgtcgaaaggtgcgctaaagaggccgaaaagaccaaagcccagtacgagcaaaccttagccgagttacatcgatacaccccacgttatatggaagacatggagcaggccttcgagacctgccaggcagctgagagacagagactcctcttctttaaggacatgctgctgaccttgcaccagcacctcgacctctcaagctctgagaagttccacgagctgcacagagatctgcatcaaggcattgaggcggcatctgacgaggaagacttgcgatggtggcggtcaactcatggccccggcatggcgatgaattggccacagttcgaagagtggtctcttgacacccagcgtaccatatctaggaaagaaaagggcggaaggtccccggatgaagtgaccctaacctccatcgtccctacacgcgacggaaccgcccccccaccccagtctccaggatctccaggcaccggacaagacgaagagtggagcgacgaggaatcaccgagaaaggctgccacaggagtgcgggtgcgtgcactttatgattacgccggacaggaggccgacgagctctcgtttagagccggagaagagctgctgaaaatgtctgaagaagatgagcagggatggtgccagggacagctgcaatccgggcgcatcggactctatcccgccaactacgtggagtgtgtgggggcttag

SEQ ID NO: 130511 - DNA, 879 bp, synthetic construct
  misc_feature 1..879: note = Description of Artificial Sequence: Synthetic coding sequence
  source 1..879: mol_type = other DNA
atggcccccgaggaagacgctggcggagaggcgctgggcgggagtttttgggaggcaggcaactaccgcaggaccgtccagcgcgtggaggatgggcacagactttgtggcgatttagtctcatgtttccaggaacgcgcacgcatcgaaaaggcatatgctcagcagttagctgactgggccagaaaatggcgcgggactgtggagaaaggcccccaatacggcacactggaaaaagcgtggcacgccttctttacggctgccgagcgtctgagcgctctgcacctggaagtgcgtgaaaaattacagggacaggactccgaaagagtgcgggcctggcaaaggggcgcctttcacagacctgtcctcggagggttccgcgagtccagagcggccgaggatggatttcggaaagcccaaaagccatggttaaaaaggttgaaggaagtggaagccagcaagaaatcttaccatgccgccaggaaagatgaaaagacggcccagacgcgggaaacccaacggcaaaccgcccctagcccgcgcagttcatgcgcaaactgccgaaacggctggaacgccgttccacgtcggcctagaagacagaagttgagtatgagccggcggtggcagagttgcatcgccaccctccatgcgacttggaggacctggaataggcctttaaggccagcccgcccaccttctgcttctgggttcttttcaagccggatatgttgttctccctatacatcaacctggacattcccagccgtgagatcgagcatgaatagcaccgtgacttgcacaagagccctaaggcaaccagtgacaaaacgcatatgtgccggcggggccgctccaactgggcaggcctggccatag

SEQ ID NO: 130512 - DNA, 210 bp, synthetic construct
  misc_feature 1..210: note = Description of Artificial Sequence: Synthetic coding sequence
  source 1..210: mol_type = other DNA
atggcccccgaggaggacgcaggtggagaggcactgggtggatccttctgggaggccggcaactataggcggacagtacaaagggtggaggacggccatcgactttgtggcgacctggtttcatgcttccaggagagggcccggattgaaaaagcttacgcgcaacagctggcggactgggccaggaagtggagaggaacggtagagtag

SEQ ID NO: 130513 - DNA, 429 bp, synthetic construct
  misc_feature 1..429: note = Description of Artificial Sequence: Synthetic coding sequence
  source 1..429: mol_type = other DNA
atggctccggaggaagatgcaggaggcgaggcactgggcggatccttttgggaagctggtaattaccgaagaacagtgcagagggtagaggacggccacagactttgcggtgacctggtttcatgcttccaggagcgagcaagaattgagaaagcttacgcccagcagctcgcagattgggcgagaaagtggaggggaacagttgaaaagggacctcagtatggcaccctggagaaagcctggcatgcgttctttacggccgccgaaagattatcggcactgcacctcgaagtgagagaaaaactccaggggcaggactccgagagagtgcgcgcctggcaacggggagccttccatcgacccgtgctgggcggcttcagggaatcgagagccgccgaggatggctttcgcaaggcccagaaaccttag

SEQ ID NO: 130514 - DNA, 1218 bp, synthetic construct
  misc_feature 1..1218: note = Description of Artificial Sequence: Synthetic coding sequence
  source 1..1218: mol_type = other DNA
atggcacccgaagaggacgcgggcggcgaagcactgggcgggagcttctgggaagccggcaactatcgacgcaccgtccaacgggtggaggatggacaccgcctgtgtggtgatctggtgtcgtgtttccaggagcgtgcccggatcgagaaggcgtatgctcaacagctcgccgactgggcccgaaaatggcgaggcacggtcgaaaaggggcctcaatatggcaccctggaaaaggcctggcatgcattcttcactgccgcagaacgcctctctgctttgcatctggaggtgcgggaaaagctacaagggcaggactccgaaagggtgagggcctggcaaagaggggccttccatcgacccgtgctggggggcttccgggagtcacgggcagcggaggacggattccgaaaagcgcaaaagccttggcttaaacggctgaaagaggtggaggccagtaagaagagctatcacgccgcccgcaaagacgagaagacagcccaaacacgtgaatctcatgcaaaagccgattccgcagtttctcaagaacagcttcggaaactgcaggagcgcgtggaacgctgcgcaaaggaggcggagaagaccaaggctcagtatgaacaaaccttagcagagctgcatagatacacaccgcgatatatggaggacatggagcaggcttttgagacttgtcaggctgctgaaagacagagactgttgttttttaaagacatgctcttgactctccatcagcaccttgacctctctagcagcgaaaagttccacgaacttcaccgcgacctacaccaaggcatagaagccgcctccgatgaggaagacttgcggtggtggcggtccacacacggacccgggatggcgatgaactggccccaattcgaagaatggtcactggatacccagagaacaatctctaggaaggagaaagggggcagaagccctgacgaagtaaccctcacatcaatagtgccaaccagagacgggactgcccccccacctcagtcaccgggcagtccagggaccggccaagacgaggaatggtcagacgaggaatcacctcgtaaagccgcgacaggagttagggtacgtgccctatacgactatgccggacaggaggctgatgaattgtctttcagagcaggcgaagagcttctgaaaatgtctgaggaggacgagcagggttggtgccaaggccagtag

SEQ ID NO: 130515 - DNA, 210 bp, synthetic construct
  misc_feature 1..210: note = Description of Artificial Sequence: Synthetic coding sequence
  source 1..210: mol_type = other DNA
atggcacccgaggaggacgctggaggggaagccctgggcggatccttctgggaagcaggaaactacagaaggaccgtgcagagggtcgaggacggccacagactgtgcggcgacctggtatcttgtttccaggagagagcccgtattgagaaggcctacgcacagcagttggcagattgggcacggaaatggcggggcaccgttgaatag

SEQ ID NO: 130516 - DNA, 447 bp, synthetic construct
  misc_feature 1..447: note = Description of Artificial Sequence: Synthetic coding sequence
  source 1..447: mol_type = other DNA
atggcccccgaggaggatgctggcggagaggcgttgggcgggagcttttgggaggccgggaactaccgccgtacagtacaacgcgtggaagatggacaccggctttgtggcgatcttgtgagttgcttccaggaaagagctagaattgagaaggcctacgctcagcagctagccgattgggcaagaaagtggagaggcaccgtagaaaagggtcctcagtacgggacattggaaaaggcctggcacgcttttttcaccgctgcggaacggttgtctgctttgcacttagaagtgcgtgagaaactccaaggccaggactccgaaagggtcagggcttggcagagaggggcgttccacagacccgttctgggaggtttccgcgagtcccgagccgctgaagatggatttcggaaggcccaaaagccttggctgaagagactcaagtag

SEQ ID NO: 130517 - DNA, 1275 bp, synthetic construct
  misc_feature 1..1275: note = Description of Artificial Sequence: Synthetic coding sequence
  source 1..1275: mol_type = other DNA
atggccccggaggaggacgccggcggcgaagctttgggcggaagcttttgggaagccggaaattaccgtcggacagttcagcgggtcgaggacggacaccgtctgtgcggagacctggtttcatgttttcaggaacgggcccgcatagagaaggcttatgctcagcagctggctgattgggcccggaaatggagaggcacagttgagaaaggcccccagtacggaactttggaaaaagcctggcatgccttttttacggctgcagagcggctttccgcgctccatttggaagtgcgtgaaaagctccagggtcaagattcagagagagtcagggcctggcagcgcggcgcattccataggccggtgctgggcggttttcgtgagtctcgcgccgccgaagacggcttccgcaaagctcagaagccctggctgaaaaggctgaaagaggtggaggcctctaagaaatcttatcatgccgccaggaaggacgaaaagacagcccagacgcgggaaagccatgcgaaggctgacagcgccgtcagccaggaacaacttcgcaagttgcaagagcgcgtcgagcgctgcgctaaagaggcagaaaaaacaaaagctcagtatgagcagaccctggctgagctccaccggtatactccaagatacatggaagatatggagcaagcatttgagacatgtcaagctgctgagagacagcggctgcttttcttcaaggatatgctgttgacgttgcatcagcacttggatctatcctcatcagagaaattccacgagctgcatagagacctgcaccagggcatagaggccgcaagtgacgaggaagacctgcggtggtggcgcagcacacatggcccgggcatggcaatgaactggccccagttcgaggagtggagtctcgatacccagagaactatttcaagaaaagaaaaggggggtcgaagtccagacgaggtgaccttgacctcaatcgtcccgactcgcgacggcacagctccccctccccagtctcccgggtcacctggaacagggcaagatgaggaatggtccgatgaagagagcccacgcaaagctgcaacaggcgtacgcgtgagggctctgtatgactatgctggccaggaggctgatgaactcagtttccgagccggcgaagaactcttaaaaatgagtgaggaggacgagcagggatggtgtcagggacagctccagtctggtcgaattggcctgtacccagccaactacgtcgagtgcgtgggcgcttag

SEQ ID NO: 130518 - DNA, 1587 bp, synthetic construct
  misc_feature 1..1587: note = Description of Artificial Sequence: Synthetic coding sequence
  source 1..1587: mol_type = other DNA
atgctgctacccctgctgctcctcctgcccatgtgctgggcggttgaagttaagcggcctcgaggagtgtctctgaccaatcaccatttttacgacgagtcgaagccgttcacctgtctcgatggatccgccaccatccccttcgaccaggtgaacgatgattattgtgattgcaaagatggctctgacgagcccgggaccgcagcatgtcccaatggttccttccattgtactaacacggggtacaaacccctctacataccatctaacagagtgaatgacggagtttgtgactgctgcgatgggacagacgagtataacagcggggttatctgcgagaatacatgcaaggagaaaggcagaaaagagcgcgagagtcttcaacagatggccgaggtcacacgcgagggctttagattaaaaaagattttgatcgaagactggaaaaaagcccgagaggagaagcagaaaaagctgattgagctgcaggcgggaaagaagagtcttgaggatcaggttgagatgctgcggacagtaaaagaagaggccgagaaaccagagagggaggccaaagagcagcaccagaagctttgggaagagcagctcgctgctgccaaggctcaacaggaacaggaactggcagctgatgcgttcaaagaactggacgatgacatggacgggaccgtgtctgtgaccgagctgcagactcaccctgaactggatacagacggggatggcgctctcagtgaagcagaagctcaagcactgctgagtggggatacccagactgacgccacttccttttatgatagggtgtgggctgctattcgcgataagtatcggtctgaggccctcccgactgacctgcccgccccttccgctccagacctgaccgagcccaaagaggagcagccccctgttccttcaagtcccacggaagaagaggaggaggaggaagaagaagaggaggaagaggcagaagaggaggaagaggaagaagactctgaagaggccccgccgccattgtctcctcctcagccagccagtccagccgaagaggacaagatgccaccatatgacgaacagacacaggcgttcattgatgccgcacaggaagcacggaataaattcgaggaagccgaaagatccctcaaagacatggaagagtccatcagaaacctcgagcaagagattagcttcgatttcggcccaaatggagaatttgcctatttgtactctcagtgctacgaacttacgacaaacgagtatgtttataggctgtgtcctttcaagctcgtgtcacagaagcccaaactgggaggctctccaactagcctggggacatgggggtcctggataggccccgaccacgataaattctctgctatgaagtacgagcaaggtacagggtgttggcagggcccgaaccgttcaacaactgtgcgactcctgtgtgggaaagaaactatggtgacgagcactaccgaaccctccaggtgcgaatacctaatggaactcatgacgcctgccgcctgccctgaaccccctcctgaagcacccactgaggacgatcatgacgaactgtag

SEQ ID NO: 130519 - DNA, 1578 bp, synthetic construct
  misc_feature 1..1578: note = Description of Artificial Sequence: Synthetic coding sequence
  source 1..1578: mol_type = other DNA
atgctcctgcccctactcctgttacttccgatgtgttgggccgttgaagtcaaaagacccaggggagtgtctctcacaaaccaccacttttacgacgagagcaaaccgttcacatgcctggatggatccgctacaatcccatttgaccaggtgaacgatgattattgtgattgcaaagacgggagcgatgaacccgggacagctgcctgccccaacggtagcttccattgcacaaacacaggctacaaaccattatatattcctagtaaccgagtcaatgatggcgtgtgcgattgttgtgacggcaccgatgagtacaactctggtgtgatatgtgaaaacacctgcaaggagaaaggccgcaaggagagagaatctctgcagcagatggcagaagtaacacgggagggttttaggctgaagaaaatcttaatcgaggattggaagaaggccagagaagagaaacaaaaaaagctgatcgaactccaggctggaaagaagtcactcgaagatcaggtggaaatgcttagaacagttaaggaggaggctgagaagcccgagcgggaggctaaagaacagcaccagaagctgtgggaggaacagcttgctgcagcgaaagcccagcaggagcaggagttggcagcagatgccttcaaagaactggacgatgatatggatggaacggtctcagtgacagaactacagacccaccctgagttggataccgatggcgacggcgcactctccgaggctgaagctcaggctttgctctctggagatactcagaccgatgccacgtcattttacgatcgggtgtgggcggccatccgtgacaagtacagatctgaagcgctaccaacagacctgcctgctcctagtgcacctgacctgacagagccaaaggaggaacagccaccagttccttctagtcccacagaggaggaggaagaagaagaggaggaagaagaggaggaggctgaggaggaagaagaagaagaagacagtgaagtgcagggggaacagcctaagccagccagcccagcggaggaagacaaaatgccaccgtatgacgaacagacacaggcattcatcgatgcagctcaggaagccagaaacaaatttgaggaagctgaacgatccctgaaagacatggaggaaagcatccgcaatctagagcaggaaatttcttttgactttggacctaatggagagtttgcatatctgtacagccaatgctacgaactgaccaccaatgagtatgtgtaccgcctatgtcccttcaaactcgtctcccagaaaccaaaactggggggcagtcccacttcccttggaacatggggaagttggatcggccccgaccacgataagttcagcgcaatgaaatacgaacagggtactggctgctggcagggacccaacagatccacaaccgtgcgactgctgtgtggaaaagaaactatggtcactagcacaacggagcctagccgctgcgagtacctgatggagctcatgacgccagctgcatgccctgagccgcctccagaggctcccaccgaggacgatcacgatgagctgtag

SEQ ID NO: 130520 - DNA, 2031 bp, synthetic construct
  misc_feature 1..2031: note = Description of Artificial Sequence: Synthetic coding sequence
  source 1..2031: mol_type = other DNA
atggccccctttctcagaatcgcatttaactcgtacgagctgggttccctccaggccgaggatgaagcaaatcagccgttttgtgctgtgaagatgaaagaagcactgtcaaccgagcgggggaagaccctagttcagaagaagcctacaatgtatcccgagtggaaatctactttcgacgcacacatctacgaaggacgggtcatccagatcgtgctgatgagggcagccgaggagcctgtttccgaagtgacggtcggcgtgagcgttctggcagagagatgtaaaaagaacaacggcaaagccgagttctggctcgacctacagccacaggccaaggtcctaatgagcgtccagtacttcctggaagatgtggattgcaaacaatccatgagaagtgaggacgaagccaagttccctacaatgaacaggcgcggcgccatcaagcaagctaagattcactatatcaagaatcatgaatttatcgccaccttcttcggacagccaacattctgttcagtgtgcaaggactttgtttggggcttaaataaacaagggtacaaatgccgtcagtgcaatgcagcaattcacaagaagtgtatagacaagatcatcggtcgatgcaccggtaccgctgctaactcgagggatacaatattccaaaaagagcggtttaatatagacatgccccacaggttcaaagttcacaactacatgtcccctaccttctgtgaccattgcggtagcctcctgtggggcctcgtgaagcagggacttaagtgtgaggactgcggaatgaacgttcaccacaagtgtagagagaaagttgccaatctctgcgggatcaaccagaagctgcttgcagaggcgctcaatcaagtgactcagagagcatccagaagatcagacagtgcctcaagtgagccggtgggcatctaccagggatttgaaaaaaagacaggagtcgcgggagaggatatgcaggataactccggaacctatggaaagatttgggagggcagctccaagtgtaacatcaataacttcattttccataaggtgcttggtaaaggctcctttgggaaagtgctcttgggggaactcaagggtcggggcgaatacttcgccattaaggcactcaagaaggatgtagtgttgattgacgatgacgtagaatgcacaatggtggagaagcgcgtccttacattggccgccgagaaccccttcctgacacacctcatctgcactttccagaccaaggatcacctcttcttcgtgatggagttcttaaacggaggagatctcatgtaccatatccaggataagggccgattcgaactgtacagagccaccttctacgccgcggagattatgtgtgggctccagtttctgcatagtaaaggcataatctatagagacctgaaacttgataatgtactgctggatcgcgatggacatatcaaaatcgctgactttgggatgtgcaaggagaatatcttcggcgagtctcgagctagcacgttttgtggaacccctgactatattgcaccagagatactgcagggcttaaaatacaccttcagtgtggactggtggagcttcggcgtcttactttacgagatgcttatcgggcagagcccctttcacggcgatgacgaggacgagctgtttgagagcatcagagtggacactccacactaccccaggtggatcaccaaagaatctaaggacatacttgagaaactgtttgagcgcgaacccactaagagactgggcgtaaccgggaatatcaaaatacatcctttctttaagaccatcaattggacactcttagagaagagaaggctggaaccgccctttcggcccaaggttaaatctcccagggattattccaattttgatcaggaattcctgaacgagaaagctcgcctgagctactctgataagaacctcattgacagtatggaccagtcagcgttcgccggtttctctttcgttaacccaaaattcgaacatttactggaggattag

SEQ ID NO: 130521 - DNA, 2031 bp, synthetic construct
  misc_feature 1..2031: note = Description of Artificial Sequence: Synthetic coding sequence
  source 1..2031: mol_type = other DNA
atggccccttttttgcgaattgcctttaatagttatgaactggggagcctgcaggccgaagacgaagccaaccagcctttttgcgctgtgaaaatgaaggaagccctgagtaccgagcgcgggaagaccctggtccagaaaaagcccaccatgtacccagaatggaaatcgaccttcgatgcccatatctatgaagggcgtgtcatccaaatcgtacttatgcgagccgctgaggaaccagttagtgaggtgactgtaggggtttccgtgctcgccgagcggtgtaagaaaaacaacggcaaagccgagttttggctggacctccaaccccaggcaaaggtattgatgagcgtgcagtacttcctggaggatgtggactgcaagcaaagcatgcggagcgaagatgaggctaagttcccgaccatgaacagacgcggtgccatcaagcaggccaaaattcactacattaagaatcacgaatttatcgcgaccttctttggccagcctactttctgtagcgtatgtaaagacttcgtttggggcctgaataagcagggatacaaatgtaggcagtgcaacgcagctatccacaaaaagtgtattgataaaatcattgggaggtgcactggaacagctgctaatagtagagataccatattccaaaaggagaggttcaacattgatatgcctcacaggtttaaagtgcacaattacatgagccctacattctgcgatcattgcgggagcttactttggggcctggtcaagcaaggtctgaagtgtgaggactgcggcatgaacgtgcatcacaagtgccgggagaaagtggccaacctctgcgggataaaccagaaactcctggcagaggcgctgaaccaggtgacacagcgggcttcacggagatcagactccgcctcgtccgagcccgtgggaatttaccaggggttcgagaaaaaaacaggtgtggcaggagaggatatgcaggacaattctgggacttacggaaagatctgggagggctccagtaaatgtaatattaacaacttcatcttccataaagtgttgggtaagggatcattcggtaaggtcttacttggagaactgaagggtcggggagaatactttgctattaaggcgctgaaaaaggacgtggtgcttattgatgacgacgtcgagtgtacaatggtggagaagcgtgtgttgacactggccgccgagaatccgttcctcacacacctcatttgtacatttcagactaaggaccaccttttttttgtgatggaattcctcaacggcggcgacctcatgtaccatatccaggacaagggacgattcgaattatatcgagccaccttttacgccgctgagattatgtgcggactgcagtttctacacagtaagggtatcatctaccgtgatctgaagttagacaatgtgttgcttgaccgagacggccacattaaaatagccgatttcggcatgtgtaaagagaacatttttggcgagtcccgagcttctaccttttgtggcacacccgattatatcgcccccgagatcctgcaaggccttaagtacacattctccgtagactggtggagctttggcgtgctgctttacgagatgttgatcgggcagtccccgttccacggtgacgatgaagatgaactgttcgaatccataagagttgacaccccccactatccaaggtggatcaccaaggagagcaaggatattcttgagaagctcttcgaacgggaacccacaaaacgcctgggggtgaccggcaatataaaaatccaccccttttttaaaacgataaattggacactgctggaaaagagaaggctggaaccacccttcaggccgaaagtgaagagtcccagggactactcaaattttgatcaagagtttctgaacgagaaggctcgcctcagctactccgataagaatcttatcgattcgatggatcagagtgcattcgccgggttttcctttgttaatcccaaatttgagcacctgttagaggattag

SEQ ID NO: 130522 - DNA, 234 bp, synthetic construct
  misc_feature 1..234: note = Description of Artificial Sequence: Synthetic coding sequence
  source 1..234: mol_type = other DNA
atggctccatttctcagaatagcttttaactcctacgaactaggaagtctacaggctgaagatgaggccaaccagcccttctgtgctgtaaagatgaaagaggctttgagcacagagagaggtaaaacactggtgcagaagaaacctaccatgtaccccgagtggaagtccacatttgacgcccatatatacgaaggcagagtaatacagattgtcctcatgagggctgcctag

SEQ ID NO: 130523 - DNA, 378 bp, synthetic construct
  misc_feature 1..378: note = Description of Artificial Sequence: Synthetic coding sequence
  source 1..378: mol_type = other DNA
atggcccccttcctgcggatcgcctttaattcttatgaattgggatcccttcaggcagaggacgaagccaatcagccattttgcgccgtaaagatgaaagaggccctatccaccgaacgcggcaagactctagtgcagaaaaaacctaccatgtatcctgagtggaagtccacctttgatgcccacatctacgagggccgagtgatccagatcgtgctgatgagggctgccgaagagccagtgagtgaggtcaccgtgggcgtctccgtattggctgaacgttgcaagaaaaacaatggcaaggccgagttttggctggaccttcagcctcaggctaaagttctcatgtctgtgcagtacttcttggaagacgtgtag

SEQ ID NO: 130524 - DNA, 2052 bp, synthetic construct
  misc_feature 1..2052: note = Description of Artificial Sequence: Synthetic coding sequence
  source 1..2052: mol_type = other DNA
atgtcttctggcaccatgaaattcaatggatatctgcgggtgaggatcggcgaggcagttgggctacaaccgacgcggtggagtctccggcattcacttttcaagaagggtcaccaactgctcgatccctaccttaccgtatcagtagaccaggttcgcgtgggacagactagtacgaaacagaagactaataagccgacctataatgaagagttttgcgccaacgtgacggacggtggccacctggagctagcagtgtttcatgagacgcctctcgggtacgaccactttgtggctaattgtacactgcagttccaggaattacttcggaccaccggtgcaagcgatacctttgaaggctgggtcgacctcgaacccgagggaaaggtgtttgtcgtcatcaccctgactggctcatttactgaggcgactctgcagcgagacaggatatttaagcacttcactaggaaacggcagcgagccatgaggagacgcgtgcatcagattaatggccacaaatttatggcaacctacttacgccagcctacatactgcagccactgtcgtgagttcatctggggcgtctttggaaagcagggatatcagtgccaggtgtgcacgtgtgtcgtgcataagaggtgtcaccacctgatcgtgacggcatgtacatgccagaacaatatcaataaagtcgatagcaagatagccgagcagagatttggcatcaacattccacacaagttcagcatccacaattacaaggttcccactttttgcgaccactgcggctctctgttatggggcattatgagacaggggttacagtgtaagatctgcaaaatgaatgtccacatccggtgtcaggccaatgtggctcctaactgcggggtgaatgcggtggaactggccaagacccttgctggcatgggcctgcagccagggaatatttcacccaccagtaaactggtgagtagatcgacacttaggcgacaaggcaaagaatcatcgaaagagggaaatgggattggcgttaacagcagtaacaggcttgggattgataacttcgaattcatcagggtgctgggcaaaggcagctttggtaaggtgatgctggcacgcgttaaagagactggggacctttacgcggtgaaggttctgaagaaggatgttatactgcaggatgacgatgtggaatgtacgatgactgaaaagcggatactcagcctcgcccgcaaccatcccttcctgacacagctcttctgttgctttcagactcccgatcgacttttctttgtcatggaattcgtgaatggcggagaccttatgttccatattcagaagtcacgacggttcgacgaggctcgcgcacgattttacgcggccgaaataatcagcgcgctgatgtttttgcacgacaaagggatcatctatagagacctgaagctggataatgtccttctggatcacgagggacactgtaagcttgccgatttcggaatgtgcaaagagggtatttgtaacggggtgaccactgcaacattttgcgggacccccgattacattgctccagaaattcttcaggagatgctgtacggtccagcagtcgactggtgggccatgggcgtgttgttgtacgagatgctctgcggccacgcaccctttgaagctgaaaatgaggacgatctgtttgaagcaatcctaaatgatgaagtggtctacccgacgtggctgcacgaggacgccaccggaatccttaagagtttcatgaccaaaaaccctaccatgagactgggctccttaacccagggcggagagcacgccatcttgcgacaccccttctttaaagagattgactgggctcagctgaatcaccggcagatcgaacctcccttccgacctcggataaaaagtagagaggatgttagtaattttgatccagacttcattaaagaagaacctgttctcacaccaatcgacgaggggcatttgccaatgataaaccaagacgagttccgcaatttcagctacgtttctccagagttacagccctag

SEQ ID NO: 130525 - DNA, 357 bp, synthetic construct
  misc_feature 1..357: note = Description of Artificial Sequence: Synthetic coding sequence
  source 1..357: mol_type = other DNA
atgtcatccggcactatgaaattcaatggctacctcagggtccgtataggcgaagccgtcgggcttcagcccactagatggagcttaaggcactcactgtttaagaaaggacaccagctgttggacccctacctgacagtgagcgtggaccaagtgagggtgggccaaacctctaccaaacaaaagactaacaagccaacttataatgaggagttctgtgcaaatgtgacggatgggggtcacctggagctggccgtttttcatgagaccccactagggtacgatcatttcgttgctaactgcacattgcaatttcaggagctgctccgcaccacaggggctagtgatacgttttag

SEQ ID NO: 130526 - DNA, 1791 bp, synthetic construct
  misc_feature 1..1791: note = Description of Artificial Sequence: Synthetic coding sequence
  source 1..1791: mol_type = other DNA
atgcctactcagcgggattctagtacgatgtctcacaccgtcgctggcggaggctctggcgatcactctcatcaggtcagagtgaaagcctactataggggcgacataatgatcacgcactttgaaccttccatcagtttcgaaggattatgtaacgaggtacgtgacatgtgctcatttgacaatgaacagctgttcacgatgaaatggattgacgaagaaggcgacccttgcacagtaagctcacagttggaactcgaagaggcgttccgtctgtacgagctaaataaagactcagagctgttgattcacgtctttccttgcgtcccagagcggcctgggatgccgtgccccggagaggacaaaagtatttataggcgcggagcccgaagatggagaaaactttattgcgcgaatggacacacgttccaggctaaaagattcaatagacgcgcccactgcgccatttgcacagatcgaatctggggccttggccggcaggggtacaaatgtatcaactgcaaactcttggttcataagaaatgccacaaactagtgaccatcgagtgcggtcggcactctctgccccaggagccagtcatgcctatggaccaaagctccatgcatagtgaccacgcacagaccgtaatcccttataatccgtcaagccatgaaagcctagaccaggttggagaggagaaggaggcaatgaacactcgcgagagcgggaaggcctcctcgtcactgggcttacaggactttgacctcctcagagtgatcgggagagggtcttatgccaaggttctcctggtgcgactgaagaagaccgatagaatctatgcaatgaaagtggtaaagaaggagctggtgaacgatgatgaagatatagactgggtgcagactgaaaagcatgtttttgagcaggcttccaaccacccattcctagtcggtttgcactcctgttttcagacagagtctcgcttattttttgtgatcgagtacgtcaacgggggcgatctcatgtttcacatgcagcgtcagcgtaagcttccagaagagcacgccagattctacagcgctgagattagtctggctctcaactatcttcatgaaagggggatcatctatagagaccttaagctggacaacgtgctcctggactctgaaggccatattaagctgacagattatggtatgtgcaaggaaggactgcgtcccggtgataccacgagtacattttgtggcactcctaactatatcgctccggaaatactacgaggcgaggactacggtttctccgttgactggtgggctcttggagtgctcatgttcgagatgatggcaggccgctctccattcgacatcgtgggttccagtgataaccccgatcagaatacagaggactacctcttccaagtgatactagaaaagcaaatacgcatcccccgatcgctgagcgtaaaagccgcttccgtgctgaagtccttcctgaacaaagacccgaaggagcggctcgggtgtcatccgcagacaggattcgctgatattcagggacatccattcttccggaatgtcgattgggacatgatggagcagaagcaagtggtacctccttttaagccaaatatctcaggcgagttcggcttggacaattttgattctcaattcactaacgaacccgtgcaactgacaccggatgatgatgacatagtgcggaaaatcgatcaatccgaatttgaggggttcgagtacattaatccactgctcatgagcgcagaggaatgcgtgtag

SEQ ID NO: 130527 - DNA, 2121 bp, synthetic construct
  misc_feature 1..2121: note = Description of Artificial Sequence: Synthetic coding sequence
  source 1..2121: mol_type = other DNA
atgtcacctttcctgaggattggcctgtcgaatttcgactgcggctcctgtcagagttgtcaaggtgaagcagtgaacccttactgcgcggtgctggtgaaagagtacgtggaaagtgagaatggacagatgtatatacagaagaagcccaccatgtatcccccctgggattcgactttcgacgcacacatcaacaaaggccgggttatgcaaatcatcgttaaaggaaaaaacgtggacctaataagtgagacaactgtggaattgtatagcttagctgaacgttgcaggaagaataacggtaaaacagaaatctggctggaactgaaacctcaaggcaggatgctgatgaatgcccgatattttctggagatgtccgatacgaaagatatgaatgaattcgaaacagagggcttctttgcactgcaccagcggcgcggcgccattaaacaagcaaaggttcatcacgtcaagtgtcatgagttcactgccacattttttccacagcccactttctgcagtgtctgccacgaattcgtctggggcctcaataagcagggatatcaatgccgacagtgtaatgccgccatacataagaagtgcattgataaggttatcgctaaatgcaccggaagtgctattaattctagagagactatgttccacaaggagcgcttcaagatagatatgccgcatcgattcaaggtgtacaactacaaaagtccaactttttgtgagcactgcgggaccttgctgtggggcctcgcccgccagggcttgaagtgcgatgcatgcgggatgaatgtgcaccatagatgccagacaaaagttgccaacctctgtggcattaaccagaagctgatggccgaagcactggccatgattgagtccacccagcaagcacgatgcctgcgggacacagagcagatctttcgggaggggcccgttgaaatcgggcttccttgcagcatcaagaacgaggcacgacccccctgcttacccacccctggaaagcgggagccccagggaatctcatgggagtctccccttgacgaggtggacaagatgtgtcaccttcctgagccagagctgaataaggaacggcccagtctgcaaattaaactgaagatcgaagactttattctccataagatgctaggcaaggggagctttggaaaggtttttcttgccgagttcaaaaaaacgaatcagttctttgccattaaggccctgaaaaaagacgtggttctgatggatgatgatgttgagtgtactatggttgaaaaaagggttctgtctctagcctgggagcacccctttctcactcatatgttctgcacgtttcagaccaaggaaaaccttttctttgtgatggagtacctaaacggcggtgatctgatgtatcatattcaatcatgccataaattcgacttgtcccgagctacattttacgccgcagagattattttgggtcttcagttccttcactctaagggcatcgtgtatagggacttgaaactggataacattctgctcgataaggacggccacataaaaatcgccgacttcggtatgtgcaaagagaatatgctgggcgacgccaaaactaacaccttctgcggcactcccgactacatcgccccagaaattctattaggccagaagtataatcactcggtagactggtggtccttcggcgtgctgttgtacgagatgttgattggacaaagccccttccatggccaggatgaagaagagctcttccacagcatccgtatggataatcccttttatccgaggtggcttgagaaagaagctaaagatctgcttgtcaagctgtttgttcgtgagcctgaaaaacgcctgggcgtgcgtggtgacatcagacagcaccccctctttagagaaataaattgggaggaactcgaaaggaaagaaatcgaccctcctttcaggccaaaggtcaaaagtccattcgactgtagcaatttcgataaggaatttctgaacgaaaagcctcgcctgagtttcgctgatagagcgcttattaattccatggaccaaaacatgttccgaaacttcagtttcatgaatcctgggatggagaggttgatcagctag

SEQ ID NO: 130528 - DNA, 1932 bp, synthetic construct
  misc_feature 1..1932: note = Description of Artificial Sequence: Synthetic coding sequence
  source 1..1932: mol_type = other DNA
atgagccctttcttacgcattggcctaagcaacttcgactgcggtagttgccagtcctgccagggcgaagccgtgaacccgtactgcgcagtgctggttaaggagtatgttgaaagcgaaaatggacaaatgtacatccagaagaagcctacaatgtatccgccatgggactctacattcgacgcccacataaacaaaggccgggttatgcagattatagtgaagggcaagaacgtcgatctgatctctgagactacggtggagctatattcactagcggagcgctgccgcaagaacaatggcaaaaccgaaatatggcttgaactgaagccacagggccgcatgctgatgaatgccagatacttcctggagatgtctgatactaaagatatgaacgagttcgaaaccgaaggattctttgcgctgcatcagagaagaggagcaatcaagcaggccaaagtgcaccatgtaaaatgccacgaattcaccgccaccttttttccgcagcccacgttctgttccgtgtgtcatgagtttgtgtggggtcttaataaacaagggtaccagtgcaggcagtgcaatgccgcaattcacaagaagtgcattgataaagtcatcgccaaatgcacaggaagtgcgatcaactctagagaaaccatgttccataaggagagatttaaaatcgacatgccacatcgctttaaagtctacaattataagagcccgacattctgtgagcactgtgggacattactgtggggattggcaagacagggacttaaatgcgacgcctgcggtatgaatgtgcatcatagatgccagacaaaagtcgcaaatttgtgcgggataaatcaaaaattgatggccgaagcgctcgccatgatcgaatctacacagcaagctcgatgcctgcgagacactgagcaaatctttcgggaaggccctgtggagattggccttccttgcagtatcaagaatgaagcaagaccgccctgtctgccgacgccagggaagagggagccgcaaggcatatcctgggaaagtcccttggacgaagtggataagatgtgccacctccctgaaccagaacttaataaggaacgcccctctctgcaaatcaagctcaagatagaggatttcattttgcataagatgctcgggaaaggcagcttcggaaaggtctttctggccgaattcaaaaagacgaatcaattcttcgccatcaaggctttgaagaaggatgtggtgttgatggacgatgacgtcgagtgcactatggtggaaaagcgcgtcctgtcattggcttgggaacatccattcctgactcacatgttttgcacctttcagacgaaggagaacctgttctttgtgatggagtacctgaatggtggggatcttatgtaccacatacaaagctgccataagttcgacctatctcgggcaacattttatgctgccgaaattatcctcggactgcaattcctgcactcaaaagggattgtgtaccgagatttgaagctcgacaacattctgttggataaagacggccacattaagatcgcagatttcgggatgtgtaaagagaacatgctgggggatgccaaaaccaatactttctgcgggacccctgactacatagcacccgagctctttgtcagagagccggaaaaacgactgggcgtgcggggagacattcggcagcacccactttttcgtgaaatcaattgggaagagctcgagcgtaaagaaatcgaccctcctttcagacctaaggtgaagtctcccttcgactgctcaaatttcgataaggaatttctcaacgagaagcctaggctgagcttcgctgatagagctctgataaattccatggaccagaatatgtttcgcaacttctcgttcatgaatccaggcatggagaggctaattagttag

SEQ ID NO: 130529 - DNA, 1440 bp, synthetic construct
  misc_feature 1..1440: note = Description of Artificial Sequence: Synthetic coding sequence
  source 1..1440: mol_type = other DNA
tgactgagcttgctgccttgtctgttattcctgcctacgataatccctaaaaagattgtgattcaaagagattctctgccgagcaagaagttgtcgtatggactgattgcctgcgggatgaacgtccatcacaggtgtcagactaaggtggccaacctgtgtggcatcaatcaaaaactgatggctgaagcactcgccatgattgagagcactcaacaagcacgctgtctcagggatacggagcagatatttcgagaaggacccgtggagataggactgccgtgctccatcaagaatgaggctcgcccaccctgcttgcctactcctggcaagcgcgagccacaagggatcagttgggaatctccgttggatgaggtggacaaaatgtgccatcttcccgagcctgagctcaataaagagaggccttccctccagattaaattgaaaatcgaagacttcatcctgcacaagatgctgggaaaagggagcttcggaaaagttttcctggctgagtttaagaagaccaaccagttctttgccatcaaggccctgaaaaaggacgttgttctcatggatgatgatgtagaatgcactatggtggagaagagggtgctctcactagcttgggagcatcccttcttaactcatatgttctgtactttccagactaaagaaaacctattcttcgttatggagtaccttaatggtggcgacctgatgtatcacatccaatcctgccacaaatttgatcttagcagagccactttctatgccgccgaaattatccttggcctgcaatttctgcactccaaagggattgtatatagggatctgaagctcgataacatcctgcttgacaaggacggtcacattaaaatcgccgattttgggatgtgtaaagagaacatgctgggtgacgccaagaccaacaccttttgtggtacacccgactacatcgcccccgaaatcttgctcggccagaagtacaatcactcagtggattggtggagcttcggcgtccttctgtatgagatgctgatcggtcagtcaccttttcacggccaggatgaggaagaactgtttcattccattcggatggataacccattctacccaagatggctcgaaaaagaggctaaagatctccttgttaagctattcgtgcgtgagccggagaaacgcttaggcgtccggggagacatccgacagcaccctctattcagagaaattaattgggaagagttggagcggaaagaaattgaccctcccttccggccgaaagtgaagtcacccttcgattgcagtaatttcgacaaggaatttctgaacgaaaagccccgcctgtccttcgccgatcgggcgctgataaatagtatggaccagaacatgtttaggaatttttcctttatgaaccctggcatggaacggctgatctcctag

SEQ ID NO: 130530 - DNA, 1746 bp, synthetic construct
  misc_feature 1..1746: note = Description of Artificial Sequence: Synthetic coding sequence
  source 1..1746: mol_type = other DNA
atggataccaaggacatgaatgagttcgagactgagggtttcttcgcccttcatcaacgccgaggcgcaataaaacaagctaaagtgcaccatgttaaatgccatgaatttacagcaaccttttttcctcaaccaactttttgtagcgtgtgccatgaatttgtctggggcctgaataagcaaggctaccagtgcaggcaatgcaatgccgctatccataaaaagtgtatcgacaaggtgatagctaagtgtactggctcagcaatcaactctcgagagaccatgttccacaaagagcggtttaaaatcgacatgccgcaccggtttaaggtgtacaactacaaaagtcccaccttctgcgaacactgtgggaccctattatggggattggccaggcagggcctaaagtgtgatgcttgcgggatgaacgtgcatcatcgttgccagactaaggtcgctaacctctgtgggattaaccaaaaactgatggccgaggctttggccatgatagagagtacccagcaggcccgctgtctcagagacacagaacagatatttcgggagggtccagtcgagatcggcctcccatgttccattaaaaacgaggcaaggcccccttgtctcccgactccaggtaagcgagagccccaaggaatctcctgggagtcaccgcttgatgaggttgacaaaatgtgccacctgcccgagcctgagcttaacaaggagcggcctagcttgcagatcaaattaaaaatcgaggattttatcttacataaaatgctggggaagggctcatttgggaaagtattcctggcagagtttaagaagacgaatcagttcttcgctatcaaagcattgaaaaaagacgtggttttgatggatgacgacgttgaatgcacaatggtagagaaacgtgtgctgagcctcgcctgggaacacccgtttctgacacatatgttttgcaccttccagaccaaggaaaacttattttttgtaatggaatatttgaatggtggagatctgatgtaccacattcagtcttgccataaattcgatttgtcacgagctacattttatgctgccgaaatcatcctgggactccagtttcttcactctaaagggattgtatatcgggatctgaagcttgacaacattctcttggacaaagacgggcacataaagatcgctgacttcggaatgtgcaaggaaaatatgcttggagatgctaaaacaaataccttctgcggcacccctgactatatagctccggagatattactaggccaaaaatataaccactccgtagactggtggagtttcggcgttctcctctatgagatgctcattggccagagtccattccatggccaggatgaggaggaactctttcattcaataagaatggacaatcctttctacccaaggtggctagagaaagaggccaaggatctgctggtgaagctgttcgttcgagagcccgagaaaagacttggggtgaggggcgatatccggcaacacccactctttcgcgagatcaactgggaggagctggaaagaaaggagatcgatcctccttttcgcccaaaagtcaagagccctttcgattgtagcaacttcgataaggaatttctgaatgaaaaacctagattgagcttcgcggacagggctttaattaattctatggatcagaacatgttccgcaactttagcttcatgaaccccggcatggagaggctgatttcctag

SEQ ID NO: 130531 - DNA, 1032 bp, synthetic construct
  misc_feature 1..1032: note = Description of Artificial Sequence: Synthetic coding sequence
  source 1..1032: mol_type = other DNA
atggcaagcaacagcagcgatgtgaaggaattcctagccaaggctaaggaagactttctcaagaagtgggagagcccagctcaaaataccgcacacctggaccagttcgagagaattaagacactaggcaccggaagctttggccgtgtgatgttggttaagcataaagaaacgggcaatcactatgctatgaagattttggataagcagaaggtggtgaagcttaaacaaatcgagcacaccctgaatgagaagcgcatattgcaggccgtgaatttccccttcctggtgaaactcgagttttccttcaaggataacagcaatctctacatggtcatggaatatgtcccggggggggaaatgtttagccacctgcgtcggattgggcggttcagtgagcctcatgcgaggttctacgccgcgcaaattgtgcttacattcgaatatctccattcattggacctgatctatagggatctaaagcctgagaatctgctcatagatcagcaagggtacatccaggtgaccgattttggctttgccaaacgggtgaagggacgaacatggacattatgtggcacccccgagtatctggctcctgagataatattgtctaagggctataacaaggccgtcgactggtgggccctgggcgtgttgatctatgaaatggccgccgggtatccacctttctttgcggaccagcccattcagatttacgagaagatcgtctcgggtaaagtccggttcccctctcatttcagtagtgatttgaaagacctgctgcgaaatctgttgcaggtagatctaacaaagcgatttggtaatctgaaaaatggagttaacgatataaaaaatcacaagtggttcgctacaacggattggatcgccatttaccaaagaaaggtcgaggcccctttcattccgaaattcaaagggcccggagacacgagcaactttgatgattacgaagaagaggagattcgggtgagtataaatgaaaaatgcgggaaggaattttccgagttttag

SEQ ID NO: 130532 - DNA, 1146 bp, synthetic construct
  misc_feature 1..1146: note = Description of Artificial Sequence: Synthetic coding sequence
  source 1..1146: mol_type = other DNA
atggaaagcggcagcaccgcagcttctgaagaggcccgatccctgagggagtgcgagctctacgtgcagaagcataacatccaggctttactcaaagatagcatcgttcagctctgcaccgcacggcccgaaagaccaatggcatttcttagggaatatttcgagagactagaaaaagaggaagctaagcaaatccaaaatttacagaaggctggtacacggaccgactcacgagaggatgagatatcccccccaccacccaaccccgtggtgaaggggaggaggagacggggcgccatctctgctgaggtatatacagaggaagatgctgcttcgtatgttcggaaagtgatcccgaaagattacaagacgatggcggcgctggctaaggctatcgaaaagaacgtcctgttcagccacctggatgacaacgagcggtcggatattttcgatgctatgttctcagttagctttattgcaggcgagacagtgatacagcaaggggatgaaggcgataatttctatgtgatcgaccagggtgagacagacgtctatgtgaataacgaatgggcgacctccgttggagaggggggaagcttcggcgagctcgccctgatctacggcacaccccgtgctgctacagttaaggctaaaacaaacgtcaaactgtgggggatcgaccgggattcttatagacggatcctgatgggatctaccctcaggaaaagaaaaatgtacgaagagtttctgtccaaagttagcatcttggagtccctcgataaatgggagcgcctcaccgtggctgacgcactggaacccgttcaattcgaagatgggcagaagatcgttgtgcagggagagcctggcgacgaattttttataattctggagggtagcgcagccgttctacagagaaggagcgaaaacgaggagttcgtggaggtggggcggttagggccctcagattacttcggggaaattgccctcctcatgaataggcctcgggccgccaccgtagtggcaagaggtccgctgaaatgtgttaagctggacaggccaagattcgagagggttttgggtccctgcagcgacatcctgaaaaggaatatccagcaatataactcgtttgtcagcttaagcgtgtag

SEQ ID NO: 130533 - DNA, 2739 bp, synthetic construct
  misc_feature 1..2739: note = Description of Artificial Sequence: Synthetic coding sequence
  source 1..2739: mol_type = other DNA
atgtcggccccccctgtcctgcgacctccctcccctcttctgcccgttgccgctgccgcagcggcggctgctgcagccctggtcccaggatccgggccgggtcccgccccttttctggcgcctgtggctgcccctgtgggggggatttctttccacctccagatcggactgtctcgagaacctgtgcttctgctgcaggactcatcaggggattattctctcgcccacgtccgggagatggcatgtagcattgtagaccagaagttccccgagtgcggcttctacgggatgtacgataagattctgctgtttcggcacgacccaacaagcgagaatatcttgcagctggttaaagccgcaagcgacatccaagaaggggacctgatagaagtcgtccttagcgcctccgctacattcgaagacttccagattagaccacacgccctgtttgtgcatagctatcgagcccctgcattctgcgatcattgcggcgagatgctttggggcttagttcggcagggcctaaaatgtgaagggtgtggcctgaactatcacaagagatgcgccttcaagatccccaataactgttccggcgtgaggagaagaagactgagtaacgtctctctgactggcgtaagtaccatccgaacaagctcagccgaattgtcaacatctgcacccgacgagccgctcctacagaaatcaccatccgagtcttttattggaagggagaaacggtcaaactcccagagctatataggcaggccaatccaccttgataaaatactgatgagcaaggttaaggtgccgcacacattcgtaattcacagttatacacgtcctaccgtctgtcagtattgtaaaaagctcttgaaagggttattcagacaaggcctccagtgcaaagactgtcgcttcaactgtcacaaaagatgcgcacccaaagttcccaataattgtctaggcgaagtgactatcaacggggatcttctgagccctggtgcagaaagcgatgtggtgatggaagagggcagtgacgataatgactccgaacgtaactcaggactgatggacgacatggaggaggcaatggtgcaggatgccgaaatggctatggctgagtgccagaacgattcaggagagatgcaggaccccgaccctgaccatgaagacgccaacaggactatctcacctagcacctcaaacaacatcccgttaatgagagtggtccagagtgtaaaacataccaaaagaaaatctagtaccgtgatgaaagagggatggatggtgcattacacatccaaggataccctccggaagcgccactactggcggctggacagtaagtgtattacactttttcagaacgacaccggctcccgctattataaggaaattccactgtccgaaattctcagcctagagcctgtaaaaacgtctgctctgattcccaatggtgcaaatccacattgcttcgaaattaccacagccaacgtagtctactacgtgggggagaatgtggtaaacccctcttctcctagtccaaacaatagcgtgctaacatccggtgtcggggctgatgttgcgcgcatgtgggaaatagccatacagcatgcccttatgcccgtaatccccaaggggagctcagtcggaaccggaaccaatcttcaccgggatatcagtgtctccatctctgtttctaactgtcagattcaggaaaacgtagatatctctaccgtgtaccagattttcccagatgaagtcctaggttccggccagtttggaatcgtgtacggcggaaagcacagaaaaacaggccgcgacgtcgcaatcaagattatcgacaaattgcgcttcccgacaaaacaggagtctcagctcaggaatgaggttgcaatcttgcagaatctccatcaccccggggtggttaatctggagtgcatgtttgagacgccagaacgcgtgtttgttgtgatggagaagttacatggtgatatgttagagatgattctgtcatctgagaagggcaggctgcccgagcacattaccaagttcctgattacccaaatcttagtggctctccgccacttacatttcaagaacatcgtgcactgtgacctaaaacctgaaaatgttctactggcttctgctgatccattcccccaggtgaaactctgtgatttcgggtttgctcgtataatcggggaaaagagttttcgacggtcagtcgtcggcaccccagcgtatctggccccagaggtgctcagaaataaaggctataataggagcttggatatgtggtcagtgggcgttattatctatgtgtctctgtctggaacatttccctttaatgaggacgaggatattcacgaccaaatccagaatgccgccttcatgtatccacctaacccctggaaggagatcagtcacgaggccatcgatctgatcaacaacctgctgcaagtgaaaatgcgcaaaaggtactccgttgacaagacactctcccatccttggctccaggactaccaaacctggctcgacctgcgggagctggaatgcaagatcggcgagcggtatatcacgcacgaatcggacgatctgcgctgggagaaatacgctggcgaacagggccttcaatatccaacccacctcatcaaccctagcgcttctcacagcgatacaccagaaaccgaagagacagagatgaaagccttaggagaacgagtctcaatcttgtag

SEQ ID NO: 130534 - DNA, 2637 bp, synthetic construct
  misc_feature 1..2637: note = Description of Artificial Sequence: Synthetic coding sequence
  source 1..2637: mol_type = other DNA
atggcaacggctcccagctatcctgccggattacccggcagccccggcccagggtccccgccccccccaggcgggctcgagctgcagtcccctccacctctcctgccgcagatccccgctcctggcagcggcgtaagcttccatattcagattgggctgacccgtgaattcgtcctcctgcctgcagccagcgagctggctcatgtgaagcagctcgcatgtagcattgttgatcaaaagtttcccgagtgcggcttctatggcctgtatgataagattttgctatttaagcacgatcctacttcggcaaatttgcttcagttagtgagatccagtggcgacatacaggagggcgacttggtcgaggtggtcttgtcagcgagcgctacgtttgaggatttccaaatccggcctcacgcactaactgtgcatagctatcgggctccggcattttgtgaccactgcggcgaaatgcttttcgggctcgtccgacagggcttgaaatgcgatggatgcggactgaactatcataagaggtgcgctttctccataccaaacaactgcagcggggcaaggaagcgccgactttcttcgacaagcttagcctccggccattccgtgagacttggtacgtccgagtcactgccctgtactgccgaggagttaagtcgtagcactaccgagctgctccccagaaggcccccttctagcagttcttcgtcctctgcctccagctacaccggaagaccgattgagctggacaaaatgctgttgtccaaggtcaaggtcccacatacctttctcatccactcgtacactagacctaccgtgtgccaggcctgtaaaaagctgttaaagggtctattcaggcagggcctgcagtgtaaggactgcaaatttaactgtcacaagcgctgcgccacccgggtgcctaacgattgcctgggcgaagcgttgataaacggggatgtgcctatggaggaggcaaccgacttctccgaagcggataagagcgctcttatggacgaatcagaggactctggagtgatccccggtagccattccgaaaacgccctgcacgcaagcgaggaggaggagggtgagggcggtaaggcccagagttctcttggatacattcccctgatgcgtgtcgtgcagagcgtgaggcatacaacccgcaagagctcaaccactctgcgcgagggttgggtagtgcactattctaataaagacaccctgcggaaaaggcactactggaggctagactgcaagtgcataaccctgttccaaaacaacactacaaatcgatactataaggaaatccctttgtccgaaattctcaccgtggaatctgcccagaatttcagcctagtcccccctgggacaaatccccactgctttgagatcgtgacagccaacgccacatactttgtcggagaaatgccgggcggtactccggggggaccctccggacagggagcagaagctgccagaggatgggagacagccatccgacaggcactgatgcccgtgattttacaggacgctccgagcgcccccgggcatgcaccccatcggcaggcatccctgtcaatttcagtttcaaattctcagattcaggaaaatgtggatatcgccactgtctaccagatcttccctgatgaagtactgggttctggtcagtttggcgtggtgtatgggggaaagcacagaaagaccgggagagatgttgcagtgaaggtcatcgacaaactgcggtttcctacaaagcaagaatcccaactgagaaatgaagtcgctattttgcagagccttcgccaccctggtattgttaaccttgagtgtatgttcgaaactcccgaaaaggtatttgttgtaatggagaagctgcacggggacatgcttgagatgattctgagctccgagaagggccggctgccagaacggctcacgaagtttttgataactcagatcctggtggccctccggcacctacattttaagaatattgtgcactgtgatctcaagccggagaacgtgctcttggcatctgcggaccccttcccccaggtgaaactgtgtgatttcggcttcgcacggataattggggaaaagtcgtttaggcggtccgtggtgggtacacccgcctacctggcgcccgaagtgctgctgaaccagggttataatcgttccctagatatgtggagtgtaggtgtcatcatgtatgtttctttgagtggaacatttccttttaacgaggatgaggacatcaatgaccagatacaaaatgctgcctttatgtacccggcctccccttggtcccacatctctgcaggggccattgacctgatcaataacctgctccaagtcaagatgagaaagaggtattccgtggataaatctctttctcacccttggttacaggagtaccagacttggctcgacctacgcgagctggaaggtaagatgggcgagaggtatattacacatgaaagcgatgacgtacgctgggaacagttcgcagccgaacaccctcttcccgggtccggacttccaacggaccgcgacctcggtggcgcctgtccaccccaggaccacgatatgcagggcctggccgagagaatttccgttctatag

SEQ ID NO: 130535 - DNA, 2637 bp, synthetic construct
  misc_feature 1..2637: note = Description of Artificial Sequence: Synthetic coding sequence
  source 1..2637: mol_type = other DNA
atggccaccgctccttcatatcctgcggggctccctggtagcccaggacccgggagcccccctcctcccggaggcctggagctacagtctcccccacctttgctgccgcagattcccgccccgggctctggcgtgtcctttcacatccagattggacttactcgcgaattcgtcctcctccccgcagcctcagaactcgcgcacgttaaacagcttgcctgttccatcgtagatcagaaatttcccgaatgcgggttttatggactgtatgataaaatcctattgttcaagcacgaccctaccagtgcgaacctgttacagctcgtgcgctcctccggcgacattcaggaaggagaccttgttgaagttgtgcttagtgcctcagccaccttcgaggatttccagatcagacctcacgcccttactgttcactcgtatcgcgctcctgcattttgtgaccactgcggcgaaatgctgttcggtttggttcgtcagggcctgaaatgtgatggatgcggtctgaactatcataagcgatgcgctttttccatccctaacaattgtagcggggcgagaaaaaggcgtctctcctccacatcccttgcctctggtcactcggtgcggctggggacctcagaatctctaccttgcaccgcggaggaacttagtcgatcaacaactgaactgctgccaagaagacctccaagcagttcatctagctcctcggcctccagttataccggacggccgattgagctggacaagatgctgctttctaaagttaaagtaccccacactttcctcatccatagctatactcggcccaccgtctgccaggcttgtaagaagctcttgaaaggcttgttccgccagggcctccagtgtaaggattgtaaatttaattgccataagcggtgtgctaccagggtgcccaatgactgtctgggagaggccctgatcaacggcgacgtgccaatggaggaagctaccgacttcagcgaggctgataaaagcgcgctgatggacgaaagcgaggatagcggagtcatcccaggctctcacagtgagaacgccctgcacgccagcgaggaggaggagggggaaggaggaaaggcccagtcctctctgggatacattccccttatgagggtagtgcaaagcgttaggcacaccactaggaagtcaagcactaccttgcgcgaagggtgggtcgtgcattactccaataaggacacactcagaaaaagacactactggcgcctcgattgcaaatgtataactctttttcagaataataccaccaacagatattataaagaaatcccactgagcgagattctgaccgtcgagagtgcccagaatttcagtctggtgccccccggaaccaatccacattgtttcgagattgtcacggccaacgctacgtattttgtgggcgagatgccggggggcacaccggggggccccagcggacagggtgccgaggcagcacgaggctgggaaaccgcaattcgtcaggccctgatgcccgttatattacaggatgcccccagtgctccgggacacgcaccccatcggcaggcctcattgtcgattagcgtgtccaattcacagatacaggagaatgtggacatcgcgaccgtctatcagatatttcctgacgaagtcctgggctcgggccagtttggagtggtatatgggggcaagcaccgcaaaaccggtcgcgatgtagccgtgaaggtcatcgacaaactgaggtttccaaccaagcaggaatctcagctccgcaacgaagtcgccatcctgcagtctttaaggcacccaggcatagtgaacctagaatgcatgttcgaaacccccgagaaagtctttgtggtcatggaaaaactccacggggacatgttagaaatgatcctgtccagcgaaaaaggccgccttcctgaacggctgaccaaatttttaatcacccagatcttagtggcccttaggcatcttcacttcaagaatatagtgcattgcgatctcaaacctgagaacgtgctgctcgccagcgccgaccccttcccacaagtgaagctttgtgacttcgggtttgcccgaataatcggggagaaaagcttccgcagaagtgtggtgggcacccccgcgtatctcgcccctgaggtgctacttaatcagggctataatcggtctctagatatgtggagcgtgggggtaattatgtacgtcagtctaagtggaactttcccttttaacgaggacgaggacatcaacgaccaaatccaaaacgcagcattcatgtacccagcatctccatggtctcatattagcgcaggcgctatcgatcttatcaacaatcttcttcaagtaaagatgaggaagaggtactccgtagataagtccctcagccacccctggctccaggagtaccagacgtggttagatttgcgtgaactggaaggcaagatgggcgaacgctatattacccacgagtctgacgatgtgagatgggaacaatttgcggccgaacatcctctgcccgggagtggcttaccaacggaccgggacctgggaggggcatgccccccacaggaccatgatatgcagggcttggctgagaggatatccgttctctag

SEQ ID NO: 130536 - DNA, 2166 bp, synthetic construct
  misc_feature 1..2166: note = Description of Artificial Sequence: Synthetic coding sequence
  source 1..2166: mol_type = other DNA
atgctgtttggattggtgcggcaggggctgaaatgtgacgggtgcggtctcaattaccataaaaggtgcgcctttagtatcccgaataattgctcaggcgctcggaagaggagattgtcgtctacatccctcgcctcagggcatagcgtgagattaggaacatctgagtcactgccttgtactgctgaggagttgagcaggtccacaacagaattattaccacggagacccccgtcctctagcagttcctcctctgcttcaagctacactggcagacctatcgaactcgacaagatgttgctctctaaggtaaaggtgccccatacttttcttattcactcatacacacgtccaacagtctgtcaggcttgtaagaagctgctgaaaggattattccggcaaggcttgcagtgcaaagactgtaaatttaattgccacaaacgctgcgccacacgagttcctaacgactgcctgggagaggccctgatcaacggagacgtgccaatggaggaagccacagacttctcggaggcagacaagagcgccctgatggatgagtcagaggactccggcgtgatccccggttcccacagcgagaatgcactacatgcttctgaggaagaagagggcgaaggcgggaaggctcaaagctccctgggatacatccctctgatgagggtggtgcagtctgtcaggcacacaactcgcaagtctagcactacactgagggagggctgggtggtccactactccaacaaagatacgttgagaaaacggcattactggcggctcgactgtaagtgtatcaccctgttccaaaacaataccacaaatcgctattacaaggagattcccttgagtgaaatcctaaccgttgagtctgcacagaacttttcattggtgcctccaggcactaatccccactgcttcgaaattgtgacagcgaacgccacgtacttcgtgggcgagatgccagggggaacccccggggggcccagtgggcagggagccgaggctgcacgcggttgggaaactgccattcggcaggctctcatgcccgtgatcctgcaagatgcaccctcggctccagggcacgccccacaccgacaggcaagtctgtctattagtgtgtctaatagtcagatacaggagaacgtggacatcgccacagtgtaccagatctttccagacgaagtccttggatcaggccagttcggggtcgtgtatggcggcaagcacaggaagactggaagggatgttgccgtcaaggtcattgacaagctgcgattccccaccaagcaggagtcccagctgcggaatgaagtagccatcctccagagtcttcgccatcccggtatcgtcaaccttgagtgtatgttcgaaactcctgaaaaggtcttcgtggttatggaaaaattgcacggcgacatgctagaaatgatcttatcctccgagaagggccgtctccccgagcggttaaccaagttcttaatcactcagatcctggtggcgctccgtcacctgcactttaaaaatattgttcactgcgaccttaaaccggagaacgtattgctggccagcgcagatcctttccctcaagttaaactctgcgactttgggttcgcgagaattataggagaaaagtcttttcgacggtctgtcgtgggtaccccggcgtatctggccccggaggtcctcttaaatcagggctacaataggtcactggacatgtggtctgtgggagtgatcatgtacgtgagcctctctggaacctttccttttaatgaggatgaagacattaatgaccagattcagaatgctgcattcatgtacccagcttctccatggtcccacatatccgcaggagcaatagacctcataaataacctcttgcaagttaagatgcgcaaacgttactctgtggacaaaagcctgagccatccctggttgcaggaataccaaacgtggctggatctgagggaacttgaaggtaaaatgggagagcgctacatcactcacgaaagtgatgacgtgaggtgggaacagtttgccgctgaacaccccctgcccggctctggcctccccacagaccgagatctaggtggcgcctgtccccctcaagatcacgacatgcaggggctcgccgagaggatttccgtgctttag

SEQ ID NO: 130537 - DNA, 1482 bp, synthetic construct
  misc_feature 1..1482: note = Description of Artificial Sequence: Synthetic coding sequence
  source 1..1482: mol_type = other DNA
atgagacgacggagggcggcagtagctgccggattctgtgccagttttctccttggcagtgtgctcaacgtcctgttcgctccagggtccgaacctccaaggcctggtcagagccctgaaccctctccggcccctggccctggccggcgcggcgggcggggggaattggcaaggcaaattagggcaagatacgaggaggtgcaaaggtatagccgggggggccccggacctggcgcaggaaggcccgaaagaagacgcctcatggatctggcacccggaggtcccggactgccacggccacgtcccccctgggcacggccactttctgatggggcgcccggctggcctccagcccccgggcctggcagccctggcccggggccaaggttagggtgtgcagctctgcggaacgtcagtggggctcagtatatgggctccgggtatactaaagcagtgtacagagtgcgtctgcccgggggcgctgcagtggcgctcaaagctgtggatttcagcggacatgatttggggtcctgtgtgcgtgagttcggtgttagaaggggatgttatagactagcagcacataagctcctcaaagagatggtgctgctggaacggctgcgtcaccccaatgtgctgcagttatatggttattgttatcaggatagtgaggacatcccggatactttgactaccatcactgaactgggagcacctgtggagatgatccagctgctgcagacctcatgggaggatcgatttaggatttgtttgagtctaggcaggcttctgcaccaccttgcccactcccctctcggttccgtgacactgctggacttccggccgcgtcagtttgtactggtcgacggagaactgaaagtgacagatctcgatgatgctcgggtcgaggagacgccgtgcgcaggaagcacagattgtattctcgagttccccgcaaggaatttcacactgccctgctcagcacaagggtggtgtgagggtatgaatgagaaaagaaatttgtacaacgcctaccggttcttttttacctacctcctgcctcactccgcccctccctcacttcgtccactgctggactccattgtcaacgccactggggagctcgcctggggcgtagatgagacccttgcccagctggaaaaagtacttcacctgtatcggagcggccagtatctgcagaactcaactgcatcctctagcacggaataccagtgcatcccagactcgacaatccctcaggaggattaccgctgttggccctcataccatcatggatcctgtctcctcagcgtgtttaatttggctgaggcagttgatgtctgtgagagccacgcccagtgtcgcgcattcgtggtgactaatcagacaacatggacgggacgacagctggtctttttcaagacaggatggtctcaagtggtgcccgatcctaataagacaacctatgtgaaagcaagcggatag

SEQ ID NO: 130538 - DNA, 2829 bp, synthetic construct
  misc_feature 1..2829: note = Description of Artificial Sequence: Synthetic coding sequence
  source 1..2829: mol_type = other DNA
atggcctccgatgcagtgcaatctgaacctaggtcttggtccctacttgagcagttgggactggccggcgctgatctggccgcccccggcgtgcagcagcagttggaactcgagagggagcgccttcggcgcgagattaggaaagagttaaagctgaaggaaggtgccgagaatctacggagggctacaactgatctcggacggagccttggccccgtcgagctactgctgcgggggagctcaagacggcttgacctgttacaccagcaactacaggagctccacgcccacgtggtcctgcccgaccctgccgctacccacgatggcccccagtccccaggtgccggcgggcccacttgttccgccacaaacctcagtcgagtcgccggcctggaaaaacagttggccatcgaattgaaagtgaagcaaggcgccgaaaatatgatccagacatattccaacggctctactaaggatcggaaacttctgttgaccgctcagcagatgctccaggactctaaaaccaagattgacatcatcaggatgcaactcaggagagcgctgcaggccggtcagctagagaatcaggccgccccagacgatacacaaggctcacctgatcttggcgcagtcgagctgcgcatagaggagctgaggcaccacttccgcgttgaacacgcggtggccgaaggcgccaagaatgtgctgaggctgctgtctgcggcaaaagctcccgaccggaaagcagtgtcagaagctcaggagaagctgactgaatcaaaccagaagttaggtctattgcgggaggctctcgaaaggagattaggagagttgcccgctgaccatccaaaagggcgactgctgagagaagaactggccgcggcaagctctgctgctttctcaactagactggccggcccttttccagcaacgcactattcaaccttatgcaaacctgcaccacttaccggaactttggaggttcgcgtcgtgggatgtcgtgacttgccagagaccatcccatggaacccaactccttcaatgggaggtcccggaacacctgacagtcggccacctttcctgtcccgcccagccagaggcttatactcacggtctggaagcctttcaggaagaagctcacttaaggctgaggcagaaaatacctcagaggtctccactgttttgaagctcgacaacaccgtggttggacaaacatcttggaaaccctgtgggcctaacgcctgggaccaaagctttactcttgaacttgaaagggctcgcgagctggaacttgcggtgttttggcgcgatcaacggggcctgtgcgccttgaagtttctgaagttggaggatttccttgacaatgagagacatgaggtccagttggatatggaaccacaagggtgcttggtggcagaagttacttttcggaatcctgttatagagcggattccccggctgaggcggcaaaagaagattttctcgaagcagcagggaaaagcctttcagcgcgccaggcagatgaacatcgatgtggctacgtgggtgagacttctcaggagattaatccctaacgccacgggaactggtaccttcagtcctggggctagccccggatcagaagccaggactactggggacataagcgtagagaagctgaatctaggaactgattccgatagctccccccagaagtctagcagggaccctccttcctctccgtcaagcctcagttcacctattcaggagtctaccgcccccgagttgcccagtgaaacgcaggagacccccggaccagcactttgctctcccctgcgaaagagccctctgacattggaggacttcaaatttttagctgttttaggccgtggccacttcggcaaagtccttctgagcgaattcaggccgtctggcgaactgtttgccatcaaggcccttaagaagggcgatatcgtggctcgggatgaggtggaatctctcatgtgcgaaaagaggattcttgcggccgtgactagcgccggtcacccattcctggtgaacctgtttggatgcttccaaaccccggaacacgtctgtttcgtaatggagtatagtgctggcggtgacctgatgctgcacattcacagcgatgtatttagcgagcccagagccatcttctattccgcctgcgtggttctgggtctccagtttcttcacgagcataagatcgtgtacagggacttaaaattggataacctgcttttagacactgagggctacgtcaagatagctgacttcggactgtgcaaggagggcatggggtatggcgacaggacctcaaccttctgcggaacccccgagttccttgcgccagaggtgctcacagacacaagttacacacgtgccgtggactggtggggcctcggtgtcctcctctacgagatgctggtgggcgaaagccccttccccggcgatgatgaggaagaagtcttcgattcgatcgtgaacgacgaggtgcgttaccctagattcttgtcagcggaggcaatcgggatcatgcgccgcctcctgcgtcgcaacccagaaagacgactcggaagctcagagagggatgccgaagacgtcaaaaagcagcccttctttagaaccctgggctgggaggctttgctggcaaggaggttgccgcctccttttgtccctactctttctggcaggactgatgtgagtaatttcgatgaggagttcaccggcgaagccccaaccctcagccccccaagagatgccagacctttaacggccgcagaacaagccgctttcctggatttcgactttgtggctggtggttgttag

SEQ ID NO: 130539 - DNA, 2847 bp, synthetic construct
  misc_feature 1..2847: note = Description of Artificial Sequence: Synthetic coding sequence
  source 1..2847: mol_type = other DNA
atggctgaggccaataaccctagtgaacaagagctggaatccgaacctaggtcatggagcttgctcgagcagttggggcttgctggcgctgaccttgctgccccaggagtgcaacagcaacttgagctggaaagggagagactgcgcagggaaatcagaaaagagctgaagcttaaggagggtgccgagaacctccggcgagccaccacggatctagggagatctctggggcctgtcgagctgttgctgcgcggatccagtagacgcctcgacttgttacatcagcagctgcaggagttacatgcacatgtggtacttcccgacccagcagcgacgcacgatggacctcagtcacctggcgctgggggccctacctgctccgctaccaacttatccagggtagccggactcgaaaagcagctggccatagaactaaaggttaagcagggagcggagaatatgattcaaacctattccaatggatcgactaaggatcgaaaactccttcttaccgcccagcagatgctgcaggacagcaagacaaaaatcgatatcatccgaatgcagcttcgccgagctctgcaagcaggccagctggaaaaccaggccgcaccagatgacacgcaaggctctcctgacctgggggccgtcgaactgaggattgaagagctgcgccaccatttcagagtagagcatgcagttgctgagggagccaaaaatgtgctcaggctgttatcagctgccaaggcccccgatagaaaggcggtgagtgaagcccaggagaagcttacagagtcgaatcaaaagctcggactgttgagagaggccctcgaaaggagactaggagagctgcccgctgaccatccaaagggcagactgctgcgggaagaattagctgctgcctcatctgcagctttctcaactaggctggccggccctttccccgctacccattattcaactctgtgtaagcccgctcctttaactgggaccttggaggtcagagtggtgggttgtcgggatctgccagaaacaattccatggaatccaacaccatcaatggggggcccagggactcccgactctaggcccccgttcctcagtaggcccgcaaggggcctttatagccggtctggttccctgtccggtaggtcttcgctgaaggcggaagccgagaatacgtcggaagtgtccacagtgcttaagctggataacaccgtggtgggacagaccagttggaagccgtgtgggcctaacgcctgggatcagagttttaccctggagctggagagagcaagagagcttgagctcgcggtgttctggcgggatcaaagaggactgtgtgcactaaaatttctgaagctggaggattttctggataatgaacgccatgaagtgcagctggatatggaaccgcaagggtgcttagtcgcggaagtcaccttcaggaatccagtgattgaaagaatcccgcgcctccgccggcagaaaaagatcttctctaagcagcaaggcaaggcattccaaagggctagacagatgaatatcgatgtggcaacatgggtccgtttgctgcgccggctgatcccaaatgccactggaacaggcacctttagtccaggcgcctctcccgggtcagaggcacggactactggagatatctccgttgagaagctcaatctggggactgatagtgacagtagtccgcagaaatctagccgtgatccacccagctctccgtcgtctctgagctcaccgattcaagagtcgactgctcctgagctaccgtccgagactcaggagacccccggaccagcattgtgttcacctctgaggaaaagcccccttacattagaggatttcaagttcctggccgtactggggcgtggacacttcgggaaggtcctactgtctgaatttcgcccttcaggggagctcttcgccatcaaagctctaaaaaaaggcgatattgtcgctagagatgaagtggagagcctgatgtgtgaaaagcgcatcctcgccgctgtgacaagcgctgggcatccgtttctcgtcaacctgtttggttgttttcagactccagaacatgtctgcttcgtgatggaatattcggcaggtggcgatctgatgctccacattcatagtgacgttttctcagagcctcgggccatcttttactcagcctgcgtggtgctcggactccagttcttgcacgaacacaagatcgtttatcgggatttaaagttggataatctgctgctcgacacagaggggtatgtcaaaatcgcggactttggcctatgcaaggagggaatgggctacggagaccggacgagcaccttctgcggcactcctgagttcctggcccctgaagttttgacagacacaagttacacccgtgctgtcgattggtggggccttggggtcctgctgtacgaaatgctggtgggtgagtccccctttcccggcgatgacgaagaagaagtgttcgatagcatagtcaatgacgaggttaggtacccacgctttctttcggccgaggccatcggaatcatgcgaaggctactcagaaggaaccctgagcgcagacttggatctagcgaaagggatgccgaggacgtcaaaaaacagcctttttttagaacccttggctgggaggcccttttggcccgcaggttgccacctcccttcgtccccaccctgagcggcaggaccgacgtgtcaaacttcgacgaggaatttaccggagaagcccccacattgtccccgccgcgagacgctcgccctctgaccgctgccgagcaggccgcattcctggatttcgactttgtggccgggggttgctag

SEQ ID NO: 130540 - DNA, 1815 bp, synthetic construct
  misc_feature 1..1815: note = Description of Artificial Sequence: Synthetic coding sequence
  source 1..1815: mol_type = other DNA
atggcctccaatccggagagaggggagatcctccttaccgaattgcaaggtgactctcgttccttgcccttcagcgagaacgtgtcagctgttcagaaactggactttagtgataccatggtacagcagaagttagatgatatcaaagacagaatcaagcgcgagatcagaaaggaactcaaaatcaaagagggtgcggagaatcttcggaaggtgacgactgataaaaaatcccttgcctacgtggataacattctgaagaagagcaataagaaactcgaggagctgcatcacaaactccaggagctaaatgcacacatcgtcgtgagtgaccccgaggacatcactgactgtcctagaacgccggatactcccaacaatgatcctagatgctcgacctccaacaaccggttgaaggcgttgcagaagcagctcgacatcgaactcaaagtgaaacagggcgcagagaacatgattcagatgtacagcaacggatcaagtaaagatcgcaagctgcatggtacggcccagcagttgcttcaggacagcaagaccaaaattgaggtcatccggatgcagatcttgcaggcagttcagactaatgagctcgctttcgataacgccaagccggtcatctctccactcgagttgagaatggaggaactgaggcatcacttccgaatcgagtttgccgtggccgagggcgctaaaaacgtgatgaagctgctcggtagcggtaaagttaccgatcgtaaggccctgtcggaagcacaggcccggttcaatgagagctctcagaaattggatctcctcaagtactccttggagcaaaggctaaatgaagttcccaaaaatcaccccaaatcccggattataatcgaagaactgtcactagtcgccgcttcacctaccctgagtcctcggcagtctatgattagcactcagaatcagtactcgaccttgagcaagcctgctgcactaaccggaactctggaggttagactaatgggctgccaggatattctggagaacgttcccgggcggtcaaaggccacttcagtggcattacccgggtggtcgccctccgaaactaggtcctcatttatgagccggacttccaagtctaagtccggatctagtagaaatttgttgaagactgacgatctcagtaacgacgtgtgcgcggtgctaaaactggacaacacagtcgtgggacagacctcttggaagcccatttccaaccagagctgggatcaaaagttcacactagaactggacaggagcagagaactcgaaatctcggtttattggagagattggaggagcctctgcgccgtcaaattcttgcggctggaagattttctcgacaatcaacgacacgggatgtgcctatatctcgaacctcaaggcacacttttcgctgaggtgactttcttcaatcccgtgatcgagagacgaccaaaactccagagacaaaaaaagattttctccaaacagcagggtaaaaccttccttcgggcgcctcagatgaatatcaacatagcgacgtgggggcgcttggtcaggagggccattccgactgtgaatcattccggaacatttagtcctcaggccccagtccctacgactgtgcctgtcgtggacgtccgcataccacagcttgcaccacctgcccgttacgtttccgaaattctgtccatctcctatacgaaactgttaggtcattcatacgtgctgatcatcgccggagtcctgtcattggctttcttcccgtcttcaatcctgaaggtcgtgttttgtctcctgaaaaagtag

SEQ ID NO: 130541 - DNA, 2484 bp, synthetic construct
  misc_feature 1..2484: note = Description of Artificial Sequence: Synthetic coding sequence
  source 1..2484: mol_type = other DNA
atgatccaaatgtattccaatggcagcagtaaggaccgcaagcttcatggcaccgctcaacagttactgcaagacagcaagactaagatcgaggttattagaatgcagattctacaggcggttcagaccaatgaactggctttcgacaatgcgaagcccgtgattagtccacttgagcttagaatggaagaactacggcatcattttcggatagaatttgccgtggccgaaggagcaaagaacgtaatgaagctccttggctcagggaaagtgaccgaccgcaaggctttgtctgaggctcaggctaggttcaacgagagctctcaaaagctggacctccttaaatacagcctcgagcagagactcaatgaggtgccgaaaaatcacccaaaatctcgaataattattgaggagctttcactcgtggccgcatctccaactctgtctcccaggcagagcatgatctccactcaaaaccagtacagtacactgtccaagccggccgctctgaccggaaccctcgaggttcgactgatggggtgccaggacattctggagaatgttccagggcgaagcaaggccactagcgtcgcattgcccggttggtccccttcagagactaggtcctccttcatgtctcgtacctctaagagtaaatccggctcctcgagaaatctgctaaagaccgacgatttatcgaacgacgtgtgcgccgtcctgaagctggataacacagtagtgggacaaaccagttggaaaccgatctccaaccaaagttgggaccagaaattcaccttggaactggatagatcccgagagttggaaatcagcgtgtactggagagactggcgcagtttatgtgccgtgaaattccttcgcttggaggacttcctcgacaaccaaaggcacggtatgtgtctgtacttggagccccagggcaccctctttgccgaagttacctttttcaaccctgtgattgaaaggagaccaaagctccagcgccaaaagaaaatctttagtaaacaacagggtaagacattcttgcgcgcccctcagatgaatattaatatcgcaacttgggggaggctagttagacgggccattccaaccgtcaaccactcaggcactttcagcccccaggcaccagtgccaaccactgtccctgtggtcgacgttcgcatcccccagctggcacccccagcgagtgattccacagtcactaagctcgactttgatctcgagccagaacctccaccagctcctcccagggcttctagcctgggcgagattgacgagtctagtgaattgcgggttctggatattccagggcaggattcagaaacagtgtttgatatacagaatgacaggaattccattctgcctaaaagccagagcgagtacaagcctgacacccctcaatcaggcctggagtactcgggcattcaggaactcgaggaccggagatctcagcagcgttttcagttcaatttacaggacttcaggtgttgcgctgtgctgggtcgcgggcatttcggcaaggtgctgttggctgaatacaagaacaccaatgaaatgtttgcaatcaaagcactgaagaaaggtgatatagtggctcgggatgaggttgacagtcttatgtgcgaaaagcgcatttttgaaaccgttaattctgttcgccatccgttcctcgtgaacctgttcgcttgcttccaaactaaggagcatgtgtgcttcgtaatggagtacgctgctggcggagatctgatgatgcacatccatacggatgtgttctccgagccgagggccgttttctatgcagcatgcgtggtgctgggacttcagtatctgcatgaacataaaatcgtctatcgcgacctaaagcttgataacttactgctggacaccgagggatttgttaaaatcgccgattttgggctgtgtaaagaagggatggggtatggtgaccgcacctcaacgttctgtggcacacctgaattcttagcccccgaagtactgaccgaaaccagctacactcgagccgtagactggtggggcctgggggttctcatatatgaaatgctggtgggcgagtcaccatttcccggggatgacgaggaggaggttttcgacagcatcgtcaatgacgaggtgagataccctagattcctctccactgaggcaatttcaataatgaggagactactccgaaggaaccctgaacggaggctgggcgctagtgagaaggatgccgaggacgttaagaagcatcctttctttaggctaattgactggagtgctttaatggataaaaaggtgaaacccccattcattcccacaatccggggcagagaggacgtgagcaacttcgatgacgaattcacaagcgaagcacctattctcactccccctcgggagcccaggatattgtccgaagaggagcaggagatgttccgagacttcgactacatcgccgattggtgctag

SEQ ID NO: 130542 - DNA, 2811 bp, synthetic construct
  misc_feature 1..2811: note = Description of Artificial Sequence: Synthetic coding sequence
  source 1..2811: mol_type = other DNA
atggcttctaatcccgagcgaggcgaaattctcctgacggagcttcaaggagatagtaggtctcttccattttcagagaacgtctccgcggtgcaaaaacttgacttcagcgatactatggtccaacagaagttggatgatattaaggacagaattaagagggaaattaggaaagaactcaagattaaggagggtgcagagaacttacggaaggtaacgacagataagaagagcctggcgtatgttgacaacattctgaaaaagtcgaataaaaagctggaggaacttcatcataaattacaggaactgaacgctcacatagtggtaagcgaccctgaagatatcactgactgccctaggactcccgataccccaaacaatgacccgcggtgcagtacctccaataatcgcctgaaggccctacagaaacagctggacatcgagctgaaagtcaagcagggcgctgaaaatatgatccagatgtacagtaacgggtcttccaaggatcgaaagctacatggaactgcacagcagcttctgcaggactcaaaaactaaaattgaggtaatcagaatgcagatactgcaagcggttcagaccaatgagttggctttcgataacgctaaaccagtcatatcacctttggaactgcggatggaggagttgcggcaccacttcagaattgagttcgcggtggcggagggcgccaagaacgtgatgaaactacttggtagcggaaaagtgaccgaccggaaagcgctgtccgaggcacaggctcgatttaatgagagctcgcaaaagctcgatttattgaaatatagtcttgagcagaggctgaatgaagtgccgaaaaaccacccgaagtcacgtatcataatagaagagctgtcgttggttgccgcttcccccactctttcccccagacagtccatgatttctacccagaatcaatattccacactgtctaaacctgcggctctgaccggtacgctggaagtcaggctgatggggtgtcaggacatcctggagaacgtgcccgggaggtctaaagccacgtcggtcgccctgcccggctggtctccctccgagactaggagcagctttatgagtcgaacctccaaatctaaatctggatcctcaaggaacctgctgaaaacggacgatctttcaaacgacgtgtgcgcagtgctgaagctggacaacacagtggtcgggcagacgtcttggaagccgatttctaaccagagttgggatcagaaattcactctggagttggaccgcgtcactttttttaatccagtgattgaaagacggccaaagctccagagacaaaagaaaatattttcaaaacagcaggggaaaacattcctgagggctccacagatgaacatcaatatcgctacatggggtaggcttgtcagaagggcaatcccaacagtcaaccactcaggcacctttagcccacaggcccccgtgccgactaccgtgcccgttgttgacgtcagaattccccagctagctccaccagcttccgattcgactgtcacaaaactcgacttcgatctggaacccgaaccacccccagccccacctcgggcctcatctctgggggaaatcgatgagtcttccgagcttcgcgttttggacatccccggccaggattccgagacggtgttcgatatccagaatgatagaaatagcatcttgccaaaatcacaatccgaatacaagcccgacaccccacagtcaggcctggagtattccgggatccaggagctggaagaccgacgctcgcagcagcggttccaatttaatctccaggactttaggtgttgtgccgttttggggagaggccattttggcaaggtcctcctcgccgagtataaaaacacaaatgagatgttcgcaattaaggccctgaaaaaaggtgatattgtcgcccgggacgaggtggattccttaatgtgcgagaagcgcatatttgagacagttaatagtgtgagacacccttttttagttaacttgtttgcctgtttccagactaaagagcacgtgtgctttgtgatggaatatgccgccggcggcgatctcatgatgcacatccacacagacgtctttagcgagccccgagccgtcttttacgccgcatgcgtcgttctgggcttacaatacctccatgagcacaagatcgtctatcgggatctgaagctcgataatctgctcctagacactgagggatttgtgaaaattgccgacttcggtctttgcaaggaaggcatgggctatggcgatcgaacttctaccttttgtgggacgcctgagtttcttgctccagaggtgctcactgagaccagttacacacgcgccgttgactggtgggggttgggcgtcctgatatacgaaatgctggtcggtgagtcacccttccctggcgacgacgaggaagaagttttcgatagcatagtgaacgacgaggtgcggtacccaagatttctgtctaccgaggctatcagtatcatgagaaggcttctgcgccggaacccagagcgacgtctgggtgcatctgagaaggatgcggaagatgtgaagaaacacccattctttcggttaatcgactggagcgccctcatggataaaaaggtcaaacccccgtttatccccactattcgtggacgggaggatgtctctaattttgatgacgagttcactagcgaagcgccaatcttgacccctcctcgggagcccaggatcctgtcagaggaggagcaggagatgttccgtgacttcgactatattgctgattggtgttag

SEQ ID NO: 130543 - DNA, 2955 bp, synthetic construct
  misc_feature 1..2955: note = Description of Artificial Sequence: Synthetic coding sequence
  source 1..2955: mol_type = other DNA
atggcaagtaatccagagaggggagagattttgctgaccgagctgcagggcgacagccggtcactgccattcagtgagaacgtatcagctgtgcagaaattagatttcagtgacactatggtccagcaaaagctcgacgatattaaagacagaattaagcgggagatccggaaggagctcaagattaaggaaggagctgaaaatcttagaaaagtgaccacggataaaaaatccctcgcatacgttgacaatattctcaaaaagtctaataagaagctggaagagctgcaccataagctgcaggagctcaacgcgcacattgtggtatcagatccagaagacatcacagattgtccccggacacctgatacacctaacaacgaccctaggtgcagcacaagcaacaatcggctcaaggccctccaaaagcaacttgacattgagctgaaggtgaaacagggcgccgaaaatatgatacagatgtactctaacggatcctctaaggatcggaaattacacggcactgcccaacagctcctgcaagatagcaaaacgaagatcgaggtgatccgcatgcagatacttcaggctgtacagaccaacgagcttgcctttgataacgccaagcctgtgatttctcccctggagctgcggatggaggagctgaggcaccactttcggatcgagtttgcagtcgcggaaggtgccaaaaacgtcatgaagctgctgggctccggaaaagtaaccgatagaaaggcactcagcgaagcccaggcccgcttcaacgagagctctcaaaagttagacctgctgaaatactcgcttgagcagaggctaaatgaggtgcccaagaaccatccaaaaagcagaatcatcattgaagagctcagccttgtcgccgcaagccccacactttcccctaggcagtcgatgatatccactcagaatcagtattcaactctttctaaaccagcggcgctgaccggtacactggaggtgcggctgatgggctgccaggatattctagaaaacgtgcctggtcgcagcaaggctacaagcgtcgcactacccggctggtccccttccgaaaccagatcctctttcatgtcacgtaccagtaagtccaaatctgggagcagtaggaatttgttgaaaacagatgatttgtccaatgacgtgtgcgcggtcttaaagctggataataccgttgtggggcagacctcctggaaacccatctccaatcaatcctgggatcagaagttcacattagagctggatcggtcaagagagctcgagatctcggtgtactggagggactggaggtcactctgcgctgtcaagtttctgagactggaggactttcttgataaccagagacacgggatgtgtctctaccttgagccccaggggaccctgttcgctgaggtgacattttttaacccagtgatagagaggcgaccaaaattgcagcgccagaaaaagattttctctaagcaacagggcaaaactttcctgcgggccccacagatgaatatcaatatcgcaacatggggccggctcgtgcgccgcgccatacctactgttaaccactccggcacattcagtccccaagccccagtgccgactacagtcccagtcgtggacgtgaggataccacagcttgcccccccggcttcggactccacagtgacgaaactggatttcgaccttgaacccgagcctccacccgcacccccacgcgcctccagcctgggcgaaatagacgaatcaagtgagctgcgggtcctcgacataccgggtcaggatagcgaaactgtttttgacattcaaaatgatcggaatagtatcctgccgaagtctcagagcgagtataaaccagatactccccaatctggccttgaatatagcggcattcaggaactggaagatcgtcgctcccaacagcggttccagtttaacctgcaggatttccgctgctgcgcggtgttgggacgcgggcactttggcaaagtgttgctggccgaatacaaaaacaccaatgaaatgttcgcaatcaaggcactgaagaagggagacatagtagccagagacgaggttgattctctaatgtgcgaaaaacgcatctttgagactgtgaattctgtccgacacccgtttctcgtgaacctctttgcttgttttcaaaccaaggagcacgtgtgctttgtgatggagtacgcggcagggggagatttgatgatgcatattcacactgacgtatttagcgaaccccgcgccgttttttacgctgcctgcgtggtactcggcctgcagtaccttcatgagcacaagatcgtctaccgggacctcaaactggataacctccttttggataccgaggggttcgtcaaaattgcagactttgggctatgcaaggaagggatgggatatggcgatcgtacctcaactttttgcggcaccccagagtttttagcacctgaggtactaactgagacctcttacacacgggcggtcgattggtgggggctgggggtgttgatatacgaaatgcttgtgggcgagtcgccgtttccgggtgacgatgaagaggaagtgttcgacagcattgttaacgacgaggttagataccccaggttcctttcaaccgaggcaatcagcattatgcgtagactgttacgcagaaatcccgagcgcagattgggtgctagcgagaaggacgccgaagacgttaagaaacatcctttctttagattgattgactggagtgccttgatggacaaaaaagtgaaacccccatttatccccacaatccggggcagagaggacgtgagtaattttgacgatgaattcacatccgaggcacctattctcactccgccgagagaaccgaggattctgtcagaagaagaacaagagatgtttagagatttcgactatattgctgactggtgctag

SEQ ID NO: 130544 - DNA, 636 bp, synthetic construct
  misc_feature 1..636: note = Description of Artificial Sequence: Synthetic coding sequence
  source 1..636: mol_type = other DNA
tgagaggagttgcggcaccatttccggatagaattcgccgtggctgagggcgccaagaacgtgatgaaattgctaggcagcggtaaagttacagatcgcaaagcgttgtccgaggctcaagcccgttttaacgaatccagtcagaagctcgacctgctaaagtattccctagaacagaggcttaacgaagtccctaagaaccatccaaaaagtcgcatcatcattgaagaactgtcacttgttgctgcttcccccacgttgtcccctcggcagagcatgatttccacacagaatcagtactcaacgctttcaaaaccggcagcgctcaccgatgatgtgtgcgccgtcctaaagctggataacactgtcgtgggccagacgagttggaagcctatcagcaatcagagttgggatcagaaatttaccctggaactcgatagaagtcgggagctggagatcagtgtttattggagggactggcgctctttatgtgcagtgaaatttctgaggctggaggactttctagacaaccagaggcacggaatgtgcctttacttggagccacagggcacattgtttgctgaagttactttctttaatcccgttatcgagaggagacctaagttgcagcgatag

SEQ ID NO: 130545 - DNA, 198 bp, synthetic construct
  misc_feature 1..198: note = Description of Artificial Sequence: Synthetic coding sequence
  source 1..198: mol_type = other DNA
tgaggatttgtgaagatcgcagattttgggctctgcaaggagggcatgggttatggtgaccggacatctaccttctgtggcactccggagttcctggcaccggaggttctcaccgaaacctcctacaccagggctgttgattggtggggacttggtgtgctgatctacgagatgctggtgggagagacttccgtgtag

SEQ ID NO: 130546 - DNA, 1977 bp, synthetic construct
  misc_feature 1..1977: note = Description of Artificial Sequence: Synthetic coding sequence
  source 1..1977: mol_type = other DNA
atgaacagcactctagaggtgcggctcatgggttgtcaggatattctcgaaaatgttccaggccgttcaaaggcaacaagtgttgctttgccaggctggagtccgtcagagacacgcagttccttcatgtctcggacttctaaatccaagtcaggaagcagtaggaatttacttaaaacagacgatctgagcaacgacgtttgcgctgtactcaaactggataacaccgttgtcggccagacgagttggaagccaatatccaaccagtcttgggatcagaaattcacgcttgagctggatcggtcacgcgaactggagatctctgtttattggagggactggcggtccctatgcgccgttaaattcctgagactcgaggacttcctcgacaatcagcggcacggcatgtgcctgtatctcgaacctcaaggcaccctgttcgccgaagtcacattctttaatccggttatcgagcggcgacccaaactccagcgacaaaaaaagatcttttccaaacaacaggggaaaaccttcctcagagctccacagatgaacatcaatatagccacctgggggcggttagtcaggagggccatccccaccgttaatcattcaggaaccttctctccgcaggctcccgttcccaccacagtcccggtggtggacgtgcggattccacagctcgccccccctgcaagtgactcaacggtgacaaaactggatttcgatctcgagcctgaacctcccccagcgcctccgagagccagtagcctaggcgaaattgacgagagtagcgagctcagggttctggacattcccggacaggacagcgaaacagtgtttgacatacagaatgatcgcaatagcatcctccccaagtcccagtccgaatacaagccagacacgccccagagtggcttggaatactccggaattcaagaactggaagacaggcgtagccagcagaggtttcagtttaatctgcaggacttcagatgttgtgctgtcctcggccggggccacttcggtaaggtgctattagccgagtacaaaaacacaaacgaaatgttcgccataaaagctctgaagaaaggcgatattgtcgcacgtgacgaggtcgactctcttatgtgcgaaaaacgaatcttcgagacagtgaactccgtgagacacccgtttttagtcaacttattcgcatgtttccagaccaaggagcacgtgtgcttcgttatggagtatgcagcgggaggggacttaatgatgcatatccatacggacgtgttttctgaaccccgcgcagttttttacgccgcttgcgtcgtcttgggcttgcagtaccttcacgagcataaaattgtgtaccgggatctaaaactggacaacctgcttctggataccgagggattcgtgaagattgctgacttcggactgtgcaaagaaggaatggggtacggtgataggaccagcacattctgtggcacgccagagttccttgcccctgaagtcttaaccgagacttcgtatactagagccgtggattggtggggattaggagtgctgatctatgagatgctggttggtgagtccccgtttcctggtgatgacgaagaggaagtgtttgatagcatcgtgaatgacgaggtgagatatcctaggttcttgagcaccgaggccatcagcatcatgcggcgactgctgcgccggaatcccgaacggcgtctgggagccagtgaaaaggacgctgaggacgtcaagaagcacccattcttcaggcttatcgattggagcgccttgatggataagaaggtaaaaccaccgttcatcccaacaatcagagggagagaggatgtttccaactttgacgatgaatttacttctgaagccccaatcttgacgcctcctagagagcctcgcatattaagtgaggaagaacaggaaatgtttcgggactttgattacatagcagattggtgctag

SEQ ID NO: 130547 - DNA, 336 bp, synthetic construct
  misc_feature 1..336: note = Description of Artificial Sequence: Synthetic coding sequence
  source 1..336: mol_type = other DNA
atgcacatacacaccgatgtcttttcagagccccgggccgtgttttacgctgcttgtgtagtgctcgggctgcagtatctccacgaacacaaaatagtgtaccgcgatctgaagctggacaacctacttctggatacagagggtttcgtgaagattgctgatttcgggctctgtaaggaaggcatgggctatggagacaggacctccaccttctgcgggacaccagagtttctggcaccggaggtgctgacagagactagttacacccgtgccgtggattggtggggtctgggagtactgatatatgagatgcttgtaggagagaccagcgtgtag

SEQ ID NO: 130548 - DNA, 2670 bp, synthetic construct
  misc_feature 1..2670: note = Description of Artificial Sequence: Synthetic coding sequence
  source 1..2670: mol_type = other DNA
atggaagagggtgcaccccgacagccaggcccctcccagtggccacccgaagatgagaaggaagtcatcagacgggctatacagaaggaactcaaaatcaaggagggcgttgaaaatctgcgtagggtggcaacagataggcgtcacttgggccacgtgcagcagctgctgagatccagtaataggaggctggagcaacttcatggagagttgagagaactgcacgcccggatactgctgccaggccccggtccaggcccagcagagcctgtggccagtggcccccgtccatgggctgaacaactgcgtgcccgccacctggaagcccttcgacggcagctgcatgtagaactgaaagtaaagcagggagccgagaacatgacacacacctgtgctagcggaacacctaaagaacggaagctcctcgctgccgcccagcagatgttgagggactctcagttaaaagtcgccttgttgcggatgaagatctcctccctcgaggcgagtggaagcccagagccagggcccgagctactggctgaggaactgcagcatcggctccacgttgaagctgccgtcgcagaaggtgctaagaacgtggtcaaattgctgtcttcgcggaggacacaggatcggaaagctctagcagaggcccaggcccagctgcaggaatcctctcaaaagctcgatctcttacgcctcgccctggaacagctgctcgagcaactgccaccagctcatcctctgagaagtcgcgtaacacgagagctccgggctgccgtgcccggctatccacagccttccgggactcctgtcaagcccacagctctgacgggcacgttacaggtcaggctcctgggctgcgaacaactgcttacagcagtgcccggtcgatcaccagccgcagcattggcctcctccccatccgagggctggctcaggactaaggcgaaacaccaaagaggccgaggcgagttggcttctgaagtgctggcagtgcttaaagttgacaacagggtcgtgggacaaaccggatggggccaggtggcagaacaaagttgggatcagactttcgtgattccattggaacgcgcaagagagctggagattggtgtgcactggcgggattggcgccagttatgtggcgtagccttcctgaggttggaggacttcctggataatgcctgccatcagctgtctcttagtctggtccctcaaggcctcttatttgcccaggtgacattctgcgaccccgtgatagaacggcgaccaaggttacagcgccaagaaagaatcttcagcaagagaagaggacaggattttctgagggcctcccaaatgaacttgggcatggcagcttggggtcgactggtgatgaatctgctgccaccctgctccagtccttccaccatttcccctcctaagggttgccccaggactccaaccaccttgagagaggcctccgaccctgccacaccaagtaacttcctgccaaagaagacaccactcggagaggagatgaccccgcctccgaaacccccaaggctttatttgccccaagagcccacctctgaggagacccctcgaaccaagaggccccacatggagcccaggacccggcgcggtccctccccacctgccagcccgactcgaaaacccccacggctacaagactttcgttgcctggccgtgctaggaagaggacattttggcaaagtacttctggtgcagttcaaaggcacagggaagtactacgccataaaagcactcaagaagcaagaggttctaagtcgcgacgaaattgagagtctttattgcgaaaagcgcatccttgaggcggttggttgcaccggccacccctttcttctgtccttgctggcatgctttcagaccagtagccatgcctgcttcgtgacagagttcgtacccggaggggacctgatgatgcagatacacgaggacgtgtttcctgagccacaggcccgtttctacgtagcctgcgtagtgctcggcctccagttcctgcatgaaaagaaaatcatatatagggatctgaaactcgataacctgcttcttgacgcgcagggcttccttaagatcgccgattttggattgtgtaaggaaggtatagggttcggggaccgaacatctacattctgtggaacacccgagtttctcgccccagaggttcttacgcaggaagcctacacacgggcagtcgactggtgggggcttggtgttctcctgtatgagatgctggtgggagagtgtccctttcctggcgacaccgaggaggaggtctttgattgcatcgttaatatggatgctccatatccgggatttctttccgttcaaggtctagaatttatacaaaagctgcttcagaagtgccctgagaagcggctcggggccggagaacaggatgccgaagagatcaaagttcaaccatttttcaggacgaccaattggcaggcgctgttagcaagaactatacaacctccattcgtcccaacattatgcggcccagctgacctcaggtactttgagggtgaattcacagggctcccaccagctctcacccccccggccccacattcattgctgactgccaggcagcaggctgccttcagggattttgatttcgtgtccgagcgcttcctagaaccttag

SEQ ID NO: 130549 - DNA, 1725 bp, synthetic construct
  misc_feature 1..1725: note = Description of Artificial Sequence: Synthetic coding sequence
  source 1..1725: mol_type = other DNA
atgaggcggctctcctcctggagaaaaatggccacggctgaaaagcaaaagcacgacggaagagtaaagatcgggcattacattcttggggacactttgggagtaggaacattcggaaaggtgaaggtcgggaaacatgagctgaccggccataaggtcgccgttaaaatcttgaacagacagaagattcggagcctcgatgtggtgggcaaaatcaggcgcgaaatccagaacctcaaactgtttagacaccctcacatcatcaagctttatcaggttattagcacaccgtcggatatcttcatggtgatggagtatgtcagtggaggagaactgtttgattacatatgcaaaaatgggagaaagtcagatgttcccggggtggtcaagacaggatctactaaagagttggacgaaaaggaatctcgccggttgtttcaacagatactgtctggcgttgattattgccaccgccatatggtggtgcacagagacctgaaacccgagaacgttctactcgacgctcacatgaacgccaagattgcagacttcgggctttctaacatgatgtccgacggggagtttttgagaacgtcctgcggctccccgaattatgccgccccggaggttatcagcggcaggctgtacgcagggcccgaggtggatatctggtctagcggggtcatcttatatgctcttctctgcggcacactcccctttgatgatgaccatgtgccaactctgttcaagaaaatttgcgatggtattttctatacgccccaatacctaaacccctccgtgatttccctcctgaaacatatgttacaggttgaccctatgaagagagccacaatcaaagatatcagagagcatgaatggttcaagcaggacctgcctaagtacttgttcccggaagatcctagttactcttcaaccatgattgacgacgaagcccttaaggaggtgtgtgagaaattcgagtgctccgaggaagaagtactttcatgcctttacaataggaaccaccaggatcctctcgcagttgcatatcatttgatcattgacaaccggagaattatgaatgaggcgaaggacttttacctggcaacttctccccccgatagtttccttgatgaccatcatctgacccgaccgcacccagaacgggtgcctttcttggtggcagaaacacctcgggcacgccacacactggacgaactaaatcctcagaagtctaagcaccagggtgttaggaaagccaaatggcacttgggcattaggagtcaaagtaggccaaacgacattatggctgaggtctgccgcgctattaagcaactggactatgagtggaaggtcgtaaacccttactacttgcgggttcgcaggaagaaccctgtgacatcgacctatagtaaaatgtccttgcagctgtatcaagttgatagtaggacataccttttggactttcgctccatagatgatgaaatcacggaagcgaaatctgggactgcaactccccagcgatctggctctgtgtctaattataggtcttgccagcgctcagatagtgacgctgaggcacaagggaagagcagcgaggtttctctcacatcttctgtcacatcactcgattcctcgccagtggatttaaccccaagaccaggatcccacaccatcgaatttttcgagatgtgcgctaacttgatcaaaattctggcccagtag

SEQ ID NO: 130550 - DNA, 1680 bp, synthetic construct
  misc_feature 1..1680: note = Description of Artificial Sequence: Synthetic coding sequence
  source 1..1680: mol_type = other DNA
atgcggagactctccagctggcggaaaatggctactgccgagaagcagaagcacgatggtcgggtgaagattgggcattatatattgggcgatacactcggagtgggcacctttggcaaagtaaaggttggcaaacatgagctcaccggccataaggttgccgtgaaaattcttaatagacaaaagatcaggtccctggatgtcgtcggaaagattcgcagagagatccaaaatcttaagctgttcaggcaccctcatattattaaactttaccaagtcatctctactccttccgatatttttatggtgatggaatacgtgtctgggggggaattgtttgattatatctgtaagaatggaagactagacgaaaaggagagtcgcagactgtttcaacaaatcctttccggagtggactattgccaccgtcacatggtggtacatagagatctgaagccagaaaacgttctattagacgcacacatgaatgccaagatcgcagactttgggctgagtaatatgatgtcagacggcgaattcttacgcacatcctgcgggtcacctaactacgccgcaccagaggtgatctctgggcggctgtatgcgggccccgaggtcgatatctggagcagtggcgtgatcctctatgccctgctgtgcggaacacttccgttcgacgacgaccatgttcctactctgtttaagaagatatgtgatgggatcttctatacgccccagtaccttaatccctctgtgatctcactcttgaaacacatgctacaagttgaccctatgaaacgggccacaattaaggacattagagaacacgaatggttcaagcaggatctgcccaagtatttgttccctgaagaccccagctattcttccactatgatcgacgacgaagctctgaaagaagtgtgcgagaagttcgagtgctctgaggaagaagttctctcttgtctctacaacagaaaccaccaggaccctcttgccgtggcgtaccacttgatcattgataataggcgaattatgaacgaggcaaaggacttttacttagccactagcccccctgatagtttcctggacgatcaccacctgacacgacctcatcctgagagggtgccattccttgtggctgaaacacctagggcacggcatactttggatgaattgaaccctcaaaagagcaagcaccagggagtgcgaaaagccaagtggcatcttggcatccgttctcagagcagaccgaacgacataatggccgaagtgtgtcgcgccataaagcagttggactacgagtggaaggtggtgaatccctattaccttagggtccggaggaaaaaccccgtaacgtcgacttactctaaaatgtccttgcagttgtaccaggtagactccagaacgtatctgctggacttccgatcaatcgacgacgagataacagaggcgaagtcagggacagctaccccccagcggtctggaagcgtgtcgaactatcggtcttgccagaggtctgacagcgatgcagaagcccagggaaagtcgagtgaggtgtcattgacatcctctgtcacttctctagatagtagccccgttgacctcacgccaaggcctggtagccatacaatcgagttttttgagatgtgcgccaatctgattaagatactagcccaatag

SEQ ID NO: 130551 - DNA, 1659 bp, synthetic construct
  misc_feature 1..1659: note = Description of Artificial Sequence: Synthetic coding sequence
  source 1..1659: mol_type = other DNA
atggccgaaaaacagaagcacgatggaagagtgaaaatcgggcactacgtactcggggatacacttggcgtggggacgttcggtaaggtgaagatcggcgagcaccagctgacaggccacaaagtcgctgtgaaaatcctgaaccggcaaaagatccgaagccttgacgtggtgggaaagatcaagcgcgagattcaaaatctaaagcttttccgccaccctcacatcatcaagctgtatcaggtgatttcaacgcccaccgacttctttatggtcatggaatacgtgtcgggtggagaactctttgactatatatgcaagcatggcagggtcgaagagatggaggcgagacggctgttccaacagatcctcagtgccgtggactactgccatagacacatggtagtgcatcgcgacctgaagcccgagaatgtgctgctagacgcgcacatgaatgcaaagattgctgacttcggcctgagcaacatgatgtctgacggcgagttcctacgaacctcctgcggttcaccaaactacgccgcaccagaggtgattagtgggcgactttatgctgggccggaagtcgacatttggagctgcggagtaatcctgtacgcccttctatgcgggactctcccctttgatgatgagcacgtgcctacactgttcaagaaaatccggggcggagtattttacataccggagtacctgaaccgtagcgtggcgactctcctaatgcacatgcttcaggtggatcccctcaaacgcgcaacgattaaagatattagagaacatgaatggtttaaacaagatctacctagctacctgtttccagaggatccctcatatgacgccaacgtaattgatgacgaggccgtgaaggaggtttgtgagaagttcgagtgcacagagtccgaggtgatgaattcactgtactcaggcgacccacaagaccagttagccgtggcctatcatctgataattgataaccgtcggatcatgaaccaggcaagtgaattttatctcgcgtcatcgccacccagtggtagctttatggatgatagtgccatgcacatcccaccaggtctgaagcctcatccggagagaatgccgcctctaatcgcagactcacctaaagcacggtgtcctctcgatgctctgaacacgaccaaacccaaatctttggctgttaagaaggccaagtggcacctgggcatcaggtcccagtctaagccctacgacatcatggctgaagtgtatagggccatgaaacagctggattttgaatggaaggtggtgaatgcatatcacctgagggtaagaagaaagaacccggtcaccggaaattacgttaagatgagcctgcaactgtatctcgtggacaacagatcttatctcctggacttcaaatcgattgatgatgaagttgtggaacagaggtcaggctcaagcactccgcagagaagctgctctgctgcagggctccatcgaccccggagtagcttcgattccaccacagccgagagccattcccttagcggcagtctgacggggagtctcactggatccaccctgtcctctgtgagcccacggctaggtagccataccatggacttctttgaaatgtgcgcctccctcatcacaacgctcgcccggtag

SEQ ID NO: 130552 - DNA, 744 bp, synthetic construct
  misc_feature 1..744: note = Description of Artificial Sequence: Synthetic coding sequence
  source 1..744: mol_type = other DNA
atgttgactattacggactttattaacatcctccacaggtactacaagtctgccctggtccagatttacgagttggaagaacacaagatcgaaacctggagggaagtgtatctgcaggatagcttcaagccgctcgtgtgtatctccccgaatgcctcgctgtttgatgcagtgagctctctgattaggaacaaaattcacaggctccctgtgatcgatcccgagtccgggaatacgttgtacatcttgactcataagaggatcctgaagtttcttaaactctttatcacagaatttcccaaacctgagttcatgagtaagtctctagaagaattacagatcggaacttatgccaacatcgctatggtgagaacaacgactcccgtctatgtggccctaggcatatttgtccagcaccgagtgagcgcgctgccagttgttgatgaaaaaggacgggttgtcgacatttattcgaagttcgatgtgataaacctggccgctgaaaagacgtataataatctcgacgtgtccgtcaccaaggcattgcagcatagatcccactactttgagggggtgttgaagtgctaccttcacgagacgttggaaactatcataaatcggttggtggaagctgaggtgcaccgactggttgttgtggacgaaaacgatgttgtgaaaggcatagttagcctatcagatattctgcaggccctggtgctaactggtggcgaaaagaaaccttag

SEQ ID NO: 130553 - DNA, 996 bp, synthetic construct
  misc_feature 1..996: note = Description of Artificial Sequence: Synthetic coding sequence
  source 1..996: mol_type = other DNA
atggagacagttattagtagcgactcatctcctgccgtagaaaacgagcacccccaagagacccctgagagtaataatagcgtgtacacgtcatttatgaaatcacatagatgctatgacctgatccccactagttccaagctcgtagtcttcgatacttccttgcaggtgaaaaaggcgttcttcgcacttgttactaacggtgtgcgggccgctcctctatgggactccaagaaacagtcgtttgtcgggatgctgaccattacagatttcataaatatattacacagatattataagagcgcactggtgcaaatctatgaactggaagagcataagatagagacttggcgagaagtgtacttgcaggatagctttaaaccactcgtgtgcatctctcccaacgcctcactgttcgacgctgtctctagcctaatcaggaataagatccatagactgcccgtcattgacccggagtcgggaaatacgctctacatccttacacacaagagaatcttgaaatttctcaagttgttcatcaccgagttccctaaacccgagttcatgtctaaaagccttgaggaactccaaatcggcacgtacgcaaatattgccatggtgagaacaaccacacccgtttacgtggccctcggaatcttcgtgcaacacagggtaagcgccctccctgtggtggatgagaagggcagagtggtggacatttactccaaattcgatgtgattaacctggctgccgagaagacctataataatctagacgtaagcgtgacgaaggccctccagcatcggagccattatttcgaaggggtactcaagtgttacctacacgaaacgctagaaactattattaatagattagtcgaggcggaggtgcaccgactggtggtcgttgatgagaacgacgtggtgaaagggatagtctctctgtcggatattctgcaggctttagtgctgaccgggggagaaaagaaaccatag

SEQ ID NO: 130554 - DNA, 1710 bp, synthetic construct
  misc_feature 1..1710: note = Description of Artificial Sequence: Synthetic coding sequence
  source 1..1710: mol_type = other DNA
atgggctccgctgtgatggataccaaaaaaaaaaaggatgtgtcttcccccggcggatcaggaggcaaaaaaaacgcatcccaaaagcggagaagtctacgggttcatattccggatctgtcttctttcgccatgcccttgctggacggagacctggaaggcagcgggaaacacagctctaggaaggtcgattctccatttggccccggctccccaagtaagggcttttttagtaggggcccacagccacggcccagttctcccatgagtgcaccggtacgtccaaagacaagcccagggagccccaaaactgttttcccatttagttatcaggagagcccgcctagatccccacggaggatgtcctttagtggaatcttccgcagtagtagtaaggaaagtagcccaaactctaatccagcaacttcgccaggcggaatacgattcttcagccgctcccgaaagacgtctggcttatcatcatctccctcaactcctacccaagtgaccaaacaacacaccttcccattggaatcttacaaacatgaaccagagcgcctggaaaatcgcatatacgcaagctcctctccccccgataccgggcaaaggttttgcccatccagtttccagagccccactcggccaccgctggcatctcctacacattacgcccccagcaaggctgctgcccttgcagcagcccttggcccggctgaagccgggatgttggagaagcttgagttcgaagacgaggcagtcgaagacagtgaatccggtgtctacatgaggttcatgaggtcccataagtgctatgacatcgtaccaacttccagcaagctcgtggtgtttgacactacgctccaggtcaagaaggccttctttgcactggtggccaacggggtgcgagccgcccccctttgggaatcaaagaaacaatctttcgtgggtatgttgaccatcacagactttatcaacatcctgcaccgctactataagtccccaatggtgcagatctacgagttggaggagcataagattgagacttggcgtgagctctacctacaggagacctttaagccgctggttaacatctccccagacgcctctctgtttgacgcagtgtactcgctgattaagaataagatccataggttaccggtgattgatcccattagcggcaatgcactgtacatactcacgcacaaaagaatactgaagttcctgcagctgttcatgtccgatatgccaaaacccgcatttatgaaacagaatctggatgaactcggaattggaacctaccataacatcgccttcatccatcctgatacgccgatcatcaaagcactgaatattttcgttgagcgtcggatcagtgctctgcctgttgttgacgaaagtggcaaggtcgtagatatttattcgaagttcgatgtgattaaccttgccgcagaaaagacttacaataacttagatataacagtgacacaagcgctccagcatcgctctcagtactttgagggcgtggttaagtgcaacaaattggagatcctcgagaccatcgtggatagaatcgtgagagcagaagttcatcgattagtggtggtgaatgaggccgactctatcgtcggtattatatccttgagcgacatccttcaagccctaatcctcacccctgccggagctaagcaaaaagagactgaaacagagtag

SEQ ID NO: 130555 - DNA, 1335 bp, synthetic construct
  misc_feature 1..1335: note = Description of Artificial Sequence: Synthetic coding sequence
  source 1..1335: mol_type = other DNA
atgaaacgtttcggctccttgagaagtaacaagaagcataaagaccagaaccggtcaacagagcgaagacagtccgagccccatgggcttttcgcctctgggttgtctagcagtccttctacacctacccaagttactaagcagcacacatttccgctggagtcctacaaacacgagccagaaaggctggagaacaggatttacgcatctagcagcccacccgatactgggcagcgattttgtccctcctcctttcagagccctacacgaccccccctggccagtccaacccattatgccccgtccaaagctgccgccctcgcagccgccctgggcccggcggaagcaggcatgctcgagaaactcgagttcgaggacgaggtggaggactccgaatccggtgtatacatgcgcttcatgcggtcccataaatgttatgatattgtaccaacgtcgtcaaagctggtcgtcttcgacacaacgttacaagtgaagaaggcctttttcgccttagtggccaatggagtcagagctgctccactttgggaatccaaaaagcagtccttcgtgggtatgttgacgatcacagattttatcaacattctccacaggtattataaatcacccatggtccaaatttatgagctcgaagagcacaaaatagaaacctggagagagctgtatctgcaggagacctttaagccactggttaatatcagccctgacgccagtctctttgacgctgtatactcattaatcaaaaacaagatccaccggttgcctgtgatagaccccatatcaggaaatgcactctatatccttacccacaaaagaatcctgaagtttctgcagctgtttatgtcagacatgccaaagcctgcattcatgaagcagaacctggacgaattgggaattggtacatatcacaatatcgctttcattcatccagatacccccattattaaggcactgaacatattcgttgagaggcgtataagtgcactgcctgtagtcgacgagagtgggaaagttgtcgacatatatagcaaattcgatgtgattaatttggccgctgagaagacctacaacaatctcgatatcaccgtaacccaggctctgcagcataggtcccagtattttgaaggtgtggttaagtgcaacaagctggaaatcctagagaccattgttgatagaatcgtgcgagctgaagtgcatcgtttagtggttgtgaatgaggctgacagcattgtgggaatcatctctcttagcgacatactccaggcattaattctgacaccggcaggggctaagcagaaagaaacagagacggagtag

SEQ ID NO: 130556 - DNA, 309 bp, synthetic construct
  misc_feature 1..309: note = Description of Artificial Sequence: Synthetic coding sequence
  source 1..309: mol_type = other DNA
atggcaggtcaggcctttcgcaagttcttgcccctcttcgatcgggttctggttgaaaggagtgctgcagaaacagttaccaagggcggtattatgctgcccgagaaatctcagggaaaggtactgcaggccacagtcgtcgccgtgggatcggggtccaaaggaaaaggcggagaaatccagccggtgtccgtcaaggtgggggacaaagtcttacttcctgagtacggcggaaccaaggttgttctggacgacaaggactattttctcttccgggatggcgatatactgggtaaatatgtggactag

SEQ ID NO: 130557 - DNA, 1062 bp, synthetic construct
  misc_feature 1..1062: note = Description of Artificial Sequence: Synthetic coding sequence
  source 1..1062: mol_type = other DNA
atggagcctggactcgaacatgccctgagacgtacaccaagctggagcagtcttggtggctctgagcatcaagaaatgtccttccttgagcaggagaactcttcgagttggccttcacccgctgtaacgtcaagctcagaacggatccgaggcaagagacgtgcgaaagccctgagatggactcggcaaaaatcagtggaagagggcgaacctcctgggcagggggaggggccacggtcccgccctgcggctgagtcaaccggcctcgaagcaacttttcctaaaacgacccccctagcccaagccgatccagcgggcgtgggtaccccaccgacaggctgggactgcctgcctagcgattgtacagcctccgccgctggttcatccacggacgatgtggagctcgccactgagttccctgccactgaggcatgggaatgcgagttggagggcctccttgaggaaaggcccgcactttgcctgtcaccccaagcaccctttcccaagctagggtgggacgatgagctgcggaagccaggcgcgcagatttacatgcgatttatgcaggaacatacatgttacgacgctatggcaacctcttcaaaactggtgatttttgacaccatgctggaaatcaagaaggccttcttcgccctggttgcaaacggcgttagggctgcaccactgtgggacagtaagaagcagtcattcgtgggcatgttgacaatcactgatttcattctcgtgctgcaccggtactatcggtcccctcttagatcaacatgcaaggctgcgagctctttatggtcacccagcttactgatgatagcgtgcctcaagttatccacaccaagctcccggacgggctcaatagcatgcttattcctgacacggtgtcaggccacatatagcacgtcttcccataccaatgcatgttcctcctcgtgcacttctctcgtaccatgctgcccaggtcccccatcttcaaccgcgctgagcaagatatgggcttcagcacattctgaaacatggctgtggtgttggcggcaacacccgagttag

SEQ ID NO: 130558 - DNA, 1395 bp, synthetic construct
  misc_feature 1..1395: note = Description of Artificial Sequence: Synthetic coding sequence
  source 1..1395: mol_type = other DNA
atgtcttttttagagcaagagaattcatccagctggccttcacctgcagtaacttcttcaagcgagagaatacgaggtaagaggagagctaaagctctcagatggactcgccagaaatcagtggaggaaggcgaacctccagggcagggagaaggaccccgcagccggcccgccgcagagtccactggcctggaggccacctttcctaaaacaacacccttagctcaggctgatccagctggagttggaacaccacccacagggtgggactgcctgccaagcgactgcacggcttctgctgcaggtagcagcaccgatgatgtggaactggccacagaattccctgccacagaggcttgggagtgcgaactggaggggctgctggaagaaagaccagccctttgcctgagtcctcaggcgccctttcccaagctgggctgggacgatgaactgaggaagccaggggcccagatctatatgaggtttatgcaggaacatacatgctacgacgcaatggccacatcttccaaactcgtcatttttgacactatgctggagataaaaaaggcgtttttcgccctcgtcgcgaatggagtccgggcagcgccgctgtgggattcaaagaagcagagcttcgtgggcatgctgactattaccgactttatcctggtgctccataggtactatcggagtccattagtgcagatatatgagatcgagcagcataagatcgaaacctggagggaaatttacctacagggatgctttaagcccctggtgtccatatcccccaacgatagtctcttcgaggctgtgtacaccctcattaagaacaggattcatagattgcccgtgctggaccctgtatccgggaacgtactgcacatccttacccataagcggctgctaaaattccttcacatattcggcagtctactgccgcgacctagttttctgtatcggacaatccaggatcttggcatcggtacctttcgggacctcgccgtcgtgctggagaccgcgccgatcctgactgccctggacatattcgtggatcggagggtcagcgccctccctgtcgtaaatgaatgtggacaggtagttggcctgtactccagattcgatgtcattcatttagcagcacagcagacttataatcacctggacatgtccgttggcgaggccctcagacagcgtacactatgcctggagggtgtgctttcttgccaacctcatgagtccctcggggaagtaattgacagaatcgcaagagaacaggttcatcgcttggtactggtcgacgagacacagcacctgctgggagtagtctccctgagcgacatcctgcaggctctggttctctcccctgctggaatcgacgcactcggagcgtag

SEQ ID NO: 130559 - DNA, 1470 bp, synthetic construct
  misc_feature 1..1470: note = Description of Artificial Sequence: Synthetic coding sequence
  source 1..1470: mol_type = other DNA
atggagccaggccttgagcacgcactgagaagaaccccttcttggagctctcttgggggatctgaacaccaagaaatgagtttcctggagcaagagaattcaagctcgtggccttctcccgctgtaacatcgagctctgaacggattcgtgggaagcgacgggcgaaggccctaaggtggactaggcagaagtccgtcgaagagggggagccacccggacagggcgaggggccacgcagccgccctgctgcagaaagtaccggactcgaggccacctttcccaagactacgcccctggcacaggccgatcccgccggggtgggcacacctcctacgggctgggattgtctccctagcgactgtaccgctagcgccgcgggcagcagtacggacgatgtcgagttggccacagaattccctgccaccgaggcctgggaatgcgagctggaaggcttgcttgaggaacgccccgcactctgcctatccccgcaggcacctttccctaagctgggatgggacgacgaacttcgtaagccgggggcgcagatctacatgcgttttatgcaagagcacacttgttatgacgctatggccacatcgtccaagctcgttatcttcgacacaatgttggaaatcaaaaaggcctttttcgcgctggtggccaacggcgtacgcgcggcgccactctgggattctaaaaagcagagtttcgtgggtatgctcacaattacggatttcatcctggtattacataggtattaccgcagtcccctagtgcaaatctacgaaatcgagcagcacaaaattgaaacctggagggaaatctatttacagggttgtttcaagcctctcgtgtcaatctctcccaacgactcattgttcgaggcggtgtacacattgatcaagaacagaatccaccggctgcccgtgctcgaccctgttagcggaaatgtgctgcacatcctcacacacaaacggctcttaaagttcctacatatattcggctccctcttgccgagaccatcctttctataccgtaccatccaggatcttggtattgggacctttcgggatttggcagtggtgcttgaaacagcgccaattttgactgccctggacatcttcgtggacaggagagtttcggctttaccagtggtaaacgaatgcggacaggtggtcgggttgtacagtcgctttgacgtgattcaccttgctgcccaacagacttataatcacctggatatgtctgtgggtgaggccctgcgacagaggacactgtgcctggagggcgtgctctcttgtcaaccacatgagtcactcggcgaagtgatcgatcgtatcgcacgcgagcaggtgcatcgattagtgctcgtggatgagacccagcaccttctgggagtcgtgtccctgtctgatatcctgcaagcactcgtcctctcacctgcaggaatcgatgcactgggcgcgtag

SEQ ID NO: 130560 - DNA, 918 bp, synthetic construct
  misc_feature 1..918: note = Description of Artificial Sequence: Synthetic coding sequence
  source 1..918: mol_type = other DNA
atgcggttcatgcaggagcatacatgctatgatgccatggccacctcctctaagttggtgatattcgacaccatgctggagattaagaaagctttttttgccctggtggctaatggcgtgagagcagcccctttatgggactctaaaaagcagtcattcgtgggtatgctcactatcaccgacttcatcttggtgctgcaccggtactaccgcagcccgctcgtccagatatatgaaatcgagcagcataagatcgagacttggcgggagatctacctccagggttgctttaagcctcttgtcagcatttccccaaacgacagcctgttcgaagcggtatacactcttatcaaaaatagaattcataggttgccagtgcttgatcccgtatcaggcaacgtgctacatattctgacgcacaagaggcttctgaagttcttgcacatcttcggaagtctgcttccaagaccctccttcctgtacagaacgatacaggacctgggaatcggaacatttagagatctggcagttgtgctggagaccgcgccgattctgacggccctggacatcttcgttgatcgtcgcgtgtccgcgcttcctgttgttaacgaatgcggccaggtggtgggcctctattcaagatttgatgtaattcaccttgccgcccagcagacctacaatcaccttgacatgagcgtgggggaagctctgcggcagaggaccctctgcctggagggcgtattgtcgtgccaacctcacgagagtttgggagaggttattgaccgtatcgcaagagagcaagtccatcgcctcgtgcttgtggacgagactcagcacctgctgggcgtcgtcagcctgagcgacatactgcaagcccttgtgttaagcccggccggcatcgacgctcttggggcatag

SEQ ID NO: 130561 - DNA, 1056 bp, synthetic construct
  misc_feature 1..1056: note = Description of Artificial Sequence: Synthetic coding sequence
  source 1..1056: mol_type = other DNA
atgggaaatgcagccgcggccaagaagggcagtgagcaggaaagtgtgaaggagtttcttgctaaagccaaggaagactttttgaagaagtgggagagccccgctcaaaatactgcccatcttgaccagtttgagcgcatcaagacattaggcacgggatcttttggccgtgtaatgctggtcaagcacaaggaaaccgggaaccattacgcaatgaagattctagacaaacagaaagtggtgaagctgaagcagatcgagcacacactgaacgaaaaaaggattctgcaggccgtgaattttccattcctggtgaaattagagttctcttttaaggataatagtaacctgtacatggtgatggaatacgtgcctggtggagaaatgtttagccatctgaggaggatcggacgcttttccgagccccatgctcgattttacgctgcacaaattgtgttgaccttcgagtatttacactcccttgacctgatctaccgggatctgaaacctgaaaacctcctgattgaccagcagggctatattcaagttacagacttcgggtttgcaaaaagggtgaaaggcaggacatggaccctctgcggaactccagagtatctagctccggagataattctgtcaaagggatacaacaaagcagtggactggtgggccctcggcgtgctcatttatgagatggcagctggatacccgccatttttcgccgatcagcctattcagatctatgaaaagatcgtgtcaggaaaggtgagattcccttcccatttttcaagcgacttaaaggatcttctgcgcaatctgctgcaggtcgatctgaccaaacggtttgggaacttaaaaaatggggtcaatgacattaagaaccacaagtggttcgctaccaccgattggatcgctatctaccagcgaaaggtggaagctcctttcattcctaagttcaaaggccccggtgacacttcaaatttcgacgactatgaagaggaggaaattcgagtgtccattaacgagaaatgcggaaaggaattttccgaattctag

SEQ ID NO: 130562 - DNA, 1032 bp, synthetic construct
  misc_feature 1..1032: note = Description of Artificial Sequence: Synthetic coding sequence
  source 1..1032: mol_type = other DNA
atggcctctaactcgagtgacgttaaagagtttttggcgaaggcgaaagaggatttcctgaaaaagtgggagtcgcccgctcaaaacacagctcatcttgatcagttcgaaaggattaaaacactggggactggctcttttgggcgcgtgatgctcgtgaaacacaaagagacagggaaccattatgctatgaaaattctggacaaacagaaggttgtgaaattaaagcagattgagcacaccctgaacgaaaagcggatcctgcaggccgtgaatttcccttttttagtcaagttagagttctcatttaaagacaatagtaacttatatatggtaatggagtacgtgcccggaggggagatgttcagccacctgaggcggatcggtaggttctcagagccccacgcccgattctatgctgctcagatcgttctgacgtttgagtatctgcacagcctggatctgatctaccgtgatctaaaaccagagaaccttctgatagaccaacagggttatattcaggtgaccgattttggattcgctaagcgggtcaaaggtcggacgtggactctctgcggcacccccgagtatcttgctcccgagattatattaagcaaggggtacaataaagctgtggactggtgggctctaggagtgctcatttacgagatggccgccggatatccgcctttttttgccgaccagcctatccaaatatatgaaaagatagtgagcggtaaagttcggtttcctagccacttcagttccgacctaaaggatctcctgcgcaatcttctacaggtggatctgacaaaacgcttcggtaacctgaaaaatggcgtcaatgatattaaaaatcataaatggtttgccacaacagattggatcgccatttaccaacggaaggtggaagcaccctttattccaaaatttaaaggacccggagatacctccaatttcgacgattacgaggaagaagaaatcagagttagcattaatgagaaatgtggcaaagaatttagcgaattttag

SEQ ID NO: 130563 - DNA, 1056 bp, synthetic construct
  misc_feature 1..1056: note = Description of Artificial Sequence: Synthetic coding sequence
  source 1..1056: mol_type = other DNA
atgggcaacgccgccgccgctaagaagggtagtgagcaggaatcagtgaaggagttcctcgccaaggccaaagaggactttctgaagaagtgggagagcccagcccagaataccgcacacctcgaccagttcgagagaataaaaacactcggtacagggtcctttggaagggtgatgctggttaagcataaggagactggcaatcactatgccatgaagattttggataagcaaaaggtggtcaaattgaagcagatcgagcacacgctcaatgagaagcgtatcctccaggccgtgaatttcccgttcctcgtgaaactggaattttctttcaaagacaattccaacctgtatatggtgatggagtacgtccctggaggcgagatgttctcccacctccggagaattggtaggttttctgagccccatgcaaggttttacgcggcccagattgtgttaacattcgagtacctacattcccttgacctgatttatcgggacttaaagccagagaacctgctcattgaccagcaaggttatatacaggtgacggatttcggctttgctaaacgcgtgaaggggagaacgtggacactctgcggaaccccggaatacctggctcccgagataatcctgtccaagggctataataaggctgtggattggtgggcgttaggcgtactgatctacgagatggctgccggttatcccccatttttcgcggaccaacctatccaaatctacgagaaaattgtgtcgggcaaagtgcggttccccagtcatttctcttccgatctcaaagatctcttgcgcaatcttctccaggttgatctcaccaaaagatttggaaatttgaagaatggcgttaatgatatcaagaatcacaagtggtttgctacaaccgactggattgccatttatcagagaaaggtggaagcccccttcattccaaaatttaaaggccctggggatactagtaacttcgacgactatgaagaggaggagattagagtctcaattaacgagaagtgcgggaaagagtttagcgaattctag

SEQ ID NO: 130564 - DNA, 693 bp, synthetic construct
  misc_feature 1..693: note = Description of Artificial Sequence: Synthetic coding sequence
  source 1..693: mol_type = other DNA
atgctggtgaaacataaggaaaccggcaaccactacgcaatgaaaatattggataaacagaaagtggtgaagctgaagcagatcgagcatacattgaacgagaaacggatactgcaggcagtgaatttcccattcctggtaaaactggagttctcctttaaagacaattccaacctgtatatggtgatggaatacgtacctggcggtgagatgttcagtcatctcagacggatcggccgattcagcgaaccacatgcccgtttctatgctgcgcagattgtactgacatttgaatacctgcacagcttagacctgatttacagggacctaaaaccagagaatctcctcatcgaccagcaggggtatatacaagtaaccgactttggcttcgcaaagagggtgaaggggaggacatggactttatgcggaacccctgagtacctggctcctgagattattctttctaaggggtataacaaggcagttgattggtgggctctgggagtgcttatatacgagatggccgccgggtacccccccttttttgctgaccagccgatccagatctatgagaaaattgtgtctggcaaagttcggagcggctgcggtgataccgcccttgaagagactgataggtctctgctgacacatcccatcccttggggcgcactcttagtggtaaggattatttag

SEQ ID NO: 130565 - DNA, 1074 bp, synthetic construct
  misc_feature 1..1074: note = Description of Artificial Sequence: Synthetic coding sequence
  source 1..1074: mol_type = other DNA
atgggtctgagccgaaagtcctcagacgcaagcgcgtgttccagctccgagatctcagattttgttaaagagtttcttgccaaggctaaggaggactttctcaaaaagtgggagaatccaactcaaaacaacgccgggctggaagacttcgaaagaaaaaaaacactagggacaggttctttcggccgagttatgctggtcaaacacaaggccactgaacagtactatgcaatgaagatcctggataagcagaaggtggtgaagctgaaacaaatcgagcataccttgaacgagaagaggatcctgcaagccgtaaacttcccattcctggtacgactggaatatgctttcaaggataactctaacctttatatggtcatggagtatgtccctggcggagagatgttctctcacctgaggaggattgggcgattcagcgagccacatgctcgcttctatgctgcgcagatcgtcctgacatttgaatatcttcattctctggatctaatttaccgcgatcttaagcctgaaaacctgttgattgatcaccagggctatatacaggttacggacttcggttttgcgaaacgagtgaaaggccgcacctggaccttatgcggaacacccgagtatctcgctccggagataattttaagcaaggggtacaacaaggctgtggattggtgggctctgggggtgctgatttacgagatggcagccgggtaccctcctttctttgccgaccagcctattcaaatctacgagaaaatcgtaagcggcaaggtcagatttccgtcacatttctcctccgatctgaaggatctgctgaggaaccttttgcaggtagacctgaccaagcgatttggcaacctcaaaaacggtgtaagcgacatcaagacgcataaatggtttgcgactacagactggattgccatttatcagaggaaagtggaggcaccatttataccaaagttcaggggcagtggagatacaagtaattttgacgattacgaggaagaagacatacgtgtgtctattaccgagaaatgtgctaaggaatttggcgaattctag

SEQ ID NO: 130566 - DNA, 795 bp, synthetic construct
  misc_feature 1..795: note = Description of Artificial Sequence: Synthetic coding sequence
  source 1..795: mol_type = other DNA
atgagtgccaggaagagcagcgacgctagcgcttgcagctcctctgagattagtgatagcttcgttaaggagtttctcgccaaggccaaagaggacttcctcaagaagtgggagaatcctacacagaataacgctggactcgaagatttcgagagaaagaaaaccctcgggaccggctcttttgggcgagtgatgctggtgaaacataaagccaccgagcagtactacgccatgaagattctggacaagcagaaagtggtgaaactaaagcagatagagcacacactgaacgaaaagcgtattctgcaggccgtcaattttcctttcttggtgcggctagagtatgcgttcaaagacaattcaaacctgtacatggtgatggaatacgttcctggaggtgagatgttttcccacctgcgcagaatcgggcgcttttcagagccccacgcgcggttctacgcagcccagatcgttctgaccttcgagtacctccattccctggacttaatttacagagaccttaaacctgaaaatctgctgattgaccaccagggatatatccaagtaaccgacttcggcttcgcaaagcgtgtcaaaggacgcacatggaccctttgcggtacccccgagtacctggcacctgagatcattttgagcaagggctacaacaaagcagtggattggtgggcgctcggagtgctcatatacgaaatggcggctggctacccgccattttttgccgatcaacctattcagatttatgaaaaaatcgtatctggcaagcagaatttctag

SEQ ID NO: 130567 - DNA, 942 bp, synthetic construct
  misc_feature 1..942: note = Description of Artificial Sequence: Synthetic coding sequence
  source 1..942: mol_type = other DNA
atgcccgatctgaagatcctgaaagggaagacactggggaccggcagcttcggtagagtaatgctggtcaaacataaggccacggaacagtactacgcaatgaagatcctggataagcagaaagtggtgaagctgaaacagattgagcatactctcaacgagaagaggattttgcaggctgttaatttccctttccttgtaaggctcgagtatgcctttaaggataactccaatctatatatggtaatggaatatgtaccaggcggtgagatgttctctcatctgcgtagaattggccgcttttcagaaccgcatgctcgcttttatgctgcacagatcgtgctcactttcgaatacctccattcattggatttaatctacagagatttaaaacctgaaaacctgctgatcgaccatcaaggatacattcaggtcactgattttggattcgccaaaagagtcaaaggccggacatggaccctctgtggaacgccggaatatctggccccggaaatcattttatccaaagggtataacaaggctgtggattggtgggctttaggagttctaatctacgagatggctgccggatacccgccgttcttcgctgatcagcccatccagatctatgaaaagattgtgagcggtaaggtgaggtttccatcacacttctctagtgatctgaaggacttgttgcggaacctgctgcaggtggatctaacaaaacggttcggaaatctgaagaatggggtgtcggacatcaagacacacaagtggtttgccacgactgactggatagccatttaccaaagaaaggtggaggcccctttcattccaaaattccgcgggtcaggggacaccagtaacttcgatgactatgaagaagaggacatacgggttagcatcacagaaaagtgcgctaaagagttcggagaattctag

SEQ ID NO: 130568 - DNA, 1068 bp, synthetic construct
  misc_feature 1..1068: note = Description of Artificial Sequence: Synthetic coding sequence
  source 1..1068: mol_type = other DNA
atggggctgtctaggaagagcagcgacgcgagcgcctgcagttcctcagagatctccgttaaggagtttttggcaaaagccaaggaggactttttgaaaaaatgggagaatccaacccagaataacgccggtctcgaggattttgagagaaaaaaaaccttgggaaccggatcgttcggcagggtgatgctggtgaagcataaggctacagagcagtactacgccatgaagatccttgacaaacagaaggttgtgaagctgaaacagatagaacataccttaaacgaaaagcggattctgcaggccgtaaacttccctttcctggtgcggctagagtatgccttcaaggacaattccaatctctatatggtaatggaatacgttcctgggggtgagatgttctcccacctgcgccgcatcggtcgatttagtgagcctcatgcaagattttatgccgcccaaattgtgttaacattcgagtatctccattcgctggatctcatctaccgagatctgaaacccgagaacttgctgatcgaccatcaggggtacattcaggtaaccgacttcggtttcgccaagcgggtgaagggaaggacatggacactctgtggtacacccgaatacttggctcctgagataatcttatcaaaaggatataataaggctgtcgattggtgggctctaggggtgcttatctacgagatggccgcaggctaccctccgtttttcgctgatcagcccatccaaatttacgaaaagatagtgagtggcaaggtgcgcttcccgagccatttctcctcagacctcaaagacctgctgagaaatctgctgcaggtcgacctgactaaacggtttggtaatctgaagaatggtgtgagcgacatcaagactcataagtggttcgctacaactgactggatcgccatataccaacgcaaggtcgaggctccatttatcccaaaattccgggggagcggagataccagcaactttgacgattatgaagaagaggatattcgcgtgtccattactgaaaaatgtgctaaagaatttggggagttttag

SEQ ID NO: 130569 - DNA, 738 bp, synthetic construct
  misc_feature 1..738: note = Description of Artificial Sequence: Synthetic coding sequence
  source 1..738: mol_type = other DNA
atggggctcctgaaggagttcctggccaaagcgaaagaagactttctaaagaaatgggaaaaccctacacagaataacgccggtctggaagatttcgagcgcaagaagacccttggaaccggaagctttggtagggtcatgttggtcaaacacaaagcaaccgagcaatattacgccatgaagatcctggataaacagaaagtggtcaagctcaaacagattgagcacaccctcaatgagaaaaggatcctacaggcagtcaacttccctttcctagtgaggctcgagtacgcgtttaaagacaatagcaatttgtacatggtcatggagtatgtacctggcggcgaaatgttttcccatctgaggcgcatcgggcggttctcggagccccacgccagattctatgctgcgcaaatagttctaaccttcgagtacctacattccctggatctcatatatcgcgacctgaaaccagagaacctgctaatcgatcaccagggttatattcaggtgactgacttcggcttcgctaaacgggtcaaaggccgaacttggactctgtgtgggactcccgaatacctggcaccagaaattattctctcaaaagggtacaacaaggcagtagattggtgggcactgggagtgctgatttatgagatggctgccggataccctccctttttcgcggaccagccaatacagatttatgaaaaaattgtgagtggcaagaatttctag

SEQ ID NO: 130570 - DNA, 1197 bp, synthetic construct
  misc_feature 1..1197: note = Description of Artificial Sequence: Synthetic coding sequence
  source 1..1197: mol_type = other DNA
atggctgcctatcgcgagcccccttgcaatcaatacactggcacaacgaccgctctgcaaaagctcgaaggcttcgcttccaggcttttccaccgtcattccaaaggaacagcccatgatcagaagactgcgcttgaaaatgacagtctccacttttcggaacatactgccctctgggatcgaagtatgaaagagtttctggccaaggccaaggaagattttttaaagaaatgggagaacccaacccaaaataacgcggggcttgaggattttgaaaggaaaaaaaccctggggaccggtagctttggccgcgtgatgctggtgaaacacaaagctacagaacagtactacgctatgaagattcttgacaagcagaaggtggttaagctgaagcagattgagcatactctgaacgaaaaacgcatcctccaggccgtgaactttccattcctcgtcaggttggagtacgcttttaaagataattctaatctctacatggtcatggaatacgttcccgggggggaaatgttctcccaccttcggaggattgggcggtttagcgagccccacgcccggttttatgctgcccagatcgtgctcacattcgaatatctgcattccctggatttgatttacagggatctcaagcccgagaatctacttatcgatcaccagggatacatccaggtcactgacttcggcttcgccaagagagtcaaaggtagaacttggacgctgtgtggaacaccggagtatctggcacctgaaatcatactgtctaagggctacaataaagccgtagattggtgggcccttggggtgctgatttacgagatggccgctggttatccaccgttttttgctgaccagccgattcagatttacgaaaaaattgtgagtggaaaagtgaggttcccttcccacttttccagcgacttgaaagatctgctcagaaacctgttacaggtagacttgaccaagcgattcggcaacttgaagaacggggtaagcgacataaaaacacacaaatggttcgcaactactgattggatcgccatatatcagcggaaggtggaagcgccgttcatccccaagttccgcggcagtggggatacgtcaaatttcgatgattatgaagaagaagatattcgtgttagtattaccgagaaatgcgccaaagaattcggagaattctag

SEQ ID NO: 130571 - DNA, 774 bp, synthetic construct
  misc_feature 1..774: note = Description of Artificial Sequence: Synthetic coding sequence
  source 1..774: mol_type = other DNA
atgggaaatgcggccactgccaaaaaaggttccgaggtggagtctgttaaggagtttctcgcgaaggccaaagaagactttctgaagaagtgggagaatccgacccagaataatgccggtttggaggattttgagagaaaaaaaaccttgggcaccggaagcttcggtagagtcatgctggtgaaacacaaagcgaccgaacaatattatgcaatgaagatcctggataagcagaaagtagttaagctcaaacagattgaacacaccctgaacgagaagcgaatactgcaggctgtgaattttcctttcttggtgcgcctcgagtatgcttttaaagataactccaatctgtacatggttatggaatacgtgccaggaggggagatgttttcccacctaagacgaattggcaggttttctgagccgcacgcaagattctatgcggcacagatcgttctgactttcgaatacctccattcccttgacttaatctatagggatctgaagcctgagaaccttctgattgatcatcaagggtacattcaggttacggattttggattcgcgaagagggtcaagggtaggacatggaccctgtgcgggactccagagtacctagcccccgagattattctgagcaaggggtataacaaagctgtagattggtgggcccttggggtgctcatctacgaaatggcagccgggtaccctccgttctttgcggatcagcccattcagatctatgagaagatcgtttctggaaagaatttctag

SEQ ID NO: 130572 - DNA, 1056 bp, synthetic construct
  misc_feature 1..1056: note = Description of Artificial Sequence: Synthetic coding sequence
  source 1..1056: mol_type = other DNA
atggggaacgccgctaccgctaagaaaggctctgaggtggaaagcgtcaaagaatttctagccaaggctaaggaggactttcttaagaaatgggagaaccccacccagaacaatgcggggcttgaagacttcgaaaggaagaagacccttggcacaggatcgtttgggagagtcatgctcgtcaagcacaaggccacagaacaatactacgccatgaagatcctcgataagcagaaggtcgtaaagctgaagcaaattgaacacaccctgaatgagaagcggatattacaggcagtgaacttcccattcctggttcgcctggagtatgccttcaaggataatagtaatttatatatggtgatggaatatgtcccaggaggtgaaatgttcagccatctcaggagaatcgggaggtttagcgaaccccacgcaaggttctatgccgctcagatcgtactcacgttcgagtacctccattctctggaccttatctatagggaccttaagcccgagaatctgctcatagaccaccagggctatattcaggtgacagattttggtttcgctaagcgcgtgaagggaagaacatggacactgtgcggcaccccagagtacctggctcctgaaatcattctgagtaaggggtataacaaggccgtggactggtgggctctcggtgtgctcatttatgagatggcagcagggtaccccccattcttcgccgaccagcctattcagatctacgagaaaattgtaagtggcaaagtaagatttccatctcacttcagcagcgatctgaaggatctgctgcggaacctcctgcaggtggacttaaccaaacggttcggcaacttgaagaacggtgtctccgacatcaagactcacaagtggttcgctaccacagactggatcgcaatctatcagcgcaaagtagaggcaccttttatcccgaagttcagaggtagcggagatacctccaattttgatgactacgaggaagaagatatacgcgtgagcataacggagaagtgtgccaaggagttcggtgaattttag

SEQ ID NO: 130573 - DNA, 1077 bp, synthetic construct
  misc_feature 1..1077: note = Description of Artificial Sequence: Synthetic coding sequence
  source 1..1077: mol_type = other DNA
atgggcttgagcaggaagagcagtgatgcatccgcctgcagcagctctgaaatttccgatagtttcgtaaaagaatttcttgctaaagccaaagaagacttcctgaaaaagtgggagaacccaacccaaaataatgccggcctagaagatttcgaacgcaaaaagacattagggaccggtagctttggtcgggtgatgctggtgaaacataaggcaacagagcaatactacgctatgaaaatccttgataagcagaaagtcgtcaaacttaagcaaatcgagcacacccttaatgaaaagcggatcctccaggcagtaaacttcccctttctggtgagactggaatacgcttttaaggataacagcaacttgtacatggttatggagtacgtgccaggcggagaaatgttcagtcatctaaggagaatcgggagattttctgagccacacgctcggttctatgccgcgcagattgtactcaccttcgaatatctccatagccttgatttgatataccgtgaccttaagcccgaaaatttacttatagaccaccaggggtacatccaggtgaccgattttggattcgctaaacgcgtgaaaggccgtacatggacattgtgtgggacaccggagtatctggccccggaaattatcttatcaaaggggtacaacaaggctgtggactggtgggcgcttggcgtgctcatctatgaaatggcagcagggtatcctcctttcttcgcagaccagccaattcagatttatgagaagattgtgagcggcaaagtccgtttccccagccacttcagctcagacctgaaggacctgctccgcaacctcctgcaagtggatctgacaaagcgcttcggtaatctgaaaaatggtgtgtccgacattaaaactcataaatggttcgctacaactgactggattgccatctaccaacgaaaggttgaggccccgtttatcccgaaattccgtggctccggcgacacttccaattttgatgactacgaggaggaagacatcagggttagcattaccgagaagtgcgcaaaggagttcggggaattttag

SEQ ID NO: 130574 - DNA, 966 bp, synthetic construct
  misc_feature 1..966: note = Description of Artificial Sequence: Synthetic coding sequence
  source 1..966: mol_type = other DNA
atgtctgcccgcaagtctagtgatgcctccgcttgctcatcctctgaaattagcgtgaaggagttcctcgctaaagccaaggaggattttttgaagaagtgggagaaccctacccaaaacaatgctggccttgaggacttcgaaagaaaaaagaccttgggcaccggctcctttggtcgggtgatgctggtcaagcacaaagctaccgagcaatattatgctatgaagatattagacaagcaaaaagacaattcaaatctatacatggtgatggagtacgtgcccgggggcgagatgttcagtcatctccggcggattggcaggttttccgagccacatgcacgtttctacgctgcgcagattgtgttaactttcgaatacctacactccctggacctgatctaccgcgacctcaaaccagaaaatcttctcatagaccaccagggatatattcaggtgaccgatttcggttttgctaagcgcgtgaagggcaggacttggactctatgcgggaccccagagtacctagctcctgagatcatacttagcaaaggttataataaggcagtggactggtgggccctgggtgtgcttatctacgaaatggccgccggttacccacctttctttgccgatcagcccattcagatttacgaaaaaatagtctctgggaaagtccgcttcccatctcactttagcagcgatctgaaggatcttcttcggaacttgctccaggtagatctgaccaaacggtttggtaatcttaagaatggggtctctgacattaagacccacaagtggtttgccacaaccgactggatcgccatttaccagcgcaaggtcgaggctccttttatccccaaattcagaggatcgggggacacctccaacttcgatgactatgaagaagaagatatcagggtgtcaataaccgagaaatgcgctaaagagtttggggagttctag

SEQ ID NO: 130575 - DNA, 630 bp, synthetic construct
  misc_feature 1..630: note = Description of Artificial Sequence: Synthetic coding sequence
  source 1..630: mol_type = other DNA
atgagcgcctgtagcagtagtgaaatatcggtcaaggagttcctcgctaaagccaaagaggatttcctcaaaaaatgggaaaatcctacacagaataatgccgggctggaagacttcgaacgcaagaagaccctcgggaccggctcattcggacgggtcatgttggtgaagcacaaagctaccgagcagtactatgccatgaaaattctggacaaacagaaggttgttaagcttaagcaaattgaacatactctgaacgagaagcggatactgcaggccgtaaatttcccctttttggtgcgattagaatacgcatttaaggacaatagtaacctgtatatggtcatggaatacgtgccagggggggagatgttctcccatctgaggcgaatcggacgtttctctgaacctcacgccaggttttacgcggcgcagatagtgctgacattcgagtatctgcacagcctcgacctgatttacagagatctgaaacctgagaacctgctaatagatcatcaagggtacattcaggtaactgatttcgggttcgcgaagcgcgttaaggggaggacctggacgctctgcggcaccccagagtatcttgcaccggaaatcatcctaagtaagtag

SEQ ID NO: 130576 - DNA, 594 bp, synthetic construct
  misc_feature 1..594: note = Description of Artificial Sequence: Synthetic coding sequence
  source 1..594: mol_type = other DNA
atgagcgtcaaggaatttctcgctaaggctaaagaggattttttaaagaagtgggagaatcccacccagaataatgcaggcttagaggatttcgaacgcaagaaaactttaggtacgggatccttcggtagagtgatgctcgtgaaacacaaagcaacagaacagtattatgcaatgaagattcttgataaacagaaggtcgtaaagctgaagcagatcgagcacacactcaatgaaaaaagaatccttcaagcagtgaactttccctttctagtcagattggaatacgcctttaaagataattccaatctgtacatggtgatggaatatgtgcctggaggagagatgtttagtcatctgcgacggattgggcggttttcagaaccgcatgcacgtttttacgccgcccagatagtgctgacatttgaatatcttcactcactggaccttatctacagggaccttaagcctgaaaacctcctgatcgaccatcaagggtatatccaggtaaccgattttggatttgccaagagagtgaagggtagaacatggaccctatgcgggacacccgagtacttggctcccgaaatctag

SEQ ID NO: 130577 - DNA, 645 bp, synthetic construct
  misc_feature 1..645: note = Description of Artificial Sequence: Synthetic coding sequence
  source 1..645: mol_type = other DNA
atgggactcagctgttcttccagcgagatcagcgtgaaagagttccttgctaaggcaaaagaggatttcctcaaaaaatgggagaaccctactcagaataacgcagggcttgaggattttgaaaggaagaaaacgctgggaaccggatcgttcggtcgggttatgctcgtgaaacataaagctactgagcaatattatgccatgaaaattctcgataagcagaaagttgtaaagttgaagcaaatcgaacacaccctcaatgagaaaaggatactgcaggcagtcaattttccctttcttgtcagactggagtacgccttcaaggataactccaatctgtatatggtgatggaatacgtgcctggcggcgaaatgtttagccacctgaggagaatcggcaggttcagtgaaccacacgcaagattctatgccgcccagatcgtcctaacttttgaatacctacacagcctggatctgatttacagagacctgaaacccgagaatctgctcatcgaccaccaggggtacattcaggtcaccgattttgggttcgctaaacgggtgaaaggtaggacatggacgctgtgtggcaccccagaatatctcgcacctgagattatactgtctaagggctataacaagtag

SEQ ID NO: 130578 - DNA, 561 bp, synthetic construct
  misc_feature 1..561: note = Description of Artificial Sequence: Synthetic coding sequence
  source 1..561: mol_type = other DNA
atgggtctgtcgcgtaagagctctgatgcatcagcctgctccagctctgagataagtgtcaaggagttccttgcgaaggcgaaagaggacttccttaaaaagtgggaaaaccccactcaaaataacgcagggctggaagacttcgaaagaaagaaaaccctgggtactgggagcttcggccgggtgatgctggtcaagcataaggccactgagcagtattacgccatgaagattcttgataaacagaaggtggtgaaactcaagcaaattgagcacacactgaatgagaagcggatcctgcaggcagttaatttcccttttttggtgaggctggaatatgccttcaaagacaattccaatctgtacatggtcatggagtacgttccgggaggagaaatgttttcccacctgcggcgtattgggcgcttctctgagccccatgctcgtttttatgccgcccagatcgtgcttacattcgaatatctgcattctctagacctgatctatagggacctgaaaccagagaacctgttaatagatcatcaagggtacatacagtag

SEQ ID NO: 130579 - DNA, 528 bp, synthetic construct
  misc_feature 1..528: note = Description of Artificial Sequence: Synthetic coding sequence
  source 1..528: mol_type = other DNA
atggggctgagcaggaagtcatcggatgcttccgcctgctcttcatctgagattagcgacagctttgtgaaggaattcctggccaaagctaaggaggactttctgaagaagtgggagaacccaacccaaaacaatgcagggttggaagattttgaaagaaaaaagacattggggaccgggagcttcgggagggtcatgcttgttaagcacaaggctaccgaacagtattacgctatgaagattctggataaacagaaagtggtgaagcttaaacagatcgagcacactttaaatgagaaaaggatcctccaggcagtgaatttcccttttctggtaagactggaatacgcctttaaggacaactcaaacctgtacatggtcatggagtacgtgcctggcggggaaatgttctcccatctgcgccgaattgggaggttctcggagccgcacgcacgcttctatgcagcgcagatcgtcctgacatttgaatacttgcattccctagatttgatttatagagacctgtag

SEQ ID NO: 130580 - DNA, 621 bp, synthetic construct
  misc_feature 1..621: note = Description of Artificial Sequence: Synthetic coding sequence
  source 1..621: mol_type = other DNA
atgagtgcacggaagagctcagatgcctcagcatgcagtagctcagaaatttctgtcaaagaatttctcgctaaagccaaggaggactttctaaagaaatgggagaatcctacacagaataacgctggactggaggactttgagcgcaagaaaacccttggaacaggttctttcggcagagtgatgttggtgaaacacaaggcaacggagcagtattatgccatgaagatcctcgataagcagaaggttgtgaaattaaaacagattgaacatacactgaacgaaaaaaggattctacaggccgtaaattttcctttcctggttagactggagtacgctttcaaagacaattccaatttgtacatggtgatggagtatgtccccggcggggagatgttctcccatctcagaaggataggtcgcttctctgaaccccacgctagattttatgcagcccagattgtgctcacgttcgagtacctgcactctttggacctcatttacagggacctgaagcctgagaacctgctgattgatcatcagggctatattcaggtgacagactttgggttcgctaaaagggtgaagggacggacatggacgttgtgcggtactccatag

SEQ ID NO: 130581 - DNA, 1056 bp, synthetic construct
  misc_feature 1..1056: note = Description of Artificial Sequence: Synthetic coding sequence
  source 1..1056: mol_type = other DNA
atgggcaatgcccctgctaaaaaggataccgaacaggaagagtccgtcaatgagtttttggccaaagcgcgcggagactttctgtaccgctggggaaatcctgctcaaaataccgccagctcggatcagtttgaacgactgagaacactcggaatgggctcttttggtagagtgatgcttgttcgacaccaggaaacgggtggccactacgcaatgaaaattctgaacaagcagaaggtagtgaaaatgaagcaggtcgaacacattctcaatgaaaaaaggatactgcaggccatcgattttccgtttcttgttaaactccaattttcctttaaggacaatagctatctctatctggttatggagtacgtcccggggggggagatgttctcaaggctgcagagagtggggaggttcagcgaaccccatgcctgtttctacgccgcccaggtggttctggccgtgcagtatctccacagtttggacctgatccacagggacttaaagccagaaaatctgcttatcgaccagcagggctatctgcaggtgacagatttcggctttgcaaagagagtgaagggtcggacgtggacgctctgtgggacaccagagtatctggctcccgagatcatcttaagcaagggttacaataaggctgtcgattggtgggcattaggggttctgatctatgagatggccgtgggattccctcctttctacgccgatcagcccattcagatctacgagaagatcgtaagcggcagggtccgattcccctctaaattgtcctcagacttgaaacacctgctgaggagtctgttacaggtggaccttaccaaaaggtttggaaatctgagaaacggtgtcggggacattaaaaaccataaatggttcgccaccaccagctggatcgccatatatgaaaagaaggtcgaggcccccttcatccccaagtacactggacctggggacgctagcaacttcgatgactatgaggaagaagaacttcgaattagcattaatgagaaatgtgccaaagaattctccgagttttag

SEQ ID NO: 130582 - DNA, 1146 bp, synthetic construct
  misc_feature 1..1146: note = Description of Artificial Sequence: Synthetic coding sequence
  source 1..1146: mol_type = other DNA
atggaaagcgggagtaccgcggcgtctgaggaggcgagaagccttagagaatgcgagctgtacgtacaaaagcacaatatccaggcgctgctgaaagatagtatcgtccagctgtgtacggctcgcccagagagaccaatggcttttctgagagaatattttgagaggttagagaaggaggaggccaagcaaatacagaacctccaaaaagccgggacacgcacagactcccgggaagacgagatctccccacctcctccaaaccccgtcgtgaagggacggcgacggcggggcgccatttccgcagaggtttatacagaggaggacgcagcttcttacgtacgcaaagttattcctaaggactataaaaccatggcggccttggccaaagccatcgagaaaaacgtgctgtttagtcacctggatgataatgagcggagtgacatctttgacgctatgttttcagtttcctttatcgccggcgaaaccgtgattcagcagggcgacgagggtgacaacttctacgtgatcgatcagggcgaaacagacgtgtatgtgaacaacgagtgggcgactagcgttggcgaaggaggctcctttggcgagttggcactcatctacggaactccccgcgcagccaccgtgaaggcgaagaccaatgtgaaactctgggggattgatagggacagttatcgtaggatcctgatgggctctaccctgcggaaacggaagatgtatgaggagttcctttccaaagtgtccatcctggagtccctagacaagtgggagcgactgactgtcgctgacgcactcgaacccgtccagttcgaggatggacagaaaattgtggtacagggagaaccaggggatgaattcttcatcatactggaaggctccgccgcagttctccagcggcggtcagagaacgaggagtttgtcgaagtagggagattggggccttccgactacttcggcgaaattgcgttgctcatgaaccggccacgggccgctaccgtcgtggccagggggcctctgaagtgcgtgaaactcgatcggccccggttcgagcgggtgctggggccatgctcagatattttaaaaaggaacattcagcagtacaatagctttgtttctttgtccgtgtag

SEQ ID NO: 130583 - DNA, 1146 bp, synthetic construct
  misc_feature 1..1146: note = Description of Artificial Sequence: Synthetic coding sequence
  source 1..1146: mol_type = other DNA
atggaatcagggagcactgcagcgtctgaggaggcgcgcagtttaagagagtgcgagctgtatgtgcagaaacataacatccaggccctcctgaaggattctatagtccagctgtgcaccgcacggcctgagagacctatggcattcctaagagagtacttcgagcgcctggagaaggaagaagccaaacagattcagaatcttcagaaagccggcacgcgtaccgactcgcgcgaagacgagatttcccctccccctcctaatcctgtggtgaaggggagacggcgtagaggggctatctctgcggaggtttatacagaggaagacgcagcctcctacgtgcgtaaggttatcccgaaagactataagaccatggcggctctcgctaaagccatcgaaaagaacgtactattctctcacctggatgataacgaacgaagtgatattttcgatgccatgttctccgtgagctttatagcaggcgagaccgtgatacagcagggcgatgagggcgataatttctacgtcattgatcaaggcgaaaccgacgtgtacgtaaacaatgagtgggccaccagtgtgggtgagggcggctcatttggggaattggcgcttatttacggtacgccgcgtgccgccaccgtcaaagccaaaaccaatgtgaaactgtggggcatagatcgggactcctataggaggatcttgatgggcagtacactgcggaagcgtaagatgtacgaggagtttctatccaaggtgtcaatactggagtcccttgacaaatgggagagactgaccgtcgctgatgctttggagccagtacaatttgaggacggccagaagatcgtcgtccagggggagcctggagatgaattcttcatcatcctggagggctctgccgctgttctccaaaggagatcagagaacgaagaatttgtagaagtaggcagactaggtccctcggattacttcggtgaaatcgcattattgatgaaccgacctagagcagcaacagtggttgccagagggcctctcaaatgtgtgaagctagatagaccccggtttgagagggtgcttggaccatgctctgacatcctcaaacgcaatattcaacagtataattcctttgtctccctgtctgtatag

SEQ ID NO: 130584 - DNA, 1146 bp, synthetic construct
  misc_feature 1..1146: note = Description of Artificial Sequence: Synthetic coding sequence
  source 1..1146: mol_type = other DNA
atggaaagtggtagtacagccgccagcgaagaggctcgctccttgagggagtgcgagctgtacgtccagaaacataatattcaggctctacttaaggatagcatcgtgcagttgtgcacggccagacccgagcgtccaatggccttcctgcgggagtattttgagcgcttagagaaggaggaggccaagcagatccagaaccttcaaaaagccggcactcgcacagactctcgggaggatgagatctctccaccccccccaaatccagtcgttaaaggcaggaggcggagaggagccatttctgctgaggtctacactgaggaagacgccgcctcttacgtcaggaaagtgatccctaaggattacaaaaccatggcggcgctggcaaaggcaattgaaaagaacgtgttgttctcacacctggatgataacgaacggagcgacattttcgacgccatgttcagcgtgtccttcatcgctggtgaaactgtaattcagcagggggatgagggtgacaacttctatgtcatagatcagggcgagaccgacgtatacgtgaataacgagtgggccacctctgtaggcgagggcggctcgttcggggaactggccttgatatatggcacaccccgcgctgctacagtcaaggctaaaactaacgttaagctgtggggcattgaccgtgatagctaccgacggattctaatgggatctaccctgcgaaaaaggaagatgtacgaggagtttttgagcaaagtgagtatcttagagagccttgataaatgggagcggctcactgtcgccgatgccttagagccggtccagtttgaggacggccagaaaattgtggttcaaggcgaacctggcgacgaattttttatcattctggagggaagtgccgccgtgttgcagaggcgctctgaaaatgaagagtttgttgaggtgggccggctgggcccatccgactattttggagaaatagccctgctcatgaataggcctcgcgccgcaaccgttgtggcgcgaggccctttaaagtgcgtgaagctagaccgcccccgcttcgagagagtgttagggccatgttccgacattctgaagaggaatatccaacagtataactccttcgtgtctctatcagtatag

SEQ ID NO: 130585 - DNA, 1146 bp, synthetic construct
  misc_feature 1..1146: note = Description of Artificial Sequence: Synthetic coding sequence
  source 1..1146: mol_type = other DNA
atggaatccggaagcaccgccgcgtctgaggaggctcgttccctaagggagtgcgaactgtacgtgcagaagcataatattcaggctctgctgaaagattccattgttcaactgtgcactgcacggcccgagcgccctatggccttcctgcgtgagtactttgagcggttggagaaggaggaggccaaacagattcagaatctgcagaaggccggaactcgtacagatagccgcgaggatgagattagcccgcctccaccaaaccctgtggtgaagggcagaagacgccgaggcgccatttccgccgaagtctataccgaagaagatgcagcaagctatgtgcgaaaggtgatcccaaaagactataagaccatggccgcgctggcgaaggccatcgaaaagaacgtgttattcagccatctggacgataacgagcgctcagacattttcgacgccatgttctccgtctcatttatcgccggagagacagttatccagcaaggagacgagggtgataacttctatgttatcgatcagggcgaaactgatgtatacgtgaacaatgagtgggcaacctctgtgggagaagggggttcattcggtgagttggcgctaatctatgggaccccccgggctgcaacggtgaaggcaaagacgaacgtcaaactctggggtatcgatagggacagctaccggagaatccttatgggatcaaccctccgcaaacgcaaaatgtatgaggagttcctctcgaaggtctccattctcgagagtctggacaagtgggagcgtctgaccgttgctgatgccttggagcctgtacagtttgaagatggtcagaagatcgtcgtacagggggagccaggtgatgaattctttatcatcttagaaggctccgcggccgtgttgcagcgccgctcagaaaatgaggagtttgttgaagtggggaggctgggaccaagcgattactttggagagatcgcacttcttatgaacaggcccagggccgctacagtcgtggccagggggccactcaaatgcgtgaaactggacaggccccggtttgagcgtgtgttagggccatgctctgatatcctcaaacgaaatatccagcagtacaactccttcgttagcctctcagtctag

SEQ ID NO: 130586 - DNA, 243 bp, synthetic construct
  misc_feature 1..243: note = Description of Artificial Sequence: Synthetic coding sequence
  source 1..243: mol_type = other DNA
atgggttctacgttgcgcaaaagaaagatgtacgaagaattcctctctaaagtctccattctggaatctctcgaaaagtgggaacgactcaccgtcgcagacgccctggagccagttcaattcgaggatggggaaaagattgttgtgcagggagaaccaggggacgacttctacatcattacagagaagaatctgccaggcgttgtggcacacgcatgcaacccaagctatcttgggggctag

SEQ ID NO: 130587 - DNA, 1146 bp, synthetic construct
  misc_feature 1..1146: note = Description of Artificial Sequence: Synthetic coding sequence
  source 1..1146: mol_type = other DNA
atggcttctcctcctgcttgtccgtccgaggaagacgaaagtctgaagggttgcgagctgtacgtccagctgcacgggatccagcaggttctcaaggattgtatagttcacctgtgtatttccaaacctgaacgtccgatgaagttccttcgcgagcacttcgagaaactggaaaaagaagagaaccggcagattctggccaggcagaagtcgaactcccagagtgacagccatgatgaagaagtatcaccaacccctcccaacccagtcgtaaaagcgcgcagaaggcgaggtggggtctctgccgaagtgtacaccgaagaggatgctgtgtcgtacgttcgcaaggttattcccaaagactacaaaaccatgaccgccctggcgaaggcgattagtaagaatgttctgttcgcccacctcgatgacaatgagagaagtgatattttcgacgctatgttcccagtcacgcatatcgcgggtgaaactgttatacagcagggcaatgagggggataacttctacgtagttgatcagggagaggtcgacgtctatgtgaacggggaatgggttacaaatataagcgagggggggtccttcggagaactcgccctgatatatggcaccccacgggccgctaccgtcaaggcgaagacagacttaaagctgtgggggattgatcgggactcctaccggcggattttgatgggcagtaccctccgcaaacgaaagatgtatgaagagtttttatctaaggtgagcattctcgagtctctcgagaaatgggaaagacttactgtagctgatgcattggaacccgtgcaattcgaagatggggaaaagatcgtggttcagggagagccaggggacgatttctacatcataacagaaggtacagccagcgttttgcagaggagatcgcctaatgaggagtatgtcgaagtgggacgtctgggaccttcagattatttcggagaaatcgctctgttgcttaatcggccccgagccgccacagtcgtagccagaggccccctgaaatgtgtgaagctggaccgcccgcgctttgaacgcgttctaggcccatgctcagagatcttaaaaagaaatatacaaaggtacaattcgttcattagccttacagtgtag

SEQ ID NO: 130588 - DNA, 1146 bp, synthetic construct
  misc_feature 1..1146: note = Description of Artificial Sequence: Synthetic coding sequence
  source 1..1146: mol_type = other DNA
atggcatccccgcctgcctgcccaagcgaggaagatgagtctctcaagggctgtgaactttatgtccagctgcacggcatccaacaagttttgaaggattgcattgtccacctgtgtataagcaaacctgaacggccaatgaaattcctcagggagcactttgaaaaacttgaaaaagaggagaatcgtcagatcctcgcccggcagaagtccaatagtcagtctgacagccacgatgaggaagtgtcacccacccccccaaatccagtagtaaaggccagacggagacgcgggggtgtgagcgctgaggtatatactgaagaagatgccgtatcctatgttagaaaggttattcccaaagactacaaaaccatgactgctcttgctaaagcaatctcgaaaaatgtgctgtttgctcatttagatgataatgagcgctcggatatattcgatgcaatgttcccagtaacccacattgcgggggaaaccgtgatccaacagggcaatgagggagataacttttacgtggtcgatcaaggagaggtggatgtgtacgtgaatggcgagtgggtcaccaatatatcggaaggaggatcctttggcgagctcgcattaatctacgggacacctagggcagctaccgtcaaggcaaaaaccgacctgaaactttgggggatcgatcgcgattcctatcgacggatactgatgggctcgacgctccgcaagcgcaagatgtacgaggaattcttgagcaaggtgtcaatcctcgaatctctcgagaagtgggagcgcctgactgtagcagacgccttggaaccagtgcaatttgaggacggggaaaaaatcgtggtacaaggagagcctggggatgacttttatattatcacagagggaactgcatccgtactgcaaagaaggtcccccaacgaggagtacgtcgaggtcggacggttgggtccaagtgattactttggtgagatagctctgctgttgaatcgtcctcgtgctgccaccgtagttgccaggggacccctgaaatgtgtgaaactggatcgtcctcgcttcgagcgggtactgggtccgtgctccgagatcctaaaacggaatattcaacgttataacagtttcatctctctgacagtatag

SEQ ID NO: 130589 - DNA, 1146 bp, synthetic construct
  misc_feature 1..1146: note = Description of Artificial Sequence: Synthetic coding sequence
  source 1..1146: mol_type = other DNA
atggcctcgccacctgcttgcccctcagaggaagacgagtcgctcaagggctgtgagctctatgtccagttacacggcatccaacaggtgctgaaggactgtattgtccacctctgtatcagcaaacctgaacgtcctatgaagttccttcgggagcacttcgaaaagctcgagaaagaagaaaataggcagatactggctagacagaagtcaaactctcaatcagatagtcatgacgaggaggtgagtcctacgccgcccaatcctgtggtgaaggcccggcggcgccggggaggtgtgtccgctgaagtgtacactgaggaagatgctgtgagctatgtcaggaaagtcatccctaaagattataaaacaatgaccgcactcgctaaagctatatccaagaatgtcctctttgcacacctggacgataacgagaggagcgacatattcgacgcaatgttccctgtgacccacatcgcaggtgaaactgtcatccagcagggcaacgagggagacaatttctatgtagtagaccagggggaagtggatgtctatgtgaacggagagtgggtaacgaacatttctgagggaggttcctttggggagttagccttaatctatggaaccccccgtgccgcaactgtcaaagcaaagaccgatctaaagctttggggtatagatcgggacagctaccgcaggattttaatgggttctaccctgcggaagcggaaaatgtacgaggagttcctcagtaaagtgtctattctcgagagtctggagaagtgggaacggctcacagtggcggatgctcttgaaccagtgcagttcgaggacggtgagaaaattgtcgtgcagggtgaacccggggatgacttttacatcatcactgaagggacagccagcgttctgcaaagaagatcacccaatgaagagtacgtcgaggtcggacggttgggtcctagcgactatttcggggagatcgctctactcctgaataggccacgggctgctacagtggtggcgcgcgggcctctcaagtgtgtgaagctagataggcctagatttgagcgcgtccttggtccttgttcagaaatccttaagagaaatattcagcgatacaacagctttatcagtctcaccgtgtag

SEQ ID NO: 130590 - DNA, 498 bp, synthetic construct
  misc_feature 1..498: note = Description of Artificial Sequence: Synthetic coding sequence
  source 1..498: mol_type = other DNA
atggcatctccccccgcctgcccttcagaagaagacgagtctctcaaaggctgcgagctgtatgtgcagctacatgggattcaacaggtgctcaaagactgcatcgtccacttgtgcatttccaagcctgagagacctatgaagtttctgagagagcacttcgaaaagctggagaaggaagaaaaccggcagatccttgcccggcagaaatcaaatagtcagagcgactcacacgacgaagaagtgtctccaacaccgccaaaccccgttgtgaaagcgcgtagacgccgcggaggtgtgagcgcggaggtctacaccgaagaggatgctgtgtcctatgtgaggaaagtgattcccaaagactataaaactatgacagccttagctaaggcgataagtaaaaacgtcctgttcgcacacctcgatgataatgaaagatctgacatattcgatgccatgtttcctgtgacccacatagccggcgagaccgtgatttag

SEQ ID NO: 130591 - DNA, 894 bp, synthetic construct
  misc_feature 1..894: note = Description of Artificial Sequence: Synthetic coding sequence
  source 1..894: mol_type = other DNA
atggcatcaccccccgcttgccctagcgaggaggatgagtccctgaaaggttgcgaactctatgtgcaactgcatggaattcaacaagtcctaaaggattgcatagttcacctctgcatttccaaaccagaacgccccatgaaattccttcgcgaacactttgagaagctcgagaaggaagagaacagacagattctggcccgccagaagagcaattcccagagtgactcacacgatgaagaagtctcgccaactccccctaatcctgtagtgaaggccagacggcggagagggggagtttctgccgaggtgtacaccgaagaggacgcagtgtcttacgttcggaaggtgatacccaaagactacaagactatgactgcgttggctaaggccatcagcaagaacgtattgttcgcccacttggatgataacgagaggtcggacatctttgacgccatgttccctgttacccatatagccggggaaacagttatccagcaaggaaatgaaggggacaacttttacgtcgtcgatcagggggaggttgatgtctacgttaacggtgagtgggtgactaacatttccgaaggcggctcatttggtgagctagctttaatttacgggacgccacgggccgctacagttaaagccaagactgatcttaagctgtggggcatagacagagatagctaccgcagaattttaatgggctctacattgaggaagcggaagatgtacgaagagttcttgtcaaaggtctcaatcctagaatccctggagaagtgggagcgcctgacggtggctgacgccctcgagcccgtccagtttgaagatggcgaaaagattgtagtgcagggcgagcctggagacgacttctacataattacagagtag

SEQ ID NO: 130592 - DNA, 177 bp, synthetic construct
  misc_feature 1..177: note = Description of Artificial Sequence: Synthetic coding sequence
  source 1..177: mol_type = other DNA
atggcttctccccctgcgtgccctagcgaagaagatgagagcctgaaggggtgtgagctttatgtgcagctccatgggatccaacaggtactgaaggactgcatagtacacctgtgtatatcaaaacctgaacgacccatgaaatttttaagggaacatttcgaaaaacttgagtag

SEQ ID NO: 130593 - DNA, 1146 bp, synthetic construct
  misc_feature 1..1146: note = Description of Artificial Sequence: Synthetic coding sequence
  source 1..1146: mol_type = other DNA
atggcctctcctccagcttgcccttccgaagaagatgagagtctaaaaggctgcgagctgtatgtgcaactgcacgggatccagcaggtgttgaaagactgtatcgtccacttgtgcatttccaaacccgaacggcctatgaaatttctacgagagcatttcgagaagctggaaaaggaagagaacaggcagatacttgcaaggcaaaagagcaactcccagtcagatagccatgatgaagaagtcagtcctacgccaccaaaccccgtagtgaaagctaggcgccgacgaggcggagtgtctgctgaggtgtatacagaggaagacgcagtgagctacgtgcgcaaggttatcccgaaggactacaagaccatgacagctctcgctaaggccataagtaagaacgtgctcttcgcccacctcgacgacaacgaaaggagcgatatttttgatgccatgttccccgtgacacatattgccggcgagacagtaatacagcaaggcaatgagggggacaacttttacgtcgtggatcagggcgaggttgacgtctatgttaacggggagtgggtcaccaatatctctgaggggggtagttttggtgaactagccctcatttacggcacgccacgggctgctaccgtcaaggctaaaactgatctgaagctgtggggaattgacagagattcatacaggagaatcctcatggggagcactctacgcaagcggaagatgtatgaagagtttctttccaaggtttcaatcttagaatctttggagaaatgggaaagactgacggtggctgatgcattagagccagtgcagtttgaggacggcgaaaaaattgttgtacagggggagcctggagatgacttttacattattactgagggcaccgcttccgtcttgcagcggcgaagcccgaacgaagagtatgttgaggtggggcggctgggcccttccgattattttggcgagattgctttactgttaaatcgaccacgcgccgcaacagtagtcgctagaggaccgcttaagtgtgttaaactggataggccacgatttgagcgggtgttagggccctgtagcgagattctgaaacggaatatccagcggtacaacagctttatctctctcaccgtgtag

SEQ ID NO: 130594 - DNA, 1146 bp, synthetic construct
  misc_feature 1..1146: note = Description of Artificial Sequence: Synthetic coding sequence
  source 1..1146: mol_type = other DNA
atggcgtcaccccccgcatgtccttctgaggaagacgaatctctgaagggttgcgaactgtatgtccaactccatggcatacagcaggttctgaaagattgtatcgttcacttgtgtatttctaagcccgagcggcctatgaaatttctgagagaacacttcgagaaacttgagaaggaggagaatcggcagatcctggcccgccagaaatctaattcccagagtgatagtcacgatgaggaggtctctccaactccccctaatccagttgtcaaggcaagacggagaagaggaggtgtgtcagctgaagtctatacggaggaggacgccgtctcttacgtgcgcaaggtgatccctaaagattacaagacaatgaccgccctggctaaggccattagtaagaatgtcctgttcgcacatctagacgacaacgaaagatcagacatattcgacgccatgtttccagtgacgcacattgctggtgagacagtgattcagcaggggaatgagggggacaacttttatgttgtggatcagggagaggtagacgtttatgtgaatggagaatgggtgacaaacattagtgaggggggctcatttggcgagctggccctgatctacggaactccacgggcggccactgtcaaggctaaaacagatctcaaactctgggggatcgatagagattcctaccgtcgcatcctgatgggatctacactgcgcaaacgaaaaatgtatgaagaattcctgagtaaggtttcaatactcgagtctttagagaagtgggaacggctaactgttgccgacgcgctggaacctgtccagttcgaggacggtgaaaagattgtggtgcaaggggaacctggtgacgacttttacattattaccgaagggacagcaagtgtgctgcagcgaaggtcacctaacgaagaatatgtagaggtagggcgcttgggcccaagcgattactttggggagatagccctcctattgaataggccacgagcagcaacggtggttgcgagaggacctttaaagtgcgtcaagttggaccggccgcgattcgagagagtgctgggtccctgcagcgaaatcctgaagagaaacatacagcgctataacagcttcatttccctgacggtgtag

SEQ ID NO: 130595 - DNA, 1215 bp, synthetic construct
  misc_feature 1..1215: note = Description of Artificial Sequence: Synthetic coding sequence
  source 1..1215: mol_type = other DNA
atgtcacacatccagataccgccgggtctcaccgaactactgcagggctatacggttgaggtactccggcagcagcctcccgatctggtcgaattcgccgtggagtattttacccggctcagagaggcccgagccccagctagtgtcctcccagcagcaacaccccggcagagcctgggacatccgcctcctgagccagggcctgaccgggtcgccgacgcgaaaggcgacagcgagtccgaggaggacgaagacttggaggtgcccgtgccatcaagatttaaccgtagggtgtcagtttgtgccgaaacgtataaccccgatgaagaggaagaggataccgacccgagagtgatccaccccaagactgatgaacagaggtgcaggctccaggaggcctgtaaggatatcctgttgttcaagaatctagaccaggagcagctatctcaagtgttggatgctatgttcgaacgcatagtcaaagccgacgagcacgttatcgaccagggcgacgacggggataatttttatgtcatcgagagggggacgtacgatatcctggtgacaaaggacaaccaaacccggtcagtgggacagtatgataaccgcggaagtttcggagaactggctttaatgtacaatactcccagggccgctacaattgttgccacttctgagggaagcctgtggggtctggatcgagtcacatttcggagaattattgtcaagaacaatgcaaaaaaaaggaagatgtttgaaagcttcatcgaatctgtgccactccttaagagtcttgaggtgtcggaacgcatgaagatagtcgatgtaatcggtgaaaagatttacaaggatggtgaacgaataatcacccagggtgagaaggccgattctttttacatcatcgaaagcggggaagtgtccatcctgattcgatctcgtacgaagagcaacaaagatggcggcaaccaggaagtggagattgcacgatgccacaagggtcaatactttggcgaactcgcactcgttaccaacaaacccagagccgcttcagcctacgccgtgggtgacgtgaagtgtctagtcatggatgttcaggcattcgaacggttactcgggccttgtatggatattatgaagcgtaacatatcccattatgaggagcaactggttaagatgttcggctcatctgtcgacttgggaaatctgggtcagtag

SEQ ID NO: 130596 - DNA, 1149 bp, synthetic construct
  misc_feature 1..1149: note = Description of Artificial Sequence: Synthetic coding sequence
  source 1..1149: mol_type = other DNA
atgtctcacatacagataccccccggtttgactgaactgctgcaggggtacacagttgaggtcctgcgccaacaaccccccgatctggtggagttcgcagtggaatactttaccagactgcgggaagcaagagcccctgcctctgttctgcctgcggccaccccacgccagtccctcggccatcctccccccgagcccgggccggatcgggtggctgacgcaaaaggggacagcgagagtgaggaagatgaggatctagaggtgcctgtcccatcccggttcaaccgacgagtgtcagtctgcgctgaaacatacaatccagatgaagaagaagaagacaccgatcccagagtcatccaccctaaaacagacgaacagaggtgtcggttacaagaggcctgtaaagacattctgctgtttaagaacctggaccaggagcagctgtcgcaggttctagatgctatgttcgaacggatcgttaaagcagatgagcatgttatcgaccaaggggatgacggcgacaatttctacgtgattgagcggggcacctatgatatcctcgtcacaaaagataaccagaccagatctgtgggccagtacgacaaccggggatcgtttggtgaacttgcactgatgtataatacccctagggcagctacaatcgtggcaacctccgaggggagcctttggggtctggacagggtcacatttcgcaggataatcgtcaagaataatgccaagaagagaaaaatgtttgagagttttattgaatccgtccccttgctgaagtccttagaggttagcgaaaggatgaagatagttgatgtgatcggtgagaagatctataaagacggagagcgaatcatcacccagaccaagtccaacaaggacgggggtaaccaggaggtggagatagccagatgtcacaagggtcaatattttggagagttggcactcgtgacgaacaaacctcgagcagccagtgcatatgcagtcggcgatgttaaatgcctggttatggacgtccaggctttcgaacgcctcctgggcccatgcatggacatcatgaaacgaaatatttcccattatgaggaacagctggttaaaatgtttggcagtagcgtggatctgggcaacctgggacagtag

SEQ ID NO: 130597 - DNA, 1215 bp, synthetic construct
  misc_feature 1..1215: note = Description of Artificial Sequence: Synthetic coding sequence
  source 1..1215: mol_type = other DNA
atgagtcacattcagatcccccccgggctgacagaactgcttcagggttatacggtcgaagttcttaggcagcagccaccagatctcgtggagttcgctgtcgagtacttcaccagactgcgtgaggccagagccccagcaagcgtgctccctgcagcaaccccacgccagtctctggggcaccccccacctgaaccaggacccgaccgcgtggccgacgccaaaggggactcagagtctgaggaggacgaggacctggaggttcccgtgccaagtaggttcaaccggcgggtttctgtgtgcgcagaaacctataacccagacgaggaggaggaagatactgatcctagggtgatacatcctaagaccgatgagcaaagatgcaggctgcaggaagcctgcaaggatatcctcctgtttaaaaacctggatcaggagcagctgagtcaagtgctcgacgcaatgttcgaacggattgttaaggcggacgaacacgtgattgaccagggagacgacggagataatttttatgtaatcgaacggggcacttatgatatcctagtgacaaaggataatcaaacaaggagcgttggtcagtacgataatcgcggctcctttggggagctggccctcatgtacaacacaccccgcgccgcgaccatcgtcgccacttcggaagggagtttgtggggcttggatagagtgacctttaggcggatcattgttaaaaacaatgctaagaagagaaaaatgttcgagagcttcattgagagtgtgcctttattaaagagcctcgaggtgtccgaacggatgaagatcgtggacgtcataggggaaaagatatacaaggacggagagcgcatcatcacacaaggagaaaaggcagactcattctacattattgaatcgggcgaagtgagtatcctgatcaggagcagaactaaaagcaataaagatgggggcaatcaggaggttgaaattgctcggtgtcacaagggacaatatttcggagaacttgcccttgtgaccaataaaccgcgcgcggcctccgcttacgccgtgggggatgtcaagtgcctcgtgatggatgttcaagcgttcgaacggctgctcggaccatgcatggatattatgaagcggaatattagccactatgaagagcagctggtcaagatgttcggctccagcgttgacctgggtaacctggggcagtag

SEQ ID NO: 130598 - DNA, 1257 bp, synthetic construct
  misc_feature 1..1257: note = Description of Artificial Sequence: Synthetic coding sequence
  source 1..1257: mol_type = other DNA
atgagcatcgaaatcccagcagggttaacagaactgcttcaggggtttacagtcgaggtcctgaggcatcaaccagcagatctgctggagttcgcattacagcactttacaagattgcagcaggagaatgagcgcaagggcactgcgcgatttggtcatgagggccgtacctggggggacctcggagccgctgcaggtggaggcaccccaagtaaaggagtgaactttgccgaggaacccatgcaaagcgattctgaggatggtgaggaggaggaggccgccccggctgatgctggcgccttcaatgcccctgttatcaaccggtttactcggagggcctctgtctgtgcagaagcttacaaccccgacgaggaagaagacgacgcagaatctcgcatcatccaccctaagacagacgaccaaaggaaccggctgcaggaggcgtgcaaagatattcttttgtttaagaacttggatccagaacagatgtcacaggttcttgacgctatgttcgagaagcttgtgaaagacggcgaacacgtcatagaccagggagacgatggcgacaacttttacgtcattgaccgcggtacatttgacatatacgtgaaatgcgatggcgtgggacggtgcgtgggaaattacgacaatcgtggctccttcggggagctcgcactcatgtacaacaccccaagagccgccacaatcactgctaccagccctggagctctgtgggggttggatcgggtcacgttcagaagaatcatcgttaagaataatgcaaaaaagaggaaaatgtacgaatccttcatcgaaagccttccctttcttaaatcactcgagttttccgaaaggctgaaagttgtcgacgtcataggcactaaggtatataacgatggggagcagatcatcgcacagggcgactcggccgacagcttctttatcgtggagtccggcgaggtgaagatcacaatgaagcgcaaaggtaagtctgaagtcgaggaaaatggcgccgtcgaaattgcccgctgtagcagaggccagtactttggagaacttgccctggtgactaacaaaccgcgggctgcttccgctcacgcaatcggtacagtgaagtgtctggcgatggacgtgcaggccttcgaacgacttctgggcccatgcatggaaattatgaaacgcaacatcgccacttacgaggagcagctggtagctctcttcggaactaacatggatattgttgagccaacagcttag

SEQ ID NO: 130599 - DNA, 1218 bp, synthetic construct
  misc_feature 1..1218: note = Description of Artificial Sequence: Synthetic coding sequence
  source 1..1218: mol_type = other DNA
atgagcattgaaatccctgccggccttacagagctcctgcaagggttcactgtagaggtgctccgacatcaaccggccgacctgctcgagtttgcattgcaacatttcacccgtctgcagcaggagaatgagcgtaaggggactgcccgctttggacacgaggggaggacatggggggacctgggagccgcagccggaggcggcactccaagcaagggggtgaatttcgcagaggaggcggcacctgcagatgcgggcgcgttcaatgccccagtgataaatagatttacccggcgagcttctgtgtgcgctgaagcctataacccggacgaggaagaggatgacgctgagtcaaggattattcatccgaagacagacgaccagcggaatcggctgcaggaagcctgcaaggatattttactgtttaagaacctcgatcccgaacaaatgtcccaggtcttggatgcgatgtttgaaaaattggtgaaggatggagaacacgtaatcgatcagggagacgacggtgacaacttttacgtgatcgacaggggcactttcgacatctatgtaaaatgtgacggggtcggtcggtgcgtagggaactacgataatagggggagctttggggaactggcactgatgtacaacactccacgggcagctactattaccgccactagccccggggccctttggggcctggaccgagttacatttaggcgaatcatcgtgaagaataacgccaagaagaggaaaatgtacgagtcctttatcgagagtcttccatttctgaagagtctagagttcagcgagcgcctcaaggtggtggatgtgattgggaccaaggtttacaacgatggggagcaaatcattgctcaaggtgatagcgccgactcttttttcattgtagagagcggcgaggtcaaaattacaatgaagcggaagggcaaaagtgaagtggaggaaaatggagcagtagagattgcaaggtgtagccggggtcaatacttcggtgagttggccctggttactaacaagccaagagcagcctccgctcatgctattggtaccgtaaagtgcctggcaatggacgtgcaggcctttgaacgactgctcggaccttgcatggaaatcatgaaacggaatattgcaacctatgaggagcagcttgttgcattgttcgggaccaatatggacatcgttgagcctaccgcttag

SEQ ID NO: 130600 - DNA, 1257 bp, synthetic construct
  misc_feature 1..1257: note = Description of Artificial Sequence: Synthetic coding sequence
  source 1..1257: mol_type = other DNA
atgtcgattgaaatccctgccggtctgactgagttactccagggatttacagtggaagtgctacgtcatcagccagccgatctcctggaattcgctctgcaacactttaccagactacaacaggagaatgaaagaaaaggcaccgctagatttgggcacgaggggagaacctggggagatcttggcgcggccgcgggcggcggcacccccagcaagggcgtgaatttcgcagaagagccgatgcagagcgacagtgaagacggagaggaggaggaggccgcacctgccgacgctggtgcctttaatgcccccgtaataaaccggtttacccggcgagcttccgtctgtgcggaggcatacaatcctgacgaagaagaggacgacgccgaatctcgaatcatccaccctaagactgacgaccagcgtaatcgcctgcaagaagcttgtaaagatattttactgttcaagaatttagatccagaacaaatgagtcaggtgctggatgccatgttcgagaagctggtcaaagacggggaacacgtgatcgatcagggcgacgatggcgacaacttttacgtgatcgatagggggacctttgacatttacgtcaagtgcgatggtgtaggtagatgtgtgggaaattatgacaaccggggctcattcggggagctggcactgatgtacaatactcctagggccgccacaatcacggctacctcgcctggcgccttgtggggtcttgaccgggtcacatttcgacgcatcatcgtgaagaataacgcgaagaaaagaaaaatgtacgagtctttcatcgaatctttgccatttcttaagtccctggaattcagtgagagactgaaggtggtggacgtgataggtactaaggtgtacaacgatggagagcagattattgcccagggcgactctgcagatagctttttcatcgttgagagcggtgaggtgaagataaccatgaaaaggaaagggaagtctgaagtggaggagaacggcgccgtagagatcgcacgatgtagtcgggggcagtacttcggggaacttgcccttgtgacaaataagccgcgcgccgcaagcgcccacgccatcgggactgttaagtgcctggccatggatgtccaggcctttgagcggctgctgggcccttgtatggagataatgaagaggaacattgctacgtacgaggagcaattggttgccctgttcggaactaatatggacatcgtagagccaaccgcttag

SEQ ID NO: 130601 - DNA, 1170 bp, synthetic construct
  misc_feature 1..1170: note = Description of Artificial Sequence: Synthetic coding sequence
  source 1..1170: mol_type = other DNA
atggaaaagcagaacatgttcctgcacggtagctacatcctgcgcgaggacgtgcggactgcaaacgttattgctgctgaagccgttacttgtctggtgatcgatcgcgactcattcaagcatctgattggagggttagacgatgtcagcaacaaggcctacgaggatgctgaagccaaagctaagtacgaagccgaggccgccttcttcgcaaacctgaaactctctgactttaatattattgatacattgggcgtcggcgggttcggtagagtggagttggtgcagcttaaatccgaggagtctaagacgttcgcaatgaagatactcaaaaaaaggcacatcgtcgacacacgccagcaggagcatatccgctcagaaaaacagattatgcagggagcccattccgactttattgtcagactctatcgtactttcaaggactcaaaatatctgtacatgttaatggaagcctgcctgggcggtgaattgtggaccattctaagagatagagggtctttcgaggattcgactacacgtttttatactgcatgtgtagttgaggctttcgcgtacctgcattccaaagggattatttaccgagacctgaagccggagaacctgatcctggatcataggggctacgccaaactggtggacttcggattcgcaaagaagatcggctttggcaaaaaaacctggacattctgtggaacgcctgagtacgtagcaccggagatcatcctcaataagggtcacgacatctccgccgattactggtctcttggaatactcatgtacgaactgctgacaggttcccctccctttagcggccccgaccccatgaaaacttacaatatcatattacgcgggatcgacatgattgagttccccaagaaaatagcgaagaacgctgccaacttgattaagaaattgtgcagagacaatccttctgagcggctgggaaatcttaaaaacggcgtaaaggacatccaaaaacacaaatggtttgaaggcttcaactgggagggcctccgcaagggcacgctcaccccaccaattatccctagcgtagccagcccaactgacacaagcaatttcgattcttttccagaagataacgacgaacctcctccagatgataattctgggtgggacattgatttttag

SEQ ID NO: 130602 - DNA, 852 bp, synthetic construct
  misc_feature 1..852: note = Description of Artificial Sequence: Synthetic coding sequence
  source 1..852: mol_type = other DNA
atgaaaatactgaagaaacgacacatcgttgacacacggcaacaagaacacatccgctccgaaaagcagattatgcagggcgcccactccgacttcattgtgcgcctgtacagaaccttcaaggatagcaagtatctgtacatgctcatggaggcttgtctggggggagaactgtggaccattttgagagaccgtgggtcttttgaagattcaactacaagattttacaccgcctgcgtagttgaggcttttgcatatctgcacagcaagggcattatctatagggacttgaaaccggaaaacctcatcctggaccaccgcgggtacgccaaacttgtagatttcggattcgctaaaaaaatagggtttgggaagaaaacatggactttctgcggaacgcccgagtatgtggcccctgagatcatcttaaacaaaggtcacgatatcagcgctgattactggtccctgggaattttaatgtacgaactcttaacgggatctccaccgttctcaggacctgaccctatgaagacgtacaacatcatactaaggggcatagacatgattgaattccccaagaaaatcgccaagaacgcggccaacctgatcaagaaactgtgtagagacaacccatccgagcggttaggcaacctcaaaaatggtgtcaaggatatccagaaacacaagtggttcgagggctttaactgggagggtctccgaaaaggaacattaactcctccgataataccttccgtcgccagccccacagatactagcaacttcgactcctttcccgaagacaacgacgaaccgccgcctgacgataattcgggttgggacattgacttttag

SEQ ID NO: 130603 - DNA, 546 bp, synthetic construct
  misc_feature 1..546: note = Description of Artificial Sequence: Synthetic coding sequence
  source 1..546: mol_type = other DNA
agctgcataataaaggagggggacgtgggatccctggtctacgtgatggaagatggtaaggttgaagtcaccaaggagggagtcaagctgtgtacaatgggccccggtaaagtcttcggtgagctggccatcctgtacaattgcacccggactgccacagtgaagactcttgtcaatgttaagctgtgggcaattgacaggcaatgttttcagacgataatgatgagaactggcctcattaagcacacagaatatatggagttcctgaagtcagttcccacatttcagtctcttcccgaggaaatactgtcaaaactcgcggatgttctggaggagacccattacgagaacggcgaatatataatccgccagggggccaggggagacaccttcttcataatctccaaaggcaccgtgaacgtcacccgagaagacagcccatccgaggatccagtctttttacggacgctgggaaagggagactggttcggagagaaggcgctgcagggctggacttggaacctctttgagtacgtcgtagaatag

SEQ ID NO: 130604 - DNA, 2061 bp, synthetic construct
  misc_feature 1..2061: note = Description of Artificial Sequence: Synthetic coding sequence
  source 1..2061: mol_type = other DNA
atgggcaccctccgcgacctgcagtatgcactacaggagaaaatcgaagaactgcgtcagcgggatgccctcatcgatgaattggaattagagctggaccagaaggacgagttgatacagaagctccagaacgagttagacaagtaccgatccgtgatcagacccgctacccaacaggcgcaaaagcagagcgcgtctacccttcagggcgagcccaggacaaaacggcaggctatttctgcagagcccaccgcattcgacattcaagaccttagccacgttactctgcctttctaccccaaatccccccagagtaaggatttgattaaggaggccattcttgataatgatttcatgaaaaacttagagttgtctcaaatacaggagatagtagattgcatgtatccggtggagtatgggaaggactcatgcatcatcaaggagggagacgtcggaagcctcgtgtacgtgatggaggacggcaaggtagaagtgaccaaggaaggggtaaagctgtgcactatgggccccggcaaagtttttggtgagttggccatcttgtacaattgcacgcgcaccgccactgttaaaactcttgtaaatgtgaaattgtgggcgattgatcggcagtgttttcaaactatcatgatgcgaactggactgataaagcacaccgagtatatggagtttttgaagtctgtgcccactttccaaagcctgcccgaggagattttgtcaaaactggccgatgtcctggaggaaacccattatgaaaatggcgagtatattattaggcagggggcacggggcgacaccttctttatcatcagtaagggtacggttaacgttacaagggaggactcaccctcggaagaccccgtttttttgcggactctgggaaagggggactggtttggcgagaaggccctccagggagaagacgtcagaacagccaatgtgatagctgccgaggctgtaacatgtctggtaatcgaccgcgattcatttaagcatctcattggcggattggatgatgtaagcaataaagcatatgaagacgccgaagcaaaggctaaatacgaggctgaggctgccttcttcgccaatctgaagctgtctgattttaatatcatcgacaccctgggagtcggcggatttggcagagtggagctggtgcaactcaagtccgaggagagtaaaacgtttgccatgaaaatcctgaaaaagaggcatatcgtggatacacgccaacaggaacatatcaggagcgaaaagcagatcatgcagggtgctcattctgacttcattgttcggctgtaccggacctttaaggattccaagtacctgtatatgcttatggaggcgtgcctcggaggcgagttgtggactattcttagagataggggtagctttgaagattctactacgcggttctatacagcttgtgttgttgaagcattcgcctaccttcattccaaaggaatcatatacagagatttgaagcccgagaacctgatactggatcatagaggttacgcaaagttggttgactttggatttgctaagaaaattggatttggaaaaaagacttggaccttttgtggaacgcccgagtatgtggcaccagaaatcatactgaacaaaggccacgacatatctgctgattattggtcacttggcattctgatgtacgagctgctcaccgggagcccgcccttttcaggaccagaccctatgaaaacgtataatatcatactgcgcggcatcgacatgattgagttccccaaaaaaatcgctaaaaatgccgccaatctgatcaaaaagttatgccgcgacaaccccagtgaaagactcggcaatctcaagaacggagtcaaagatatccagaagcataagtggtttgaaggcttcaactgggaggggctgcgtaaagggaccctcaccccccccattatcccatctgtcgccagcccaaccgatacatcaaatttcgattcttttccagaagataatgatgaacccccacctgacgataactctggctgggacattgacttctag

SEQ ID NO: 130605 - DNA, 1980 bp, synthetic construct
  misc_feature 1..1980: note = Description of Artificial Sequence: Synthetic coding sequence
  source 1..1980: mol_type = other DNA
atgttaaaggaagagagaatcaaagagcttgagaaaaggctgtctgaaaaggaggaggagatccaagagctgaagagaaaactacacaagtgccagagcgtactccccgtgccgtctacccacattggtcctcgcaccacccgggctcagggcatatctgcggaacctcaaacctacagaagcttccatgacctcaggcaggcgtttaggaagttcactaagtccgagcggtcgaaagaccttatcaaggaggccattctggataatgacttcatgaagaatctggagctgtcacagatccaggaaatcgttgactgtatgtatcctgtggagtacggcaaagacagctgcatcatcaaggaaggcgacgttggctcattagtgtacgtgatggaggatgggaaggtggaggttaccaaagagggagtcaagctctgcactatgggacccggcaaggtctttggcgagctggcaatcctgtacaactgtacacgcaccgcgacggtgaagactctggtcaatgtgaaattgtgggcaatagatcggcaatgctttcagaccatcatgatgcggacgggacttattaagcacaccgaatacatggagttcttaaagagcgtccctactttccaaagcctcccggaggaaattcttagtaagttggccgatgtactcgaggaaacccattacgagaatggggagtacatcattaggcagggagccagaggcgacactttctttattatttcaaaaggcacagttaatgtgaccagggaggattccccaagtgaagacccagtgtttctacgtaccctcgggaagggcgattggttcggcgagaaggccctccagggggaagacgtgcgcacagcaaatgtcatcgccgcagaagcggttacatgcctggtaatcgatcgggacagcttcaaacatctgatcggggggctcgacgacgttagtaacaaagcctacgaagacgccgaagccaaagctaaatatgaggccgaagccgccttcttcgccaatctcaaattgtccgacttcaacatcatcgatactctgggagtggggggcttcgggcgcgtggaactcgtccagctgaagagtgaagagtccaagacctttgcaatgaagatcctcaaaaaaagacatattgtcgacaccagacagcaagagcacatcagatccgaaaaacagataatgcaaggcgcacattcggatttcatcgtgagactgtacaggactttcaaggacagcaagtacctatacatgcttatggaagcgtgcctgggaggggagttatggaccatcctgagagacaggggatcatttgaggactcaactaccagattctatactgcatgcgtggtcgaggcatttgcgtatctccatagtaagggtatcatctaccgcgacttgaagccagagaatctcattttagatcatcgaggctatgctaagctggtcgactttggctttgccaagaagatagggtttgggaagaagacctggactttctgtgggaccccagaatatgtagctcccgaaataatactcaacaaaggccatgatatttccgccgattactggtctcttggtattttgatgtatgagctgctgaccggtagccctccattcagcgggccagacccgatgaagacctacaatataatcttaaggggaatcgatatgattgagtttcccaagaagatcgctaagaacgccgccaacctaataaagaagctttgccgagataatccgagtgaacggctgggcaacctaaaaaacggtgtgaaggacatacagaagcacaagtggtttgagggctttaactgggagggattacgcaaaggaaccttgaccccacccattattccaagtgtggcctctcccactgacacaagtaatttcgatagtttccccgaggataacgatgagcctccaccggacgacaattctggttgggacatcgacttttag

SEQ ID NO: 130606 - DNA, 2016 bp, synthetic construct
  misc_feature 1..2016: note = Description of Artificial Sequence: Synthetic coding sequence
  source 1..2016: mol_type = other DNA
atgtcagagctagaagaagatttcgccaaaattttaatgttaaaggaagagagaattaaagaactggagaagcgtttgtcagaaaaagaggaggagatacaggagctgaaacgcaagcttcataagtgccaatccgtgctcccggtacccagcacgcacatcggacctcggaccactagagcccagggcattagtgccgagccccagacataccggtcattccacgatctgcggcaagcttttaggaagtttactaagtcagaaaggtccaaggacctcatcaaggaggccattcttgataatgattttatgaagaatctggagctgagccaaatacaggagattgtcgactgtatgtatcccgtggagtacggtaaagattcctgtattattaaagaaggcgatgtcgggtccctggtttacgtcatggaggacggaaaagtcgaggtcacaaaggagggagtgaagttgtgtactatgggaccaggcaaggtttttggcgagttagctattttgtacaattgcactaggaccgcaacagttaaaaccctggtgaacgtcaagctatgggcaattgacagacagtgttttcagacaattatgatgcgtacaggtttgatcaagcacaccgaatacatggagttcctgaagtccgtgcccacgttccagagccttccagaagaaattctttcgaagctggcagatgtgttagaggaaacccactacgagaatggcgagtatattatccgccagggtgcacgtggagacacattcttcataattagtaagggaaccgttaatgtgactagggaagattcccccagtgaggatccagtgtttctacgtactctgggcaagggggactggttcggcgagaaagccctgcagggggaggacgtgcggacggcaaacgtcattgcagccgaagccgttacctgcctagtcattgatagggattccttcaagcatttgatcggtggcctcgatgatgtctccaataaggcatatgaggacgccgaagctaaggcaaaatacgaggccgaagctgcctttttcgccaatttgaaactctcagactttaatatcattgataccctgggcgtgggaggtttcggccgagtggagctcgtgcaactgaaatcagaagagtcaaaaaccttcgccatgaagattctgaagaaacggcacattgttgatacgcggcagcaagagcatattaggagcgagaaacagatcatgcaaggagcacatagcgacttcatcgtgaggctttataggacgttcaaagattccaaatacctctacatgcttatggaggcttgtcttggaggagagctgtggacgatcttgcgtgataggggatccttcgaggacagtacaactagattttacacggcatgcgtcgtggaagccttcgcatacctgcactccaagggaattatttatagggatttaaagcctgaaaacctgattttagatcaccgcggctacgccaaactagtcgacttcggatttgcaaaaaaaatcgggttcggtaagaagacctggaccttttgcggtaccccagaatacgtggccccagaaattatcttgaataagggccatgacatctctgcagattattggagtctaggaatactaatgtatgagctgctgacggggtctcctcccttcagtggccccgatcccatgaagacttacaacatcattctgagaggcatagatatgatcgagttcccaaagaaaattgccaagaacgcagctaacctgataaaaaagttatgccgcgacaaccctagtgagcggctgggcaatctcaaaaacggcgtgaaggacatacagaagcacaagtggttcgagggcttcaattgggagggactcagaaaaggcaccctgacaccacccattattccgagcgtggcctcacccacagacacaagtaacttcgactccttccccgaggacaacgatgaaccgcccccagacgacaactccggttgggacattgatttttag

SEQ ID NO: 130607 - DNA, 2289 bp, synthetic construct
  misc_feature 1..2289: note = Description of Artificial Sequence: Synthetic coding sequence
  source 1..2289: mol_type = other DNA
atgggaaatggctcagtgaagccgaagcacagcaaacatccagatggtcactctggcaacctgactactgacgcgctgcgcaacaaggtgacggagctggagagggaactgagaagaaaagatgcagagattcaagaacgcgagtatcacctaaaagagctgagagagcagctgagtaaacagactgtagccattgccgagcttacagaggagttacagaataagtgcattcagttgaacaaattacaggacgtggtgcacatgcagggcggctcccctcttcaggcatctcccgataaagtgcccctggaagtccatagaaagacctctggtctggtgtctctgcatagccggcgcggcgccaaagctggagtgagtgctgagcccacaacccggacctatgacctcaacaagcccccagagttcagcttcgagaaggcacgcgttcgcaaggacagctctgaaaaaaaactgataaccgatgccctcaacaagaatcagttcctgaaaaggctggacccccagcagatcaaagatatggtggagtgcatgtatggtaggaattaccagcagggctcctacatcatcaagcagggtgaacctggcaaccacatcttcgtgcttgctgaaggcaggctggaagtgttccagggcgaaaagctcttgagctctatcccaatgtggaccaccttcggagagctggccatcctttataattgcactcgcaccgcctccgtgaaggctattaccaatgttaagacctgggccctggatcgggaggtgtttcagaatatcatgcggaggacagctcaggcaagggatgagcagtacagaaacttcctccggagtgtctccttgctgaaaaacctccctgaagacaaactgacaaaaatcatcgattgcttagaggtcgagtattacgataagggcgattatataattagagagggagaggaagggtctactttctttatactagccaaaggcaaagttaaagttacgcaaagcaccgagggccacgatcagccgcagctcatcaagacactgcagaagggggaatacttcggggagaaggctctgatctcagatgatgtgcgtagcgcaaatataatagctgaagagaacgacgtagcttgtctcgtgatcgatcgcgaaacattcaaccagacagttgggacgttcgaggagctgcagaaataccttgaagggtacgtcgctaacctgaaccgcgatgatgaaaagagacatgcaaaaagaagcatgagtaactggaagttgtctaaagctctgagcctcgaaatgattcaactgaaggaaaaagtggcccgtttttcttccagcagcccattccaaaatctggagattatcgccactctcggagtgggcggttttggtagggttgaactcgtgaaggtcaaaaatgagaacgttgcgttcgcaatgaagtgcattagaaaaaagcacattgtggacactaagcaacaggagcatgtttactcggaaaaacgaatcctcgaagaactgtgttcacctttcattgtgaaactatacagaactttcaaagacaataagtacgtgtatatgctgttggaagcatgtctgggaggggaactctggtcaattctacgagatcgtgggtcttttgacgagcccaccagtaaattttgtgtggcctgtgttacagaggcatttgattacttgcaccggctcgggattatttacagagatctcaaaccagaaaacttgatcctagacgccgaaggatacctgaagctggtggatttcggatttgccaaaaaaatcggttcaggacagaaaacctggaccttttgtggcactcctgaatacgtagctcctgaagtgatcctgaacaagggccatgatttctctgtggacttttggagcctgggcatcctggtgtatgaactcttgaccggaaacccaccctttagtggcgtggaccaaatgatgacatataacctgattctaaaaggtattgaaaaaatggactttcctcgcaaaattacacgcagacccgaggacctgatcagaagactgtgtcgacaaaaccccaccgagagactcgggaatctgaagaatggaatcaatgatataaaaaagcataggtggctgaacggcttcaattgggaaggactaaaggcacgttcccttccaagtcctctgcaaagggaactgaaggggcctatcgatcacagctattttgacaagtaccccccagaaaagggcatgccgcccgacgagctgtccggctgggacaaggatttctag

SEQ ID NO: 130608 - DNA, 2289 bp, synthetic construct
  misc_feature 1..2289: note = Description of Artificial Sequence: Synthetic coding sequence
  source 1..2289: mol_type = other DNA
atgggcaatgggtccgtgaaaccaaaacactcaaagcatcccgatggccactctggtaacctaacaacagatgccttgcgaaataaggtgaccgaactggagcgtgaactgcgcaggaaagacgccgagatccaagagcgcgagtaccatctcaaagaattgagggaacagctgtcaaaacaaaccgttgccatcgccgagctgactgaggagctgcagaataaatgcatacagttaaacaaactgcaggatgtggttcacatgcaaggggggtcaccactgcaagcctcccccgataaggtcccattggaggtacatcgcaagacatccggcctggtttctctacacagccgccgcggggccaaggcgggcgtctctgcagaaccgaccacaagaacatacgacctcaacaaaccacccgaattttcttttgagaaggctcgggtgagaaaagatagctctgagaagaagctgatcactgacgcactgaacaaaaaccagttcctgaaaaggctcgacccccagcagattaaagatatggttgagtgcatgtacggacggaattaccaacagggctcatatattatcaagcagggcgaacccgggaatcatatctttgtccttgcagaaggacgattggaggtgttccagggggaaaagctcctctcctcaattcctatgtggacaacattcggagagctggccattttatataactgcacccgtactgccagcgtgaaagcaattacaaatgtgaagacatgggctctggatcgtgaagtctttcaaaatataatgagaaggacagcccaagcccgagatgagcagtataggaattttcttagatccgtctctctcctgaagaacctacccgaggataaactaaccaagattatcgactgcttggaagtggagtattatgataagggagattatatcatccgagaaggagaggagggctcaacattttttattttggccaaaggaaaagttaaggtaacacagagcactgaaggtcatgaccagccccagctgatcaagaccctgcaaaagggagaatacttcggagaaaaagcgctgatctctgacgatgtaaggagtgccaatattatcgctgaagagaatgatgtagcgtgccttgtgatcgatcgcgagacatttaatcagaccgttggaacatttgaagaactccagaagtacttggaggggtacgttgctaacctgaaccgcgacgatgagaagcggcatgccaaacgctctatgagcaattggaagttgtcgaaggccctgagcttggagatgatacagctgaaagagaaagtagccagattcagcagctctagcccgttccaaaatcttgaaatcatcgcgacccttggagtaggcggatttgggagggtggaattagtaaaagtgaagaacgagaacgtggctttcgctatgaaatgcatccggaagaaacatattgtggacactaagcagcaagaacatgtgtattctgaaaaaagaatcctggaagaattgtgttctccctttatagtaaaactgtacagaaccttcaaggacaacaagtacgtgtacatgttgcttgaagcctgtctggggggcgaactgtggtctattcttagagaccgcggcagtttcgacgaacccacctccaagttttgcgtagcttgtgtaacagaggcatttgattacctacatagactgggcatcatttatagggacctgaagcccgaaaacctgatcctggacgccgaaggttatttgaaactggtggatttcgggttcgctaagaaaattggatccggccagaagacctggacgttctgtggaacccccgagtacgtggcgcccgaggtaatcttgaataaaggacacgatttttccgtcgacttctggtctcttggaatccttgtatatgaattactgactggcaatcctccatttagtggggttgatcagatgatgacctataatctgattctgaagggtattgagaagatggattttccgcgtaaaattactaggagacccgaggatctgattagaaggctgtgccggcagaatcccaccgaacgcctaggcaatctcaaaaacggcatcaacgacataaaaaaacaccgctggctgaatgggttcaactgggaaggtcttaaagcccgcagtttgccctctcctttgcagcgggagctcaagggccctatagaccatagctatttcgacaagtaccctccagagaagggcatgcctccagacgagctgagcggatgggacaaagacttctag

SEQ ID NO: 130609 - DNA, 2202 bp, synthetic construct
  misc_feature 1..2202: note = Description of Artificial Sequence: Synthetic coding sequence
  source 1..2202: mol_type = other DNA
atgggcaatggctccgtgaagcctaaacattccaaacaccccgatggacactctggcaatttaactaccgacgctctccgtaataaggtgactgagctggaacgggaactgcgtaggaaagatgcagaaatacaggagcgcgaataccatctcaaagagttacgggaacaattgagtaaacagaccgttgctattgctgaattaaccgaagagctgcagaacaaatgcattcagttgaataagctccaggacgtggtgcacatgcagggtggtagtccgctccaggcttcgcccgacaaggtaccactcgaagtgcacaggaaaacatcaggcctggtgagccttcattctcgcagaggcgcgaaagcaggcgtgagtgccgaaccaacaaccaggacctatgatctgaacaagccaccagaattttccttcgagaaagcccgcgtccggaaggattcatctgaaaagaagttgattaccgacgctctgaataagaatcagttccttaagcgccttgacccccagcagattaaggacatggtcgagtgcatgtacgggaggaactatcaacaagggagctacattatcaagcagggcgaaccaggcaaccatatcttcgtcctggccgaggggagactggaagtgttccagggcgagaaattgctctcgagcatccctatgtggacaacatttggcgaactcgcgattttgtataattgtacccgcaccgcttctgtgaaagcgatcaccaatgtaaagacatgggcactcgatagggaggttttccagaacatcatgcgaaggacagcacaagctcgggacgagcagtatagaaactttctgcgatccgtatccctactcaaaaacctgccagaggataaattaactaagattatcgactgtttggaggtcgaatactatgacaaaggagactatattataagagaaggcgaggaagggagtaccttcttcattttggccaagggaaaagtgaaggttacacagtctactgaaggccacgatcagccacagctgatcaaaaccctccagaagggtgagtactttggcgaaaaggctcttatctctgatgacgtgaggtctgctaacattatcgccgaggagaatgatgtcgcttgcttggtgatcgacagagaaacgtttaatcagaccgttggcacatttgaggaattgcagaaatatctggagggctacgtggctaatctgaacagggatgatgagaagcgccacgcaaagagaagtatgtcaaactggaagctctctaaagccttgtcgttagagatgatccaacttaaagaaaaggtgaaagtgaagaatgaaaacgtggcctttgcgatgaagtgcattcgaaagaagcacatcgttgacaccaagcagcaggagcacgtctatagcgaaaagagaatcctggaggaactttgctcacccttcatagtgaagttgtatagaacgtttaaagacaataagtatgtttacatgctcctggaggcatgtttagggggcgagttatggtcgattcttagggatagaggcagcttcgacgagccgaccagtaagttttgtgtggcttgcgtcaccgaagccttcgactacctccataggctcggaatcatatatagagacctcaaacctgagaatctgatcctcgatgcggagggttacctgaagctagtggattttggctttgccaaaaagattggcagcgggcagaagacatggactttctgtggcacaccagagtacgttgcccctgaggtgatccttaacaaagggcacgatttttccgtcgatttctggtcgctgggaattttagtgtatgagctcctgacagggaacccccccttcagtggcgttgaccagatgatgacatacaaccttatcttgaagggtatcgagaaaatggatttcccccggaaaatcacacgacggccggaggacttaattaggcggctatgtcgccagaacccaaccgaaaggctgggcaacctgaagaatggaatcaacgacatcaagaagcacagatggctgaatggtttcaattgggaaggactgaaagcccgttctctgcctagccctctgcagagagagctgaaagggcctattgaccacagctattttgataagtacccacccgaaaaagggatgcccccggacgagctgagtggttgggacaaggatttctag

SEQ ID NO: 130610 - DNA, 1029 bp, synthetic construct
  misc_feature 1..1029: note = Description of Artificial Sequence: Synthetic coding sequence
  source 1..1029: mol_type = other DNA
atgagcaactggaaactctccaaggcgttaagcctggaaatgatccagctcaaagagaaggttgcacggttctcgtccagtagtccgtttcagaacctcgaaatcattgcaaccttgggtgtgggcgggtttgggagggttgaactggtgaaggtgaaaaacgagaatgtagcatttgccatgaaatgcataagaaagaagcatatcgtcgatactaagcaacaggagcatgtctactctgagaagagaatcttagaagagctgtgctccccttttatagtcaaactctaccgcaccttcaaggacaacaaatacgtttatatgttactggaggcctgtctcggaggcgagctgtggagcatcttgagggacaggggcagctttgacgaacctaccagcaaattctgtgtggcgtgtgtcactgaggccttcgattacctccaccgcttgggcatcatctatcgagacctcaaaccagaaaacctgattctggatgcggaagggtacctcaaattggtggactttgggtttgccaagaaaataggatccggccaaaaaacgtggactttttgcgggactcctgagtacgtggcacctgaagtgattcttaataagggtcatgacttttcagtggacttctggtctttgggcatccttgtgtatgaattactgactggcaatccacccttcagcggcgtcgatcagatgatgacttacaacctcatcctgaaaggaatagaaaaaatggacttccccagaaagattaccagaaggccagaggacctgatccgacgcctgtgtcggcagaatcccaccgagcgcctgggcaacctgaagaacggaattaacgacatcaaaaaacaccgctggttgaacggttttaattgggagggcctcaaggctcgatccttgccatcccctctgcagcgagagctgaaagggcccatcgatcactcatactttgataagtacccacctgagaaggggatgcccccagatgagttaagcggctgggacaaagacttttag

SEQ ID NO: 130611 - DNA, 942 bp, synthetic construct
  misc_feature 1..942: note = Description of Artificial Sequence: Synthetic coding sequence
  source 1..942: mol_type = other DNA
atgagtcagtcgcgccaccgcgccgaggcacccccactagaacgcgaggactccggtacatttagcttgggtaaaatgatcactgccaagccaggtaagacaccgattcaggtcttgcatgaatatggaatgaagactaaaaacatccccgtgtacgagtgtgaacgatctgatgtccagatacacgtgcccacattcacttttagagtaacagtaggtgacattacttgcacaggggagggtacctctaagaagttggctaagcatagagcagccgaggccgccataaacattctcaaggcaaatgcctccatttgctttgcagtgcccgaccctctgatgcctgatccctccaaacagccgaagaatcaacttaacccgataggcagcctgcaagagctcgccatacaccatggctggaggttaccagagtatactctttcacaagagggaggccccgctcataaaagggaatacaccacaatttgtcgacttgagagttttatggagactggaaaaggggcttcaaaaaaacaggctaaaaggaatgccgcagagaaattcctggctaagttttcgaacatttcccccgagaaccacatctccctgaccaatgtcgttgggcatagcctgggctgcacatggcactccctcaggaattcaccaggcgagaaaatcaacctgcttaaacgtagtttgctgtcaatcccaaacacagactatattcaattgttgtcagagatagcaaaagaacagggttttaacattacataccttgacatcgatgagctcagcgcgaacggacagtaccagtgcctcgctgagctgagtacgagtcccattactgtctgtcacgggtccggcattagttgcggcaatgcacagagtgatgctgcacataacgccctgcaatacctgaaaattatcgcagaaaggaagtag

SEQ ID NO: 130612 - DNA, 909 bp, synthetic construct
  misc_feature 1..909: note = Description of Artificial Sequence: Synthetic coding sequence
  source 1..909: mol_type = other DNA
atgcaatctaccccattctgtggtttctgttcactgggaaaaatgatcacagctaagcccggcaagacgcctatccaggtgctccacgaatacggaatgaaaacgaagaacatacccgtttacgaatgcgagcgttctgacgttcagattcacgtcccgacttttacatttcgagtgaccgtgggagacataacgtgcactggcgagggcacttccaaaaagcttgcgaaacaccgggcggcagaagcagccatcaacatactgaaggcaaatgcctccatatgcttcgccgtgcctgaccccttgatgcccgatccatcaaaacagcctaaaaaccagcttaatcccataggatctctacaggagctggcaattcaccacggatggagacttcccgaatacacactatctcaggaaggcggaccagctcataagcgggagtatacaactatttgccgactcgagagctttatggagacaggaaaaggggcctcaaagaagcaggccaaaaggaatgccgccgagaaatttctagcaaaattcagtaatatcagtccggagaaccacatatccttgaccaatgtggtcggacactcacttgggtgcacttggcattctcttcggaatagccccggcgagaagatcaatcttcttaaaagatcccttctgtccattcccaatacggactatattcagcttttaagcgaaattgccaaggagcagggttttaacattacatatcttgatattgacgagctctccgcaaacggccagtatcagtgtctcgctgaactgtctacctctcccatcacggtttgccatggcagcggaataagctgcgggaacgcacagagcgatgctgcccacaacgccctacagtatttgaagattattgccgaacgcaagtag

SEQ ID NO: 130613 - DNA, 603 bp, synthetic construct
  misc_feature 1..603: note = Description of Artificial Sequence: Synthetic coding sequence
  source 1..603: mol_type = other DNA
atgccggatccctctaaacagcctaaaaaccagctgaaccccattggttccttgcaggaattggcgattcatcacggctggcggctccctgagtatacattgtctcaggaggggggaccagctcataaaagagagtacacaacaatttgcagactagagtcgttcatggagacaggcaagggcgcctctaaaaagcaggccaaacggaacgccgctgagaagttcctggccaagttttctaatatctcgcctgaaaatcacatatcactgacaaatgtggtcggccatagtctaggatgcacttggcactccctgcgtaattcacctggggaaaagatcaacctgctcaagcgctcccttctcagtatcccaaacacggattacatccaactgctgtctgagatcgctaaagagcagggctttaacatcacatatttggatattgacgagctgtcagcaaacggccaatatcagtgtctggctgagctgtcgacctcccccatcaccgtttgtcatgggtctggaattagctgcgggaatgcacaatccgatgctgcccacaatgcactgcagtatctgaagattattgctgagagaaaatag

SEQ ID NO: 130614 - DNA, 867 bp, synthetic construct
  misc_feature 1..867: note = Description of Artificial Sequence: Synthetic coding sequence
  source 1..867: mol_type = other DNA
atgattaccgctaagcccggcaagaccccaatacaggtgctccatgaatatggaatgaaaacaaagaatattcccgtttacgaatgtgaaagatcggatgtccagattcatgtcccaacatttacgtttcgagtaacagtgggtgacattacttgtactggtgagggcacatccaaaaagctggccaagcaccgggctgctgaagctgccatcaatatcctgaaggccaacgcctcaatttgctttgctgtccctgatcccctgatgccggatccgagcaaacagcctaaaaaccagttgaaccccattggtagcctgcaggaacttgctatccaccatggttggcgattgcccgagtataccttgtcccaggaaggaggacccgcgcataaaagagagtacaccaccatctgtcgtttggaatcgtttatggagactggcaaaggcgcttctaagaaacaggcaaagcgtaacgcagctgagaagtttctggccaagttcagcaacattagccccgaaaatcacatctccctgaccaacgtcgttggtcactccctcggttgcacttggcactctcttagaaattcgccgggtgaaaaaatcaacttactcaagaggtcactgttgagcatcccgaacactgattatatacagctgctctcagagatagcaaaggagcagggttttaatattacctacctagacatagacgaattatccgccaacggccaataccaatgcttggcagaactcagtacgagcccaattacggtttgccatgggagcgggattagttgtggcaatgcccagagcgacgccgcacacaatgccctgcagtatctcaagatcatcgccgagcgcaaatag

SEQ ID NO: 130615 - DNA, 1077 bp, synthetic construct
  misc_feature 1..1077: note = Description of Artificial Sequence: Synthetic coding sequence
  source 1..1077: mol_type = other DNA
atggaggccccagggttggctcaggccgccgctgccgaatcagactctaggaaggtcgcagaggaaacgccagatggcgctcccgctctgtgtccatcgcctgaagcattgagtcctgaacctcccgtctattcactccaggatttcgatacactcgccacagtgggaacaggtactttcggcagagtgcacctggtaaaggaaaaaaccgctaagcacttcttcgcgctcaaagtaatgtcaatacccgacgttatccgcctgaagcaggaacagcatgtgcacaacgaaaaatccgttcttaaagaggtttcccatccattcctgatccggcttttctggacctggcatgatgaaagattcctctacatgctgatggaatacgtccccggtggtgagcttttcagttatcttagaaatcgaggaagattcagctctactactggccttttctactcagcggaaattatttgcgccatcgaatacttgcactcaaaggagatcgtctaccgcgacctgaaacccgagaacattctgctggacagggatggacacatcaagctaacggactttggctttgccaaaaaactggtggaccggacatggacgttgtgtggaacgccagagtaccttgcccccgaagtcattcaatccaagggacacggccgggctgtagactggtgggctctaggaattctcatatttgagatgctgtctggctttccacccttcttcgatgataacccattcgggatatatcaaaaaatcctggctgggaaaattgactttcctcgccatcttgattttcatgtgaaggatctaatcaaaaaattgctggtagtggatcgaacaagaagactgggcaacatgaagaacggcgcaaacgacgttaagcaccaccgctggttccgctctgtggactgggaggcggtgccacagagaaagctcaagccccccattgtccccaaaattgcaggcgacggggatacctccaacttcgaaacatacccagagaatgactgggacaccgctgcccccgtgcctcagaaggatctggaaatcttcaagaatttttag

SEQ ID NO: 130616 - DNA, 1983 bp, synthetic construct
  misc_feature 1..1983: note = Description of Artificial Sequence: Synthetic coding sequence
  source 1..1983: mol_type = other DNA
atggacgattggaagccatctcctcttattaaaccattcggggcacgcaaaaagcgttcttggtatctaacttggaagtacaagctgacaaaccaacgagcgctgagaagattctgccaaacaggggccgtactgtttttactggtcacagtcattgtgaacatcaaactcatactagatactcggcgggccatctcggaggccaacgaagaccctgagcccgaacaggactatgacgaagctttagggagactggagccacccagacggagaggttccgggccgaggcgagtgttagacgttgaggtgtacagttcccgatccaaagtgtatgtcgcagtggatggcactaccgttcttgaagacgaagcccgggagcagggtcgcggcattcatgttattgttctgaatcaggccacagggcacgttatggcaaaacgcgtgtttgacacgtattccccccatgaggacgaggcaatggtcctgtttcttaatatggtggccccaggacgcgtgttaatctgtaccgtgaaagacgagggcagtttccaccttaaggatactgccaaagcgctgctacggtcattggggtcccaggctggccctgccttagggtggcgggatacatgggctttcgttggtcgtaaaggtggacccgtattcggcgagaagcacagtaagtcgccagccctgtctagctggggagacccggtcttactgaagaccgacgtgcccctgtcttcagcagaggaggccgagtgtcactgggccgacacagagcttaatcgacgtcgcaggaggttttgctccaaagtcgagggctacggttctgtctgttcctgcaaggaccccacccccatagagttctctcctgaccccctcccagataataaagtgctgaacgttcctgtcgcggtgattgccggcaaccgaccaaactacctttatcgcatgctcagaagtttgctgagcgcccagggggtgagtccccagatgattacagtctttattgacggttactacgaggaacctatggacgtcgttgcactgtttggcctgaggggaatacaacacacccccatctcaatcaaaaatgcccgtgtctcacagcactacaaagcaagcctaacggctacctttaatctttttcccgaggcaaaattcgccgtggtcctggaagaggaccttgacatcgcagtcgatttcttctcgtttcttagtcaatctatccacctgctcgaggaggatgactccctgtactgtataagtgcatggaatgatcaggggtacgagcacactgcagaggatcctgctctcttgtatcgtgttgaaaccatgccgggcctgggttgggtattgcggcgcagcttgtacaaggaagaattagaacctaaatggccgaccccagagaagttgtgggactgggacatgtggatgagaatgccggagcagaggagagggcgcgagtgcatcattcctgacgttagtcggtcatatcactttggtatcgtcgggctcaacatgaacggttatttccacgaggcctacttcaagaagcacaaattcaataccgtgcctggggttcagctgcgaaatgtggactcacttaagaaagaggcctacgaagttgaagtgcataggctgctgtccgaagctgaggtgttggatcatagtaagaatccctgcgaggattctttcttacctgatacagaggggcatacttacgtcgcctttatcagaatggagaaagatgacgattttacgacctggacccagttagctaaatgcctgcatatttgggacctggacgtgcgtgggaatcaccgtggcctgtggcgcctctttcgcaaaaaaaatcacttcctgatggtcggcgtgccagcttccccatatagtgtcaagaaaccccctagcgtgacccctatttttcttgagccaccgcctaaagaggagggcgctcccggtgctccagagcaaacttag

SEQ ID NO: 130617 - DNA, 2247 bp, synthetic construct
  misc_feature 1..2247: note = Description of Artificial Sequence: Synthetic coding sequence
  source 1..2247: mol_type = other DNA
atggacgattggaagcccagtccactgattaaaccctttggcgctcgtaaaaagaggagctggtatctgacgtggaagtataagctgaccaatcagagggcccttcgcagattctgtcagactggtgctgttctgttcctactcgtcacagtgatcgttaacattaagttgattctcgacacaagaagagcaatcagcgaagccaatgaggatcccgagccagagcaggactatgacgaagctctggggcgcctggagccccccagaaggaggggatccggacctcggagagtgctggatgtcgaagtgtactcctctcggagtaaagtctatgtggccgtcgacggtactacagtattggaggacgaagccagagaacaagggcggggaattcatgtgattgtgcttaatcaggcgacaggacacgtgatggcaaagcgtgtctttgatacatactctcctcacgaggacgaagctatggttctcttcctcaacatggtggctcctggaagagttctgatctgcacggtgaaagacgagggatcgtttcacctgaaggataccgccaaggcactgctgagaagcctaggtagccaggccggccctgcactgggttggcgggacacttgggcattcgttggtagaaagggggggcccgtgttcggagagaagcacagtaaatcaccagccctttccagctggggggacccagttctgctcaagacggacgtgccactgagcagcgccgaggaggctgaatgccactgggctgataccgagctgaacaggcgtaggaggcgattttgctctaaggtggagggctacggtagtgtgtgcagttgcaaggatccaactccaatagagttcagcccagaccccctgccggacaacaaggtcctgaatgtgcctgtggctgtcatcgctggcaatagacccaactatttatacaggatgctcaggagtttgctgagtgcgcagggtgtgagcccccagatgatcacagtgtttattgatgggtactatgaggagcccatggatgttgtggcactctttggcctgcgtggtatccagcacacacctatcagcattaagaacgcgcgggtgagccagcattacaaggcctcccttaccgccaccttcaacttatttccagaggccaaatttgcggtagtcctggaagaggacctggatattgcggtcgattttttttcatttctgtcgcagagcattcacctgcttgaagaggacgacagcctctactgcatctctgcttggaacgaccagggatatgaacacacagcagaagaccccgccctgctatacagggtcgagactatgccggggttaggctgggtgctccgccggtcactatataaagaagaactcgagcccaagtggcccacccccgagaaactctgggattgggatatgtggatgcggatgcctgagcagaggagggggagagagtgcattatcccagacgtttcaagaagctatcattttggcattgtgggcctgaatatgaatggatatttccacgaagcctattttaagaaacataaattcaacaccgtgccaggcgttcagctacgcaacgtcgactcactgaagaaggaggcttatgaggtggaagttcatagactactttccgaggcggaggtgctggatcattctaagaatccatgtgaggattctttccttcctgataccgaaggccatacttatgtcgcatttatacgcatggagaaagatgacgacttcaccacctggacgcagttggcaaaatgtctacacatttgggacctggacgtcagaggaaatcaccgtggactgtggcgtctcttccgcaaaaagaatcacttcctgatgagcgaagaagccacactttcccaccctaatttccctggcgccacccccaaaggaggcggttctccccggtcccctcggaccgatatgcggcctcctcctgggccttgtggggcaggccccggcagcgagagtaacctatttattgattgtccagaggggcttgagaaccggccaaacctggagggactggatttctttttggggtggaatgcggcacttcgcgtcggccttgctcttacccaggagaccgccgtgcccaacccttggacaggtccagccggcgcccacatgttgacacagactcactcagaaacgttacgccactggaccagacctcctctgtctctgctttttgttcagatctctaaggcaggctag

SEQ ID NO: 130618 - DNA, 2247 bp, synthetic construct
  misc_feature 1..2247: note = Description of Artificial Sequence: Synthetic coding sequence
  source 1..2247: mol_type = other DNA
atggacgattggaaacctagccccctaattaaacccttcggagcgcggaagaagagatcttggtacctcacttggaagtataagcttaccaaccaaagggctctgcggagattctgtcagaccggcgccgtgctgtttcttctggtcactgttatcgttaatatcaaactgatcctggacaccagacgtgctatttcagaggcgaacgaggatccagagcctgagcaggattacgacgaggctctgggaagactggagccgcccaggcgacgaggctccggcccgaggcgggtactcgacgtggaagtctacagttccaggtctaaggtgtatgtcgccgttgacggcactaccgtcttagaagacgaggcccgggagcaggggagaggaattcatgtgatcgtgcttaatcaggcgaccggccatgtgatggccaaaagggtgtttgacacctattctcctcatgaggacgaagcaatggtgctttttctgaatatggtcgcgccgggccgtgttttgatatgcacagtgaaggatgagggctcctttcacctgaaggatacagccaaagctctactccgctctttaggcagtcaggctggaccagccctcggctggagggacacttgggctttcgtgggtcggaaaggaggccccgtgtttggagagaagcattcaaagtcaccagccctgagctcatggggagatccagtgctcctgaaaaccgatgtaccgttgtcctccgccgaggaagcggagtgtcactgggctgatactgaactaaatcgaagaagaaggcgtttttgttctaaagtagagggctatggctccgtttgctcatgcaaggatccaaccccgattgaattcagccctgatccactgcccgacaataaggtacttaatgtcccagtggccgtgattgctggcaatcggcctaattacctgtaccggatgctgcgctccctgctctcagcccagggcgtgtctccccagatgatcacagttttcatcgacggctactatgaagagccaatggacgtggtcgccctcttcgggctgagaggaattcagcacactccgatctctataaaaaatgctcgtgtgtcgcaacactacaaggctagcctgaccgccactttcaacctgtttcccgaggctaagtttgcagtcgttctggaggaagacttggatattgctgtggatttcttcagcttcttaagccaatcaatacatttgctggaggaggatgatagtttatattgtatatctgcatggaatgatcaggggtatgaacataccgcggaagatcctgcactgctctatagggtagaaaccatgccagggctggggtgggtcctgaggcgatcactgtacaaggaagagctggagccgaaatggcctacacccgagaaactctgggattgggacatgtggatgaggatgcctgagcaaaggcgtggcagagagtgcattatcccagatgtgtcacgcagttaccatttcggcatcgtagggcttaatatgaatggctacttccacgaggcatactttaaaaaacacaagtttaacacggtaccaggggtacaactccgcaacgtggatagcctaaaaaaggaagcatacgaagttgaggttcacagactgctgtccgaggccgaggtcctggatcacagcaaaaacccctgtgaagactctttcctgcccgacaccgagggccacacatatgtcgcctttatccgaatggaaaaggacgatgacttcacgacttggacccagctggccaaatgtctgcatatctgggatctggacgtgagaggcaatcataggggcctttggaggctcttcaggaaaaaaaaccatttcctgatgtccgaggaagccaccctctcccacccgaatttcccaggcgccactcctaaaggaggtggctccccaagatcaccaagaacagatatgcgccccccaccaggtccttgtggagccggtccaggtagcgagtccaatctgttcatcgattgcccagagggtctcgaaaaccgccctaatctggaaggcctggactttttcctgggatggaacgccgccctcagggtcggcctggccctgactcaggagaccgccgtgccaaatccctggacgggcccagcaggggcccatatgctgacccagactcattcggaaactctgcgacattggacccggccccctctctcgttgctgtttgtccaaatctccaaggcgggatag

SEQ ID NO: 130619 - DNA, 603 bp, synthetic construct
  misc_feature 1..603: note = Description of Artificial Sequence: Synthetic coding sequence
  source 1..603: mol_type = other DNA
atggatgactggaagccttcacccttgattaaaccatttggtgctcgcaagaaacgatcctggtatcttacatggaaatacaagctcacgaaccagagggcgctgcggcgcttctgccaaactggtgccgtgctgttccttttggtcaccgtgatcgtaaacattaaacttatccttgacactcgacgcgccatctcggaagccaacgaggatcctgaacccgaacaggattacgacgaagctctgggccgactagaacctcctcgtcggcgcggatccgggccaagacgtgtgcttgacgtagaggtttactccagcaggagcaaggtttacgtagccgttgatggaaccactgtcctcgaggatgaggctcgcgaacaggggcgtgggatacacgtgatcgtgctgaatcaagctaccggccatgttatggcaaagcgcgttttcgatacatactcaccacacgaggatgaggccatggtgctgtttcttaatatggttgcacccggtagagttctcatttgtactgttaaggttctttcaagtgggagaaatatcctgaaccatctgccctccttgcctgggggtactcagagctgctag

SEQ ID NO: 130620 - DNA, 1917 bp, synthetic construct
  misc_feature 1..1917: note = Description of Artificial Sequence: Synthetic coding sequence
  source 1..1917: mol_type = other DNA
atggagggcacaaaggaaatcaaggtgtcgaacaggaggattcaggaacactggactggcgccgtgctcttcctcctcgtgaccgtcatcgtcaatataaaattgattctggacaccaggcgcgctatcagcgaagctaacgaagatcccgaaccagagcaggactacgatgaggcgctcggccggctggaacctcctcgacggcgagggtcagggccgcggcgcgtgctggatgtagaggtgtactccagcaggagtaaagtgtacgtcgctgtcgacggcaccactgtgcttgaggacgaagccagagaacagggcaggggtatccatgtaattgtacttaatcaggcaacaggacatgtgatggccaagcgcgtgttcgatacgtatagcccccatgaggacgaagctatggtcctgtttctaaatatggtggcacctggtcgggtgttaatctgcacggttaaggacgagggtagctttcacctgaaggataccgccaaagctcttctgcgctctctgggatcccaggccgggcctgccctaggatggagggatacttgggctttcgttgggaggaaggggggccctgtatttggcgagaaacactctaagtctcctgctctgtcttcttggggagaccccgtgctgttgaagaccgacgtcccactgagctccgcagaagaagccgaatgtcattgggctgacaccgagttaaacaggagacgcagaagattctgttccaaggtagaaggctacggctcagtgtgtagttgtaaggatccaacacctatcgaattttcacctgatcctctgccagacaataaggtgctaaacgttccggtggccgttattgctggcaacagaccaaactatctctatcgaatgctgaggtccttgcttagcgcacagggcgtttcccctcaaatgatcactgtgttcatcgatgggtactacgaagaaccaatggacgtcgtggctcttttcggactccgggggattcagcacaccccaatcagcattaaaaatgcgagagtgagccagcactacaaggcctctttgactgcaacatttaatctcttcccagaagccaagtttgctgttgtgctggaagaagatttagacatcgccgttgactttttctcctttctctctcagtccatacacctgctcgaagaggatgactctctgtattgtatctccgcatggaatgatcagggttatgagcataccgcagaggaccctgcattactttatcgggtggagaccatgccaggactcggttgggtattgcgaagaagcctatacaaggaagaattggaacccaaatggcctacccctgagaagttatgggattgggatatgtggatgagaatgccagaacaacggagggggcgagagtgcatcattcctgacgtgagccggagctatcacttcgggattgtggggctaaatatgaacggatactttcacgaggcatacttcaagaagcataagtttaatacagtgccaggagtccagctccgcaatgttgacagcttgaagaaagaagcttacgaggtggaagtacaccgtctactgtctgaagcagaggtattagatcatagcaaaaatccctgtgaggatagctttctaccagacacagaaggccacacttacgtggcttttattcgaatggagaaggacgacgacttcactacatggacacagttagctaaatgtctacacatctgggacctggatgtgagaggtaaccacaggggcctgtggagactcttcaggaagaaaaatcacttccttatggtcggggtgccagcttctccctacagcgtcaagaaacctccatctgtcactccgatctttttggaaccccctcctaaagaagaaggtgcgcctggagcccccgagcagacctag

SEQ ID NO: 130621 - DNA, 861 bp, synthetic construct
  misc_feature 1..861: note = Description of Artificial Sequence: Synthetic coding sequence
  source 1..861: mol_type = other DNA
atgtccgattctgagaagctcaatctcgactcaattatcgggaggctcctcgagggggacatccatgggcagtattacgaccttcttcgccttttcgaatacggcggatttccccccgagagcaattacctcttcttgggcgactatgtcgatcgcgggaagcaatcccttgagactatctgcctgctgctggcctacaagatcaaatacccggagaatttctttctgttgcgcggtaaccatgagtgcgcatccattaaccggatttacggattctacgacgaatgtaaacggagatacaatatcaaactgtggaagaccttcacggactgctttaactgtctcccgattgctgccatcgttgatgaaaaaattttctgttgccacggcggcctcagtccagatctccagtcaatggagcagataaggcgaatcatgagaccaaccgacgtgcctgaccagggacttctttgcgacttattgtggtccgatcctgacaaggacgtgcagggctggggcgaaaatgatcggggtgtctctttcaccttcggagccgaggtggtcgcaaagttccttcataaacacgacttagacttaatttgcagagcccaccaggtggtggaagatggttacgagttctttgcaaagagacagctggttaccctattcagcgcacctaactactgcggcgagtttgacaacgccggcgcgatgatgtcagtggatgaaacccttatgtgcagctttcagattttaaagcccgcagacaagaataagggaaagtacggtcagttttcggggttaaacccgggcggaagaccaataacccccccgcggaactcagccaaagcaaaaaaatag

SEQ ID NO: 130622 - DNA, 1548 bp, synthetic construct
  misc_feature 1..1548: note = Description of Artificial Sequence: Synthetic coding sequence
  source 1..1548: mol_type = other DNA
atggccgagttggagcatcttgggggcaagagggctgaaagtgctaggatgagacgggcagagcagctgagaagatggcgcggatctctgactgagcaagaacccgcagagaggagaggggctggcagacagcccctcacgcgccggggcagcccaagggtgcgatttgaagacggagccgtgttcctggcagcctgctcctctggagacacagacgaagttcggaaactcctcgctcgaggagccgatatcaacacagttaatgtagacggccttacggcactacaccaggcatgcattgatgagaacttggatatggtaaaattccttgttgagaatcgcgccaatgttaaccagcaagataacgagggctggacccccttacacgcagcagcctcctgtggatatctcaacattgcggagtactttatcaaccacggcgcctcggtgggaattgttaattctgaaggcgaggtaccctccgatctagcagaggagccagccatgaaggacctccttctggaacaggtgaaaaagcaaggagtcgatctggagcaaagtaggaaagaggaggaacagcagatgctgcaggatgccagacagtggttaaatagtgggaagatcgaagacgttcgacaggcccgaagcggcgccacagcgttacatgtggccgccgcaaaagggtatagcgaagtactgcgtctgctcatccaggcaggttacgagctcaatgtacaagattacgacggatggacccccctgcatgcagccgcacattggggtgtgaaggaggcgtgtagtattctcgcagaggctttgtgtgacatggatattaggaacaagctggggcagactcctttcgatgttgcagacgaaggcttggtagagcacctggagttactgcagaagaaacagaacgtgttgaggtctgagaaggaaactagaaataagcttatcgagagtgatctcaattcgaaaattcagagcggcttcttcaagaacaaagagaagatgctgtacgaagaagagacaccaaaatctcaggagatggaggaggagaacaaggagtcttccagctcctcaagcgaagaggaggagggtgaggacgaagcctcagagagcgagaccgaaaaagaagctgataaaaagccagaggcctttgtcaaccactcgaacagcgagagtaagagcagtattacagagcaaatcccggcaccagctcagaatacattctccgctagctcagccaggagattttcttctgggttatttaataaacctgaagagccaaaggacgaaagtcctagtagctggaggctgggccttcgtaagaccggcagccataacatgttgagcgaagtggctaacagtagagagcccattcgtgataggggcagcagcatttatcgatccagcagctctccccggatcagcgcattgctggacaacaaagacaaggtacagttcggtagagtgtgggggaatagtaaggccgtgttttttttccatgaaaactctattctgggcacaaacgaaaacattttttag

SEQ ID NO: 130623 - DNA, 4125 bp, synthetic construct
  misc_feature 1..4125: note = Description of Artificial Sequence: Synthetic coding sequence
  source 1..4125: mol_type = other DNA
atgctaaaaaccgaatcttctggagagaggacaaccctgcggtccgcctcccctcatcgtaatgcttatcggactgagtttcaagccctcaaatccactttcgacaagcccaagtcggacggcgagcagaagaccaaggaaggtgaaggatcacaacagtcccgcgggagaaaatacggaagcaacgtaaatcgaataaaaaatctttttatgcagatgggcatggagcccaacgaaaacgctgcagtgattgccaagacgaggggaaagggcggccattcttcaccccaacgtcggatgaagcccaaagagtttctcgagaaaacggacggcagcgttgtgaaattggagtcttcagtgtcagagcgcatcagtcggttcgacaccatgtatgatggcccgagctactccaaatttaccgagactaggaagatgtttgagcgcagcgtgcacgaatcaggacagaataatcggtatagtcctaagaaagaaaaagccggcggctccgagccccaggatgaatggggcgggagcaagtcaaatcgcggctcaactgattccctcgatagtctgtcctccagaacagaagctgttagtcccaccgtgtcacagcttagcgccgtattcgagaatactgactccccatccgctatcatctccgagaaagctgagaataatgaatacagcgttacaggccattaccctctgaatcttccgtcagtcactgtcacgaacctggatactttcgggcacctgaaggactctaactcttggcctccctccaacaagcgaggagtcgataccgaagatgcccataagtctaacgcaacacccgtaccggaggtggcttcgaagtccacctccctggcatctatcccaggggaagagatccagcagtctaaagagccggaggactcaacttcaaaccaacagacacctgactccatcgataaagacggtcctgaggaaccctgcgctgagagcaaggccatgcctaagtccgaaatcccgagtccacagtctcagctccttgaagatgccgaggccaatctcgtcggccgcgaagcggccaagcagcagcgtaaggagttagcagggggcgacttcacatcgcctgacgcctcagcctcctcctgcgggaaagaggtgcctgaagattccaataactttgatgggagccacgtttatatgcattcggactacaatgtataccgggtgagaagtcgctacaatagtgattggggcgaaaccggcaccgagcaagatgaggaggaggattctgatgaaaatagttattaccaacccgacatggagtactccgagattgtgggactgcccgaagaagaggagatccccgcaaatcgcaaaatcaagttttcctctgctccgattaaagttttcaacacctactctaacgaagattacgaccggaggaatgacgaggtggacccagttgcagccagcgccgaatatgagcttgagaaacgcgtggagaagctcgagttattcccagtcgaattggaaaaagatgaggacgggctcggcattagcatcataggcatgggagtcggagccgacgccgggctggagaagctggggattttcgtgaagacagtgacagaaggtggagctgcacaacgggatgggcggatacaggtaaatgaccagatagtggaggtcgacgggatctcccttgtcggcgtgacacagaactttgcggcaactgtgcttcggaacactaagggtaacgtccggttcgtcattggcagagagaagcccgggcaagtgtcagaggtggcccagctaatcagccagacattggagcaagagcggaggcaacgtgagttgttggaacagcattatgcacagtacgacgctgatgatgacgaaaataccgttgccgagcttcagggaatgagcggcaactgcaataacaacaataattactttttgaaaactggcgagtacgccaccgacgaggaggaagatgaagtagggcccgtgcttccaggaagcgacatggctatagaggtgtttgaactccctgaaaatgaggatatgtttagcccgagcgaactagatacgagcaagctaagccataaattcaaggaactccagattaagcacgcagtgactgaagctgagattcaaaagttaaagacaaagttacaagcagccgagaatgagaaggtaaggtgggaactagagaaaacccagctgcagcaaaacattgaggaaaataaagaacgcatgcttaagctagaaagctactggatcgaggcccagaccctctgccacacggttaacgagcaccttaaggaaacccagtcccagtaccaggccctggagaaaaagtataacaaggcgaagaagttaataaaagattttcaacagaaggaactggatttcatcaagaggcaggaagccgaaaggaagaagatcgaagacctcgaaaaggctcatcttgtagaagtgcagggcctgcaggtgcgaatccgcgatttggaggctgaagtgttcaggctcctgaagcagaatggaacccaggtgaataacaataataatatttttgaacgtaggacctcactgggcgaagtgtccaaaggcgacacaatggagaacctagatggcaagcaaacgagctgccaagatggactcagccaagacctgaacgaggcggtgccagagaccgagcgtcttgactctaaagctctcaaaaccagagcccaactcagcgtcaagaatagaaggcagcgacccagccgcactcgactgtatgacagtgtaagctccaccgatggggaagattcattggagcgcaagccctccaattccttctataatcatatgcacattacaaaactcctgcctccaaagggactgagaacctccagccccgagagtgactctggcgtgcctccactgactcccgtagatagcaatgtgcccttttcttcagatcacatcgctgagttccaggaggagccactcgatcctgagatgggcccactgtcaagcatgtggggtgacacatctctgttctcgacatctaagtccgaccatgatgtcgaagagtctccttgtcaccatcagacaacgaacaagaaaatcctgagagagaaagatgacgcaaaggatccgaagagcttgagggcaagctcatccctcgcggtgcaagggggaaaaatcaagaggaagtttgtggacctcggtgcgcctttgaggcggaacagtagtaaaggcaagaaatggaaggaaaaagagaaggaggcatctcgcttcagtgctggttctaggatcttccgcgggaggctggagaactggacccctaagccttgcagcactgcacagacctccacgcgatcaccgtgtatgccctttagttggttcaacgatagccgtaaagggtcctattccttccgtaacctaccggcacccacttcttcactgcagcccagtccagaaaccttgatctcagacaaaaaaggaagcaaagtggagaacacctggatcacaaaagctaataagcgtaatccaaatccatcatcttcaagtatcttcggaaggcattctcagctcatgtccgtagtatggatccaggagacgaacaactttacttttaacgacgacttctccccttcatctacctcttccgctgacctaagcggtcttggggctgaacccaagactccagggctgtcgcagtccctggctttgagcagcgacgagattttggacgacggtcagtctccgaagcactcacaatgccagaatcgagcagtgcaagagtggagcgtgcagcaggtcagccattggttaatgagtctgaacctggagcaatatgtctccgaattctccgcccagaacattacaggcgagcagctgctgcaactcgacggcaataagcttaaagcactgggtatgaccgcctctcaggatcgcgccgtggtcaaaaaaaagctgaaagagatgaaaatgtccctagaaaaggcccgaaaggctcaggaaaaaatggaaaaacaacgcgaaaagctgcgaaggaaggagcaggagcaaatgcagcgtaagtctaagaaaactgagaaaatgacatcaacaaccgccgagggagctggagagcagtag

SEQ ID NO: 130624 - DNA, 1026 bp, synthetic construct
  misc_feature 1..1026: note = Description of Artificial Sequence: Synthetic coding sequence
  source 1..1026: mol_type = other DNA
atgagtgacagcgagaaactgaacctggacagcatcatcggaagattgctagaggggagccgggtgcttacaccgcattgtgcccccgtacagggctccaggcccggaaagaatgtgcagttgactgagaacgagattcggggactatgcctgaaaagccgcgagatctttctcagtcaacccatccttttggagttggaggctccacttaagatttgcggagatatccacggacaatattacgacctgcttaggttgtttgagtacggcggattcccacctgaaagcaactacctgttcctaggagactacgtggaccgcggcaaacaatcccttgaaactatatgcttgctactggcttacaaaatcaaataccctgagaacttcttcctgctgagaggcaaccatgagtgcgccagtattaaccgcatctatggcttctacgacgaatgcaagcgtcgctacaacataaagctatggaaaacatttactgactgcttcaattgtctgcccatcgctgctatcgtcgatgagaaaatcttttgttgccacggcggtttaagcccggatctacagtccatggaacagatcagacgtattatgagaccgactgacgtcccagaccagggcttgctttgcgatttgctgtggagtgacccagataaagacgtgcagggttggggcgaaaacgatagaggagtcagctttacattcggtgcagaagtagtcgcaaagtttctacataaacacgatctggacctgatttgtagagcacaccaggtcgtggaagatggatatgaatttttcgccaaaaggcaactagtgactctgttctctgcccctaattactgtggcgagttcgacaatgcgggcgctatgatgtccgtggacgagactctgatgtgtagtttccagatcctcaaacctgcagacaagaataagggcaaatatgggcagtttagtggcttgaacccgggaggacgcccaatcacgcccccacggaattctgccaaggcgaagaaatag

SEQ ID NO: 130625 - DNA, 993 bp, synthetic construct
  misc_feature 1..993: note = Description of Artificial Sequence: Synthetic coding sequence
  source 1..993: mol_type = other DNA
atgagtgacagtgaaaaattgaacctggatagcattataggcaggctgttagaagtgcagggatcacgacctgggaagaatgtccagttaacagaaaacgaaattaggggcttgtgtctcaaaagtcgcgagatattcttatcccagcctattttactggagctggaggcccctctcaaaatttgcggtgatattcacggacagtactacgacctccttcgcttatttgaatacggcggtttcccacccgagtccaattatctatttctgggagactatgtcgacagggggaagcagtcattggaaactatctgtttattgctagcttataagataaagtatccagagaactttttcttgttgcgcgggaaccatgagtgtgcctcaatcaaccggatctatggcttttatgacgaatgcaagcgcaggtacaacatcaagttatggaagaccttcacagattgtttcaattgccttcccatagccgcgatcgtcgacgagaaaattttctgctgtcatggcggactgagccccgatctgcaatcaatggaacaaatcagacgcatcatgcgcccaactgacgtgcccgatcagggactcctgtgcgacctcctctggtcagatcctgataaagatgtccagggatggggtgagaacgatcgtggtgttagctttacttttggagcggaagtagtggccaaatttctgcataaacacgatctcgatctaatctgtagagcccatcaggtggtggaagatggctacgaatttttcgccaagcgtcaactggtaactttattctcagcccccaattactgcggcgaattcgacaacgctggggctatgatgtcagtggacgagacattgatgtgttccttccagattctgaagcctgctgataagaataagggaaagtatggccagttcagcggcctgaacccgggagggagacccatcacacctcctcgcaactcagcaaaagcaaaaaagtag

SEQ ID NO: 130626 - DNA, 1245 bp, synthetic construct
  misc_feature 1..1245: note = Description of Artificial Sequence: Synthetic coding sequence
  source 1..1245: mol_type = other DNA
atgcgccaacgggccgacagacggtctatggtatcaacaagtggagctgcaacagccagttctgcagccggaccttctagaggcgctgctcacagtccatctagtgctccgcacgcctcgaggcaccgccctccctttagttcccgtgccacagggctgttgcagcaacgtcagcattgtgtgcaccattgcactcagctctgccctagagttcagactccttgcctccctccaccccccgccccagccaccgagcttcacagctacctccagcagggcggggagcgcggcttgctggatacaacccctggaaccgcgggttggggcacatccgctaccggcgcagtgcagggctctcgtccaggcaaaaacgtgcaactcacagagaatgaaattagaggactgtgcttaaaatctcgcgaaatctttttgagccaacccatcctactggagctcgaggccccactgaaaatctgtggagacattcatgggcagtattacgacttgctgcgtcttttcgaatacgggggctttcctccggaatccaactacctgttcctgggcgactacgtggaccggggaaaacagagtctcgagaccatctgtctgctgctcgcctacaagattaagtatcccgagaacttttttctgctgcgcgggaaccatgagtgcgcctcaattaatcgaatctacggtttttacgacgagtgcaagcgcagatacaacatcaagctctggaagacattcaccgattgcttcaactgtctccctattgctgccatcgtcgatgagaagattttctgttgtcacggtggcttgagcccggatctccagagcatggaacagatcagaaggatcatgcgacccactgacgtcccggatcagggcctgctgtgcgatctgctgtggtccgaccccgataaagacgttcaaggctggggtgaaaacgaccgcggagtcagctttacgttcggtgctgaagtagtcgctaaattccttcacaagcatgatctcgatctgatttgcagggctcaccaagtcgtcgaggatgggtacgagttctttgcgaagaggcagctggtaacgctgttctccgctcctaactattgtggggaatttgacaacgccggtgcaatgatgagcgttgacgaaaccctcatgtgctccttccagatcctgaaaccagctgacaaaaacaaaggtaaatacggccaatttagcgggctcaatcctggaggtcgatag

SEQ ID NO: 130627 - DNA, 984 bp, synthetic construct
  misc_feature 1..984: note = Description of Artificial Sequence: Synthetic coding sequence
  source 1..984: mol_type = other DNA
atggccgatggcgaattgaacgtggactcactgatcacccggctactggaggtgcggggctgtagacccggaaagatcgtccagatgaccgaagcggaagtaagaggtctgtgcataaagtccagagagatctttctgtctcagcctattctgctggaactagaagcccccctcaagatttgcggcgacatccatggccagtacactgatctactacggttgtttgagtacgggggcttcccccccgaagccaattacctttttctgggagactacgtggataggggaaaacagagcctggagaccatctgcctgctgctagcatataagataaaatatcccgagaacttttttctgcttcgggggaatcacgagtgcgcttccattaacagaatatacggtttttacgatgaatgcaagcggaggttcaacattaaactctggaaaactttcacagactgtttcaactgtctgcccatagctgccattgtcgacgagaagatcttctgctgccatgggggcctgtcccccgatctacagtctatggaacagatccgccggatcatgcgacccacagacgtccctgatactggactgctgtgcgatctgctatggtctgacccagacaaagacgtgcagggatggggagaaaacgatcggggtgtcagctttactttcggcgctgacgttgtttcaaagttccttaatcgtcacgacctggacctgatctgcagagctcatcaggtcgtggaggatggttacgagttcttcgccaagcgccagctggtcactctgtttagcgctccgaattactgcggcgagtttgataatgccggcggcatgatgagcgtagacgagacacttatgtgcagtttccaaattctcaagccaagcgaaaagaaagctaaatatcagtacggcggactaaatagtggcagaccagtgacaccccccaggaccgccaatcctcctaagaaaaggtag

SEQ ID NO: 130628 - DNA, 984 bp, synthetic construct
  misc_feature 1..984: note = Description of Artificial Sequence: Synthetic coding sequence
  source 1..984: mol_type = other DNA
atggctgatggagagctgaatgttgacagtcttatcacccggctcctggaagtgagaggatgccgcccagggaaaattgtgcagatgacagaggccgaagtgaggggtctgtgtatcaagagcagggagattttcttgagccagcccattctcctggaattagaagccccactaaaaatctgcggcgacatccatggacaatatactgatctgcttcgcttgtttgaatatggtggctttcctccggaagctaattatttgtttttaggcgattatgtggaccggggaaagcagtccctcgagaccatctgcctccttctagcttataaaatcaaatatcccgaaaacttctttctattgcgtggcaatcacgagtgtgcatccataaaccggatatacggtttttatgatgaatgtaagaggcgcttcaatatcaagctttggaagaccttcaccgactgctttaattgtcttccaattgcagcaattgtggatgaaaaaattttctgttgtcacggtggcttaagcccagatctgcaatcaatggagcagattcggcgtataatgaggcccaccgacgtgccagatacgggccttctttgcgaccttttgtggagcgaccctgataaggacgtgcaggggtggggcgagaacgacaggggagtgtctttcacattcggcgcggacgtcgtgtcaaagttcttgaaccggcatgatcttgacctgatttgccgggcccatcaggtagtggaagatgggtacgaattttttgcaaagagacaactggttacactgttttccgcacccaattactgcggtgagtttgataatgctgggggaatgatgagtgtggacgaaaccttaatgtgctcattccagatcctcaagccttccgagaaaaaagccaaatatcagtatgggggactcaattctggtaggccagtgaccccaccacgtacagcgaatccacccaaaaagcgttag

SEQ ID NO: 130629 - DNA, 984 bp, synthetic construct
  misc_feature 1..984: note = Description of Artificial Sequence: Synthetic coding sequence
  source 1..984: mol_type = other DNA
atggctgacggagagttgaacgtcgattcccttattacacgtctgctagaagtgcgcggttgccggccgggcaagattgtccagatgacagaagccgaagtgcgtggcttatgcattaaaagtagggaaatcttcctgagccaaccaattcttttagagctggaagctcctctcaagatttgtggggatattcacggccagtacaccgacctgctgcggctgttcgagtatggaggctttcctccggaggctaattacctttttttaggtgactacgtcgaccggggaaaacagtctctggagaccatctgccttctcctcgcatataaaataaagtacccagagaactttttcttacttagaggaaaccatgaatgtgcctctattaaccgcatatatggtttttatgatgagtgtaaacggagatttaacatcaaactttggaaaacgttcactgactgctttaactgcttaccaattgctgccatcgttgacgagaaaatcttttgttgccacggcggcttgagtcctgatctgcagagtatggaacagattcgcagaatcatgagacccactgatgttcccgacacggggctgctctgcgacctgttgtggtcagatccggataaggacgttcaggggtggggagagaacgataggggagtatcatttactttcggagccgacgtagtatcaaagtttctgaacagacatgatctggatcttatatgccgggcccatcaggtcgtggaagatggttacgagttcttcgcaaaacggcagctggttaccctgtttagcgcccctaattattgtggcgagttcgacaacgccggaggcatgatgagcgtggacgaaaccctgatgtgctcctttcagatcctgaagccctctgagaaaaaggccaaatatcagtatggcggactgaactccgggagacccgtgacaccgccacgcactgctaaccctcctaagaaacgctag

SEQ ID NO: 130630 - DNA, 378 bp, synthetic construct
  misc_feature 1..378: note = Description of Artificial Sequence: Synthetic coding sequence
  source 1..378: mol_type = other DNA
atggcagatggcgaactcaatgtcgattcactcattactcgccttctggaagtgcggggctgcagaccgggaaagatcgttcagatgactgaagccgaagttcgagggctctgcataaagtcccgggagattttcctgtcacaaccgatcttattggaactggaagcgcccctcaaaatctgtggggacatccacggtcagtacactgatcttctgaggctttttgaatacgggggattccctccagaggcaaattatctgttcctgggcgattatgtcgacagagggaagcagagtctcgagaccatttgtcttctgctagcttacaagataaagtaccccgagaatttcttcctgttaagagggaaccatgagtag

SEQ ID NO: 130631 - DNA, 417 bp, synthetic construct
  misc_feature 1..417: note = Description of Artificial Sequence: Synthetic coding sequence
  source 1..417: mol_type = other DNA
atggccgacggggagttaaatgtggacagtctgatcactaggctcctggaagtcagaggctgccggccgggcaagattgtgcagatgactgaagccgaggttcgggggctctgtattaagtcccgcgagatttttctctcacagccaattttgctggagcttgaagcccctttgaaaatttgcggcgatatccatgggcagtacacagacctgctgcgcctgttcgagtacggcggtttccctcctgaagcaaactatctgttcctcggcgactacgttgaccgcggcaagcagtcactcgagacgatttgcctgctcctggcatataagataaaatatccagagaattttttccttctacgcgggaaccacgaatgtgcgtcaatcaaccgtatctatgggttttatgacgagtag

SEQ ID NO: 130632 - DNA, 510 bp, synthetic construct
  misc_feature 1..510: note = Description of Artificial Sequence: Synthetic coding sequence
  source 1..510: mol_type = other DNA
atgactgaagctgaggtgcggggcctttgtatcaaatcgcgggagatctttctttcacagcccatcctactcgagcttgaagcccccttgaagatctgcggtgacatccacggccagtacactgatctgctccgactgttcgaatatggaggtttcccacccgaggccaattatttgtttctcggggactacgtagacagagggaaacagtccctggaaactatttgtctcttgctcgcctacaagatcaaatatccggagaatttcttcctccttaggggtaaccatgagtgcgcctctattaatcgcatatacgggttttatgacgaatgtaagcgacggttcaatatcaagttatggaagaccttcactgactgctttaactgcttaccaatcgcggcgatcgttgatgagaagatcttctgctgccatggaggactgagccccgatctacaatcgatggagcagatccgcaggattatgcggccgaccgatgtcccagatacatag

SEQ ID NO: 130633 - DNA, 972 bp, synthetic construct
  misc_feature 1..972: note = Description of Artificial Sequence: Synthetic coding sequence
  source 1..972: mol_type = other DNA
atggctgatcttgacaagttgaacatcgatagcattatccaaaggttactagaggtccgcgggtccaaaccaggcaagaacgtgcagctccaggaaaacgagattagagggctgtgcctgaagagtagggaaatttttctatctcagcccatcctcctggagctcgaggctccgctgaagatttgtggagacattcatgggcagtactatgaccttttgcgcctctttgagtacggcggatttcctcctgagagtaattatttatttctgggggattacgtcgatcggggcaagcagtcccttgaaaccatatgtttgttattagcatacaaaatcaaatatcctgagaacttttttctcctgagaggaaaccacgaatgcgcctcaattaataggatttacggcttttatgatgagtgcaagagacgatacaatataaaactctggaagactttcacagactgtttcaattgcctgccaatagctgctattgtcgatgagaagatcttttgctgccacgggggactgagtcccgacctccagagcatggagcagatcagacgcataatgcgccccactgatgtgccagatcaagggctgctgtgtgatctattatggagtgatcccgataaggacgtgctcgggtggggagagaacgaccgcggagtctccttcacatttggagccgaggtggttgcgaaattccttcataagcacgatttggatcttatttgcagagcccatcaagtcgtggaagacgggtacgagttcttcgctaagaggcaactggtgacgttattttcagcaccaaattactgtggagaatttgacaacgccggtgccatgatgtctgttgatgagaccctcatgtgctcgttccagattctcaaacccgcagagaaaaagaaaccgaacgctacaagacccgtgactcctcctagagggatgattactaaacaggctaaaaagtag

SEQ ID NO: 130634 - DNA, 1014 bp, synthetic construct
  misc_feature 1..1014: note = Description of Artificial Sequence: Synthetic coding sequence
  source 1..1014: mol_type = other DNA
atggcagatctcgacaaattaaatattgacagtatcattcagaggctcctagaagtaaggggatctaaacccggaaagaacgtgcagctccaggagaatgaaatcaggggtctgtgtctgaagtctcgcgagatctttttatctcagcctattctgctggaattggaagcccccttgaaaatttgtggtgatatccacggtcaatactatgatctcctaaggctgtttgagtacggggggttcccaccagaatcaaattatctgtttctgggtgactacgtggacagaggcaaacagagtctggagacaatctgcctgctgcttgcctacaaaataaagtaccctgagaactttttcctacttagaggcaatcatgagtgtgcatccatcaaccgcatatacggcttctacgatgagtgcaagaggcggtacaatataaagctgtggaagacttttacagactgtttcaattgcctgcctattgcagccatagtggatgagaagattttttgctgtcatggcggactatcccctgacctgcagtcaatggaacagatacgcagaatcatgcgcccaacggatgtgccggaccagggacttctgtgtgatctgctttggtcggatccggacaaggatgtcctggggtggggggaaaacgatcgaggggtgtctttcaccttcggggccgaggtggttgcaaaatttttgcacaaacacgatctggacttaatctgccgtgcccatcaggtagtggaagatggttatgagttcttcgcaaagcggcaactcgtaacgctcttttccgccccaaactattgcggagaattcgacaacgctggcgctatgatgtcggtagatgagacactgatgtgtagtttccagatcctcaagccagcggaaaagaaaaagcccaacgccaccaggcccgtcactcctcccagagtggcttcgggcttaaatccctcaatccagaaggcctcgaactatcggaataatacagtactctatgagtag

SEQ ID NO: 130635 - DNA, 999 bp, synthetic construct
  misc_feature 1..999: note = Description of Artificial Sequence: Synthetic coding sequence
  source 1..999: mol_type = other DNA
atgtttctgcccctatacctgaatcttgtactgtacttcgtcttttggttgcattggacaaattgtgatttctccctggctgtcagaggatctaagccgggaaaaaacgtacagctgcaggagaatgaaattagaggcctgtgtctcaaatctcgggaaatattcctatcacagccgatcctgctggagctggaagccccactgaaaatctgtggcgacatccatggtcagtattatgacctgttgaggctgttcgagtacggaggattcccacccgagtctaattatttattcctgggggactatgtggaccgcggaaaacagagcctcgaaacaatttgcctgctgctggcctataagattaaatacccggaaaacttcttcctgttacgaggcaaccacgaatgcgccagtataaatagaatttatggattttacgatgagtgtaagaggagatacaacatcaagctctggaaaacttttactgattgctttaactgtctccctatcgctgctattgtggacgagaagatcttctgttgccatggcggactttcacccgacctccaatccatggaacaaattcgccgtatcatgcggcccacagatgttcccgaccagggtcttctttgcgacttgctgtggtctgaccccgacaaggatgtcctgggatggggagagaatgataggggcgtgagctttacattcggagctgaggtggtggcgaaattcctccacaagcacgatctcgacctgatttgtagggcacaccaggtagtggaggacgggtacgaatttttcgcgaagcgccaactggtgactctgttcagcgcaccaaactactgtggagaatttgacaatgcaggggccatgatgtctgtggacgagacacttatgtgttcattccagatcctgaagcctgccgagaagaagaagcccaatgcgacccggcccgtaacacctcctcgaggaatgattactaaacaagctaagaaatag

SEQ ID NO: 130636 - DNA, 426 bp, synthetic construct
  misc_feature 1..426: note = Description of Artificial Sequence: Synthetic coding sequence
  source 1..426: mol_type = other DNA
atggagcagatacgcagaatcatgcgcccaaccgatgtaccagaccagggccttttatgtgatctcctgtggtctgaccccgataaggatgtgctggggtggggggagaatgatcggggggtgtcgttcacctttggagcagaggtcgtggctaaattcctgcataaacacgatctggatctgatttgtcgggcacaccaggtcgtggaggatggttatgagtttttcgcaaagcgtcaattagtgaccctgttctctgcgcctaactattgtggagaattcgataacgccggtgccatgatgagcgttgacgagacactgatgtgtagcttccagattctgaaacccgccgaaaaaaagaagcccaatgctacgcgacccgtcactcctccccggggcatgatcacaaagcaggcgaaaaagtag

SEQ ID NO: 130637 - DNA, 225 bp, synthetic construct
  misc_feature 1..225: note = Description of Artificial Sequence: Synthetic coding sequence
  source 1..225: mol_type = other DNA
atgggccggaggagtagcaaatgctgctgtatttacgagaaacccagagcgttcggggagagttctacggagagcgatgaggaggaggaggagggatgcgggcatacccactgtgttcggggccatagaaaaggccggagacgcgccactctcggacctaccccaactacacccccacagcccccagacccctctcagcccccgcctggccctatgcaacactag

SEQ ID NO: 130638 - DNA, 225 bp, synthetic construct
  misc_feature 1..225: note = Description of Artificial Sequence: Synthetic coding sequence
  source 1..225: mol_type = other DNA
atgggcagacgctcttccaaatgttgttgtatatatgaaaaacctcgagcctttggggaaagctcaacagaaagcgacgaggaggaagaagaggggtgtggtcacactcactgtgtgcgggggcaccgcaagggaagacgaagagccaccctgggtcccacccctacaactcccccacagccccccgatcctagccagcctcccccgggcccaatgcagcactag

SEQ ID NO: 130639 - DNA, 225 bp, synthetic construct
  misc_feature 1..225: note = Description of Artificial Sequence: Synthetic coding sequence
  source 1..225: mol_type = other DNA
atggggaggcgatcatcgaagtgttgctgtatttatgaaaagccacgtgcctttggcgaatcctctaccgagtccgatgaagaggaagaggagggctgtggccacacccattgtgtccgaggccatagaaaggggcggaggagagccacactcgggccgacccctacaactcccccccagccccccgatccttcacagcccccccctggcccaatgcaacactag

SEQ ID NO: 130640 - DNA, 225 bp, synthetic construct
  misc_feature 1..225: note = Description of Artificial Sequence: Synthetic coding sequence
  source 1..225: mol_type = other DNA
atgggccgcagaagctctaaatgttgttgtatttacgagaagccaagggccttcggtgagtcttcgaccgagagtgacgaggaagaagaagaaggctgtggccatactcattgcgtaagggggcaccgtaagggtaggcgcagagcaacgctggggcccacaccaaccacacccccccagccgccggatcccagtcaaccccctcctggccccatgcagcactag

SEQ ID NO: 130641 - DNA, 381 bp, synthetic construct
  misc_feature 1..381: note = Description of Artificial Sequence: Synthetic coding sequence
  source 1..381: mol_type = other DNA
atggccgaagctggagccggcctgagtgagactgtgactgagacgacagtaacggtaaccacggaaccagagaaccggagtctgaccataaagctgagaaaacggaagcctgaaaagaaagtcgaatggacatcggatacagtagataatgagcacatgggtaggcgctcatcaaagtgttgttgcatttacgaaaagcctagggccttcggcgaaagctcaacggagagtgatgaggaggaagaggaagggtgtggccatactcactgtgttcggggccacaggaagggtagacgcagagccacactcggtcctactcccactacacccccccagccacccgatcccagccagccaccccctgggccaatgcaacactag

SEQ ID NO: 130642 - DNA, 225 bp, synthetic construct
  misc_feature 1..225: note = Description of Artificial Sequence: Synthetic coding sequence
  source 1..225: mol_type = other DNA
atggggaggcggtctagcaagtgttgttgcatttacgaaaagcctcgggcgtttggagaatcctcaaccgagtcagacgaggaggaggaagagggatgcggccacacacactgcgtgagagggcatagaaagggcagacgcagagctaccctcggccccactccaacgactcctccccagccccccgacccttcgcagcctccccccggacctatgcagcactag

SEQ ID NO: 130643 - DNA, 381 bp, synthetic construct
  misc_feature 1..381: note = Description of Artificial Sequence: Synthetic coding sequence
  source 1..381: mol_type = other DNA
atggcggaagcgggcgccggcctcagtgaaaccgtcacggaaacgaccgtgacagtgacaactgagccggagaacaggtcgttaacaattaagctgaggaagcgtaaacctgagaagaaggtggagtggaccagtgatactgtggacaacgagcacatgggaaggaggagttcaaaatgctgttgcatctacgagaagccaagggccttcggcgaatcgtcaacggaatcagatgaggaggaggaagaggggtgtggccacactcactgtgtgagagggcatagaaaggggagacgtcgagccaccctgggacctactcctacaacacccccccagccaccagatccttcacagcccccccctgggccaatgcagcactag

SEQ ID NO: 130644 - DNA, 225 bp, synthetic construct
  misc_feature 1..225: note = Description of Artificial Sequence: Synthetic coding sequence
  source 1..225: mol_type = other DNA
atggggcgccgttcttccaagtgctgttgtatttatgagaagccaagagcctttggagagtcttctacagaatccgatgaggaggaagaggaaggttgtggacacacgcactgtgtgcgcggccataggaaagggcgcaggagggccaccctgggtccaacacctaccacgcccccacagccccccgaccctagtcaacctcctcccggtcctatgcagcactag

SEQ ID NO: 130645 - DNA, 225 bp, synthetic construct
  misc_feature 1..225: note = Description of Artificial Sequence: Synthetic coding sequence
  source 1..225: mol_type = other DNA
atgggacgccgcagctcgaaatgctgctgcatctatgaaaagcctcgggcgttcggtgaatcctccactgagtccgacgaggaggaagaagaaggttgtggtcatacccattgcgtgaggggtcataggaaagggagacgcagagccacgctggggccgacacctaccacacctccacaacctcccgacccctcacagccaccgcccggacccatgcagcattag

SEQ ID NO: 130646 - DNA, 225 bp, synthetic construct
  misc_feature 1..225: note = Description of Artificial Sequence: Synthetic coding sequence
  source 1..225: mol_type = other DNA
atgggtagaaggtcttccaaatgttgctgcatctacgagaagccacgagctttcggcgaaagcagcaccgagagcgatgaagaggaagaggagggttgcggacacactcactgcgtgcgtggacatagaaaaggacggcggagggccaccttgggacccacacctacaacccctccacaacccccagatccatcacagcctcctcctggacccatgcaacactag

SEQ ID NO: 130647 - DNA, 225 bp, synthetic construct
  misc_feature 1..225: note = Description of Artificial Sequence: Synthetic coding sequence
  source 1..225: mol_type = other DNA
atggggagacgctcctcaaagtgctgttgcatttacgagaagcccagggccttcggcgagagtagtacagagtccgacgaagaggaggaagaaggctgcggccacacacattgcgtccgcggccatcgcaaaggccgcaggagggccactctgggccccacgccaaccacgcccccccagcccccagatccttcacagccacctccggggccgatgcagcactag

SEQ ID NO: 130648 - DNA, 225 bp, synthetic construct
  misc_feature 1..225: note = Description of Artificial Sequence: Synthetic coding sequence
  source 1..225: mol_type = other DNA
atgggtcgccgctcgagtaaatgttgttgcatatacgaaaagcccagagcattcggcgagtcctctaccgaaagcgacgaagaagaggaggaagggtgcggacatactcactgtgttcggggccaccgcaagggccggcgccgggcgactctggggcccactccgacgacccctccccagccgccagatcctagccagcctccccccggcccgatgcagcattag

SEQ ID NO: 130649 - DNA, 225 bp, synthetic construct
  misc_feature 1..225: note = Description of Artificial Sequence: Synthetic coding sequence
  source 1..225: mol_type = other DNA
atgggacgaaggagctcaaagtgttgttgtatctatgaaaagcccagagcattcggcgagagtagtactgagagcgatgaagaggaagaggaaggatgcggacatacacactgcgtacgtgggcatcgcaagggccgccgccgcgccaccttaggtcccactccaaccacaccaccccagccaccagatcccagtcagccaccaccaggtcccatgcagcattag

SEQ ID NO: 130650 - DNA, 225 bp, synthetic construct
  misc_feature 1..225: note = Description of Artificial Sequence: Synthetic coding sequence
  source 1..225: mol_type = other DNA
atgggacgacgctcttctaagtgctgttgcatctacgagaaaccgcgggcttttggggagtcttcgaccgaatctgatgaggaagaggaagaggggtgcggccacactcactgtgtgagaggccatcggaagggcaggcgacgggctaccctaggacctacgcccacgacacctccacaaccacctgacccctcccagcccccccccggtcctatgcagcattag

SEQ ID NO: 130651 - DNA, 225 bp, synthetic construct
  misc_feature 1..225: note = Description of Artificial Sequence: Synthetic coding sequence
  source 1..225: mol_type = other DNA
atgggtcggcgatcaagtaagtgctgttgcatttacgagaaacctcgtgcatttggggaaagcagtacagagtcagacgaggaggaggaagaagggtgtggccatacccattgcgtccgcggccaccgaaagggcaggagacgcgccacccttggacctactccaaccacccccccacagcccccggatccaagccagccaccacccgggccaatgcagcattag

SEQ ID NO: 130652 - DNA, 225 bp, synthetic construct
  misc_feature 1..225: note = Description of Artificial Sequence: Synthetic coding sequence
  source 1..225: mol_type = other DNA
atgggtcgaagatcttcgaaatgctgttgcatctacgaaaagccccgcgcctttggagagtcttccactgaaagcgacgaggaggaggaagaggggtgcggtcacacccattgtgtgaggggccataggaaggggagacgtagagccacgttggggcctacccctacaacacctccccaaccacccgatccaagccagccccctccgggcccaatgcagcactag

SEQ ID NO: 130653 - DNA, 225 bp, synthetic construct
  misc_feature 1..225: note = Description of Artificial Sequence: Synthetic coding sequence
  source 1..225: mol_type = other DNA
atggggcgacgctccagcaagtgctgctgcatctacgagaagccccgggcattcggggaaagctctactgagtccgatgaggaggaggaagagggatgtgggcacacacactgtgtgcgaggacaccgcaaagggagaaggcgcgcaaccctcggacctacccctaccacccctccacagcctcctgacccatcccagcccccccccggcccgatgcagcactag

SEQ ID NO: 130654 - DNA, 225 bp, synthetic construct
  misc_feature 1..225: note = Description of Artificial Sequence: Synthetic coding sequence
  source 1..225: mol_type = other DNA
atgggtagaagatcatcaaagtgctgctgcatctacgaaaagccaagggctttcggggagtcgtcaactgaatccgacgaagaggaagaagagggctgcgggcatacacactgtgtgcgcggacatcgcaaaggccgacgtcgggcaaccctgggaccaaccccgactacgcccccacagcccccggatcccagtcagcccccccctgggcccatgcagcattag

SEQ ID NO: 130655 - DNA, 225 bp, synthetic construct
  misc_feature 1..225: note = Description of Artificial Sequence: Synthetic coding sequence
  source 1..225: mol_type = other DNA
atgggaagaaggtcttccaaatgttgttgcatctacgaaaaaccgcgcgcattcggcgaaagcagtacagaatccgatgaggaggaagaggaggggtgtggccacacgcattgtgtcagaggccatcgtaaaggcaggcgaagggccactctcgggccaacaccgacgacacctccccagcccccagacccaagtcagccccccccggggcccatgcagcattag

SEQ ID NO: 130656 - DNA, 225 bp, synthetic construct
  misc_feature 1..225: note = Description of Artificial Sequence: Synthetic coding sequence
  source 1..225: mol_type = other DNA
atgggacgccgctcctcgaagtgctgctgcatttatgagaagcctcgcgcattcggagagagttcaactgaaagcgatgaggaagaagaagaagggtgtggacacacacactgtgttcgcgggcatcggaaaggccgaaggagagccaccctgggaccaacaccgacaacccccccacagccacccgacccatcacagccccctcccggtcctatgcagcactag

SEQ ID NO: 130657 - DNA, 225 bp, synthetic construct
  misc_feature 1..225: note = Description of Artificial Sequence: Synthetic coding sequence
  source 1..225: mol_type = other DNA
atgggcagacgttcttcaaaatgttgctgcatttacgaaaagccgcgggcctttggcgagtcttctacagagagcgatgaggaagaagaagagggctgtggccacactcactgcgtgcgcggtcacaggaaggggcggaggcgggcaaccctggggccaacccccaccactcctccccagcccccagaccctagtcagcctccacctggtccaatgcagcattag

SEQ ID NO: 130658 - DNA, 225 bp, synthetic construct
  misc_feature 1..225: note = Description of Artificial Sequence: Synthetic coding sequence
  source 1..225: mol_type = other DNA
atgggaagacgatcctctaagtgctgctgtatttatgagaagcctagggcatttggagagagttcaacagagtcagacgaagaagaggaggaaggatgcggccacactcactgcgtcagagggcatagaaaggggagacgccgagcgactctaggacccactcctaccacaccaccccagccccccgatccaagtcagccccccccgggtcctatgcagcactag

SEQ ID NO: 130659 - DNA, 381 bp, synthetic construct
  misc_feature 1..381: note = Description of Artificial Sequence: Synthetic coding sequence
  source 1..381: mol_type = other DNA
atggcggaggcaggagccgggctctcagagacagtaacagaaaccactgttacagtcacaactgagcctgaaaaccggagtctaaccattaaattgagaaagagaaagcctgagaagaaggtggagtggactagcgacactgttgacaatgagcatatgggaaggcgttcttctaagtgctgctgcatctacgaaaaaccgcgtgccttcggcgaatcaagcaccgagtcggacgaggaagaggaggaaggctgcgggcatacacactgtgtgaggggacaccgaaagggtaggcggagggctacacttggacctactcccacaacaccgccccagcctccggacccctctcaaccgcccccggggcctatgcagcattag

SEQ ID NO: 130660 - DNA, 381 bp, synthetic construct
  misc_feature 1..381: note = Description of Artificial Sequence: Synthetic coding sequence
  source 1..381: mol_type = other DNA
atggccgaggccggagccggtctgtcagaaacagttactgaaactaccgtcactgtaacgaccgaacccgagaatcgatccctgacgattaaattgcgcaaacggaagccagaaaagaaggtggagtggacaagcgacacggtggataacgagcatatggggaggcggagttctaaatgttgttgcatatatgaaaagcccagagcattcggggaaagcagcacagaatccgacgaggaagaagaagagggctgtggccatacgcattgtgttcgcggtcatcgtaagggaaggcgtagggcgaccctcggccctacgccaacgacaccacctcagccacccgatcccagccaacccccacccggaccaatgcagcattag

SEQ ID NO: 130661 - DNA, 225 bp, synthetic construct
  misc_feature 1..225: note = Description of Artificial Sequence: Synthetic coding sequence
  source 1..225: mol_type = other DNA
atgggcaggaggtctagtaaatgctgctgcatctacgagaaaccacgggcctttggcgagagctcgactgagtccgacgaggaagaagaggagggctgtggtcacactcactgcgtacggggccacagaaaaggacgccgccgcgctaccctgggtccaacccctaccactcccccacagcccccagacccatcccagcccccaccgggccctatgcagcactag

SEQ ID NO: 130662 - DNA, 225 bp, synthetic construct
  misc_feature 1..225: note = Description of Artificial Sequence: Synthetic coding sequence
  source 1..225: mol_type = other DNA
atgggccgccgcagcagtaaatgttgctgtatctacgaaaaacctcgagcattcggcgagtcctccacagaatcagacgaagaggaggaagaggggtgcgggcacacacattgcgtgaggggccaccggaaggggcgtagaagggctaccctgggacccaccccgaccacacctccccaaccacccgacccatcccagcctccccctggccccatgcagcattag

SEQ ID NO: 130663 - DNA, 225 bp, synthetic construct
  misc_feature 1..225: note = Description of Artificial Sequence: Synthetic coding sequence
  source 1..225: mol_type = other DNA
atgggcagacggagctcgaagtgttgctgtatctatgagaaacctcgagcatttggggaatccagcacagagagcgatgaggaggaggaagagggctgcggccacacccattgtgtcagaggacacagaaagggaaggaggcgggccaccctgggccctactccgactaccccgccgcagcctccggacccgtctcagcctccacccgggccaatgcaacattag

SEQ ID NO: 130664 - DNA, 381 bp, synthetic construct
  misc_feature 1..381: note = Description of Artificial Sequence: Synthetic coding sequence
  source 1..381: mol_type = other DNA
atggccgaggctggagccggtctctcagaaactgtgaccgaaacaactgtgaccgttacgacagaaccagaaaaccgcagcttaactataaagttgaggaaacgaaaacccgagaagaaggtcgagtggacctcagataccgtcgataacgagcatatgggccgaagatcttccaaatgctgttgtatttatgagaaaccaagagcctttggagaatcgagcacagagagcgatgaggaagaggaagagggttgtggccatactcactgcgttaggggacatcggaagggtcgaaggagagccactctcggtccaaccccaacaacacccccacaaccccctgatccatcccaacctcccccagggccaatgcaacactag

SEQ ID NO: 130665 - DNA, 225 bp, synthetic construct
  misc_feature 1..225: note = Description of Artificial Sequence: Synthetic coding sequence
  source 1..225: mol_type = other DNA
atgggccgacgtagtagcaaatgttgctgtatctacgagaagcctcgggccttcggggaaagttccactgagtccgacgaggaagaagaggaaggatgtggacatactcactgcgtccgtggccatcgcaaaggtcggcggcgggcaaccctaggaccaactcccaccacaccaccacagccacccgatccttcccaaccaccacccggacccatgcaacactag

SEQ ID NO: 130666 - DNA, 225 bp, synthetic construct
  misc_feature 1..225: note = Description of Artificial Sequence: Synthetic coding sequence
  source 1..225: mol_type = other DNA
atggggagaagaagttcgaagtgttgctgtatctacgaaaaacccagagctttcggggaaagcagcaccgagagtgacgaagaagaagaagagggatgtggccatacacactgcgtgagagggcatcggaaggggcggcgccgcgccacactcggcccgaccccgaccacccccccccagcctcctgaccccagccaacctccaccaggaccaatgcagcactag

SEQ ID NO: 130667 - DNA, 381 bp, synthetic construct
  misc_feature 1..381: note = Description of Artificial Sequence: Synthetic coding sequence
  source 1..381: mol_type = other DNA
atggccgaggctggcgccgggctcagcgaaaccgtgacagagacaaccgttaccgttacgacagaacccgagaaccggagcttgactattaagctgagaaagcgcaagccagaaaaaaaggttgagtggacatccgatacagtagataacgagcatatggggaggcgatcctcgaaatgttgctgcatatatgagaagccacgggcgtttggcgaaagcagtacagaaagcgacgaggaagaagaggagggttgtgggcacacccactgcgtgcgaggtcaccgcaagggtcggagacgtgctactctggggcctactcctactactcctccacagcctccagacccttctcaaccacctcctggcccaatgcagcattag

SEQ ID NO: 130668 - DNA, 225 bp, synthetic construct
  misc_feature 1..225: note = Description of Artificial Sequence: Synthetic coding sequence
  source 1..225: mol_type = other DNA
atggggcgcaggtcatctaaatgctgttgcatatatgagaagcccagagcgtttggcgagagcagcaccgagagcgacgaggaggaggaggaaggctgtggtcatactcactgtgttaggggccaccgaaagggccggcgtcgagccaccctgggccccacccctactacacccccccagcctcccgatccgagccagcccccccccggacccatgcagcattag

SEQ ID NO: 130669 - DNA, 225 bp, synthetic construct
  misc_feature 1..225: note = Description of Artificial Sequence: Synthetic coding sequence
  source 1..225: mol_type = other DNA
atgggacggcgtagctccaaatgctgctgcatttacgagaagcctcgggcatttggagagtcttctacagaatcagatgaggaggaagaagagggctgtggccatactcattgtgtccgcggccatcgcaagggtcgccggcgcgcaacgctgggtcctactcctaccacccctccacagcccccggacccctcccagcctcccccaggacccatgcagcattag

SEQ ID NO: 130670 - DNA, 225 bp, synthetic construct
  misc_feature 1..225: note = Description of Artificial Sequence: Synthetic coding sequence
  source 1..225: mol_type = other DNA
atgggaagaaggtcctctaagtgttgttgtatatatgagaagcccagagctttcggggagtcctccaccgaatctgacgaggaagaggaagaaggatgcggacatacgcattgtgtaaggggacatcgtaagggccgtagaagagcgaccctcggcccaaccccaaccacacccccccagccgcctgatccctcccagcctccccccggtccgatgcagcattag

SEQ ID NO: 130671 - DNA, 225 bp, synthetic construct
  misc_feature 1..225: note = Description of Artificial Sequence: Synthetic coding sequence
  source 1..225: mol_type = other DNA
atggggcgtcgctctagtaaatgctgctgtatttatgagaaacctcgggccttcggggaaagctctacagagagtgatgaggaggaggaagagggttgtggacacacacattgtgtgcgaggccacagaaaaggacgccgcagggccaccctggggccaacccccacaaccccccctcagcctcccgatcccagccagccccctccaggccctatgcaacattag

SEQ ID NO: 130672 - DNA, 225 bp, synthetic construct
  misc_feature 1..225: note = Description of Artificial Sequence: Synthetic coding sequence
  source 1..225: mol_type = other DNA
atgggtcgacgcagctccaagtgctgttgcatatatgagaagcccagagccttcggtgagagtagtacggaaagcgacgaagaagaagaggagggatgtggacacacacactgcgttcggggtcaccgcaagggccggaggcgggctactctcggcccgactcccacaacccccccacaacccccagatccctcccaacctccaccgggaccaatgcaacactag

SEQ ID NO: 130673 - DNA, 225 bp, synthetic construct
  misc_feature 1..225: note = Description of Artificial Sequence: Synthetic coding sequence
  source 1..225: mol_type = other DNA
atgggacgtagaagctcaaaatgctgttgtatctacgaaaagccacgggctttcggcgaatcctcaacagaatccgatgaggaggaggaagagggatgcggccacactcactgcgtgagggggcacagaaagggtcggcgcagagcaacattgggaccaacacccactacaccaccccaaccgcccgatccatctcagccacctccaggacctatgcaacactag

SEQ ID NO: 130674 - DNA, 381 bp, synthetic construct
  misc_feature 1..381: note = Description of Artificial Sequence: Synthetic coding sequence
  source 1..381: mol_type = other DNA
atggccgaagccggggcaggactgagtgaaacggtgaccgaaaccacagttaccgtcactactgagcctgagaacagaagcctgactatcaagctgcggaagagaaagcctgagaagaaagttgaatggacctctgacaccgtggacaacgaacacatgggacggcggtcctctaaatgctgttgtatctatgagaaaccgcgagcctttggtgagtctagcacagagagcgacgaagaggaggaagagggatgcggccatacccattgtgtacggggccaccggaagggcaggcggcgggcaacacttggacccacaccgacgacccctcctcaaccccctgacccctcccagcccccccccggccccatgcagcactag

SEQ ID NO: 130675 - DNA, 225 bp, synthetic construct
  misc_feature 1..225: note = Description of Artificial Sequence: Synthetic coding sequence
  source 1..225: mol_type = other DNA
atgggtcggaggtcctctaaatgctgctgcatctatgagaaaccccgcgcatttggggaaagtagtacagagtccgacgaagaggaagaggaaggttgcgggcacacacattgtgtacgcgggcaccgtaagggacgacgtcgggctacactgggcccaactcccaccaccccaccacagcccccagatccctcccagcccccgcctgggccaatgcagcactag

SEQ ID NO: 130676 - DNA, 225 bp, synthetic construct
  misc_feature 1..225: note = Description of Artificial Sequence: Synthetic coding sequence
  source 1..225: mol_type = other DNA
atgggtcgccgctcatccaaatgctgttgcatttacgaaaaacctcgagcctttggcgaatcctccactgagagcgatgaggaggaagaggagggctgcgggcacacacactgcgtgcggggtcatcgcaaagggagacgccgagcaacactcggtccaacgccaaccacacctccccaacctcccgatccttcgcagcccccgccaggcccaatgcagcattag

SEQ ID NO: 130677 - DNA, 225 bp, synthetic construct
  misc_feature 1..225: note = Description of Artificial Sequence: Synthetic coding sequence
  source 1..225: mol_type = other DNA
atgggtcggaggtcatctaagtgctgctgcatttacgagaagcccagagcttttggtgagtcctccacagaaagcgatgaagaagaagaagaggggtgcggacacacgcactgcgtgcgtggccatcgcaagggcagaaggcgggccaccttggggccaactccaacaacaccaccacagcctccagatccgagccaaccccctccaggccctatgcaacactag

SEQ ID NO: 130678 - DNA, 225 bp, synthetic construct
  misc_feature 1..225: note = Description of Artificial Sequence: Synthetic coding sequence
  source 1..225: mol_type = other DNA
atgggtaggcgatcgagcaaatgttgctgtatctacgaaaaaccccgggcctttggtgagtctagcaccgaatctgacgaggaggaagaggaagggtgcgggcacacccactgcgtcaggggacaccggaagggtagaaggcgggccactttgggccctacacctaccacaccacctcagcccccggacccatcccagccaccgcctggacctatgcagcactag

SEQ ID NO: 130679 - DNA, 225 bp, synthetic construct
  misc_feature 1..225: note = Description of Artificial Sequence: Synthetic coding sequence
  source 1..225: mol_type = other DNA
atgggtagacggtcctctaaatgctgctgtatctatgagaaaccacgcgcattcggggaatcttccaccgaatcagacgaggaggaagaagaaggctgcggccacacacactgtgtccgagggcaccggaagggtcggcggcgcgctaccctgggaccgactccgaccactcccccgcaaccccctgacccttctcaaccaccccctggtcctatgcaacattag

SEQ ID NO: 130680 - DNA, 225 bp, synthetic construct
  misc_feature 1..225: note = Description of Artificial Sequence: Synthetic coding sequence
  source 1..225: mol_type = other DNA
atgggacgaagaagctctaaatgttgctgtatctatgagaagccgagagcatttggggagagttctaccgaatccgatgaggaggaggaagagggctgcggacacacacactgcgtcaggggccacagaaaggggcgcaggcgagctacgctgggtcccacacccaccacaccaccacagcccccagaccctagccagccccccccaggtcctatgcaacattag

SEQ ID NO: 130681 - DNA, 381 bp, synthetic construct
  misc_feature 1..381: note = Description of Artificial Sequence: Synthetic coding sequence
  source 1..381: mol_type = other DNA
atggccgaggctggcgctgggctttccgaaactgtgaccgaaaccaccgttacggtgacaactgagccagagaacagaagcctgactataaagcttagaaagaggaagcctgaaaaaaaagttgaatggacctctgacacagttgacaatgagcacatgggcagaaggtcaagtaagtgctgttgcatatacgagaagccccgggcttttggcgagtcaagcacggaaagcgatgaagaggaggaagaggggtgcggacatacgcactgcgtgaggggccatcgaaagggccggcgccgggctacgcttggcccaacccccactactcccccacagccacctgaccccagtcagcccccccctggccctatgcagcactag

SEQ ID NO: 130682 - DNA, 225 bp, synthetic construct
  misc_feature 1..225: note = Description of Artificial Sequence: Synthetic coding sequence
  source 1..225: mol_type = other DNA
atgggtcgccggagtagtaaatgctgttgcatctacgagaaaccaagggccttcggggaaagtagtactgaatcagacgaagaggaggaggagggctgcgggcatacacactgtgtgcgcggccatcgtaagggacgtaggcgagcgacacttggacccacccctaccacccctccgcagccccccgacccatctcagcccccccctgggcctatgcagcactag

SEQ ID NO: 130683 - DNA, 225 bp, synthetic construct
  misc_feature 1..225: note = Description of Artificial Sequence: Synthetic coding sequence
  source 1..225: mol_type = other DNA
atgggccgacgttcatcaaaatgctgctgtatatatgagaaaccccgtgcctttggagagagctccaccgagtccgatgaggaagaggaggaagggtgcggccacactcactgcgtgcggggccatcggaagggccgacgccgggctacgttgggtcctactcctacaacacctcctcagccccccgacccttcccagcctccacctgggcccatgcagcattag

SEQ ID NO: 130684 - DNA, 225 bp, synthetic construct
  misc_feature 1..225: note = Description of Artificial Sequence: Synthetic coding sequence
  source 1..225: mol_type = other DNA
atgggtcgacgcagttccaagtgctgctgcatatacgagaaacctcgtgcgtttggcgaaagcagcactgaaagtgatgaggaggaagaggagggctgtgggcacacacactgtgttagaggtcatagaaaaggaaggcgccgggctaccctcggcccaacacccaccaccccgccgcagccacccgacccctcacagccgcctcctggacctatgcagcattag

SEQ ID NO: 130685 - DNA, 444 bp, synthetic construct
  misc_feature 1..444: note = Description of Artificial Sequence: Synthetic coding sequence
  source 1..444: mol_type = other DNA
atggctgactcaggtactgcaggaggagctgctttggctgcccccgccccgggccctgggtccggagggcccggcccgagagtgtactttcaaagcccaccgggcgcggcgggggaggggcctgggggtgccgatgatgagggtccggtacgtagacaggggaaggtcacagtgaagtatgatcgtaaggaactgcggaagagattgaatttggaagaatggatacttgagcagcttacacgcttgtatgactgccaagaggaggaaataccagaactggagatagacgtcgatgagctgctggatatggaaagtgacgacgcacgggctgctagagtaaaagagctgctggtggactgctacaagcccacagaggccttcatctccggtttactcgataagatacgaggaatgcagaagttgtctactccccagaaaaagtag

SEQ ID NO: 130686 - DNA, 498 bp, synthetic construct
  misc_feature 1..498: note = Description of Artificial Sequence: Synthetic coding sequence
  source 1..498: mol_type = other DNA
atgtcagttgcgacaggcagtagcgaaaccgccggtggcgcatctgggggaggggcacgtgtgttttttcagtctccgaggggaggagcaggagggtcccctggatcttcttctggatccggctcatcgagagaagacagcgccccagtggctacagccgcagctgccggccaggtgcagcagcagcaacagagacgccatcagcaggggaaggtgactgttaaatacgacagaaaagagctgcggaaacgcttggtgctggaggaatggattgtcgagcaacttggccagctctatggctgcgaagaagaagagatgccggaggtggaaattgatatagacgacctgttggacgccgactcagatgaggaaagagcctctaagttgcaggaggctctggtggattgttacaaacccactgaggagttcataaaggagttattgagccggatacggggcatgcgcaagctgagccctcctcagaagaaatcagtttag

SEQ ID NO: 130687 - DNA, 438 bp, synthetic construct
  misc_feature 1..438: note = Description of Artificial Sequence: Synthetic coding sequence
  source 1..438: mol_type = other DNA
atgctgagttcgtcccccgcctcatgcacatcccccagccccgatggggaaaatccttgtaagaaggtccactgggccagcggtcgcagacgcacgtcctcgaccgattccgaaagcaagagtcacccagactcctccaagatcccccgctcaagacggcctagtagattgaccgtaaaatatgacaggggtcagcttcaacggtggttagagatggagcagtgggtggatgctcaagtccaagaattatttcaggaccaggctacaccatccgagccggaaattgatttggaagcactgatggacctgagtaccgaagaacaaaaaactcagctagaagccattttagggaattgcccacgacccacggaagcctttatatcagaactactgtcccagctcaaaaagctgagaaggttaagccgcccccagaaatag

SEQ ID NO: 130688 - DNA, 603 bp, synthetic construct
  misc_feature 1..603: note = Description of Artificial Sequence: Synthetic coding sequence
  source 1..603: mol_type = other DNA
atgctgtcttccagtccagcgagttgcacaagcccttcaccagatggcgagaatccttgcaaaaaagtgcattgggcgtctggtaggaggcgaacttcttcaacagattcggaatccaagtctcacccagactcctctaagatcccgaggagcaggcggccatcccgactcacggtgaaatacgaccgaggtcagttgcagcgatggctcgaaatggaacagtgggtcgatgcccaggttcaggaactcttccagagcctcgccctctcccccagattagaatgttcaggggttattcattcacttcagctcctgcccccagggtttaacagattcagctgtttaagctcatggagcagctgggactacgggattaaacaacctctccttagtcttagattgacatggaagctttcatggatctacccgcaacgaagcaggcgcctttcgtggcgcccattccttggcacagcaccggctccccaacggctgctgagcctgtcctgttctgtgaacagccgaaacagtggcgatagcgctggattaaggaacaagccagagcggccttctctggcagcttccgctctgccgggtctgccttag

SEQ ID NO: 130689 - DNA, 516 bp, synthetic construct
  misc_feature 1..516: note = Description of Artificial Sequence: Synthetic coding sequence
  source 1..516: mol_type = other DNA
atggagcaggataactcccctaggaagattcaattcacagtacctctgttagagccacacctggatccagaagccgcagaacaaatccgtagacgacggccgaccccagccacgctagtgttaacttctgaccagagctctcctgagatcgacgaagatcgcattcccaatccgcatctaaaaagcactctggcgatgtccccccgtcagcgaaagaaaatgaccagaatcactccaaccatgaaggaactccagatgatggtggagcatcacctgggccagcagcagcagggagaggagccagagggggcggccgaatccaccgaaactcaggagagcaggcctcctggaattcctgacactgaagtagagtcccgactgggaacctctggcaccgccaagaagacagctgagtgcattcccaaaactcacgagagagggtctaaagagccatctaccaaagaaccgtcaacacatatccctccactggatagcaagggagccaattccgtctag

SEQ ID NO: 130690 - DNA, 462 bp, synthetic construct
  misc_feature 1..462: note = Description of Artificial Sequence: Synthetic coding sequence
  source 1..462: mol_type = other DNA
atggaacaagacaatagccctaggaagatccagtttaccgtgcccctcttagagcctcaccttgatccggaggccgctgaacagatccggaggcgccgccctactccagcaactttggtgctcacctccgaccaaagcagccccgaaattgacgaggacagaattcccaatcctcacctgaaaaagcttcagaacgcgtcacttaagctaacccgagaggctgtgcgtaatccggctcagaagaatccacagcctatttatcaccactggatccctagggaaccaacaagatgtcaccgcagagggggtactggtgggcaaaaaagcgtaggcggatttccatgttcgacccatactttggcccctttttacgttttcacgcgaagtattctgctgctgaaacgcggagaaagaatgagccatccgttagaaccaagggacgatccaaccaagatgccatag

SEQ ID NO: 130691 - DNA, 330 bp, synthetic construct
  misc_feature 1..330: note = Description of Artificial Sequence: Synthetic coding sequence
  source 1..330: mol_type = other DNA
atggaaccaaattctccgaaaaaaatccagtttgcagtgccagtgtttcagtctcagattgctccggaggcagccgagcaaatcagaaagaggcgaccgacccctgcgagcctggtaattttgaacgagcacaatcctcccgagatcgatgacaaaagaggtcccaatacccagggagagctgcagaatgcctctcccaagcagagaaagcagagcgtctacacgcccccgacaatcaaaggagtcaagcacctgaagggtcaaaacgaatctgcgttccccgaagaagaagagggcaccaacgagcgcgaggaacaacgggaccattag

SEQ ID NO: 130692 - DNA, 330 bp, synthetic construct
  misc_feature 1..330: note = Description of Artificial Sequence: Synthetic coding sequence
  source 1..330: mol_type = other DNA
atggagccaaactctccgaaaaaaatacaattcgctgtgcctgtctttcagagtcagattgctcctgaagctgcagaacaaattcggaagcggagacctactcctgcctcccttgtcatactgaatgagcataaccccccggagatcgatgataaaagaggcccgaacactcagggcgaactccaaaacgcctccccaaagcagcggaaacagtctgtctatacaccacctacaatcaagggcgtaaagcatctaaagggccagaatgagtccgccttcccagaggaagaagaagggacgaacgagcgtgaagaacagagggatcactag

SEQ ID NO: 130693 - DNA, 330 bp, synthetic construct
  misc_feature 1..330: note = Description of Artificial Sequence: Synthetic coding sequence
  source 1..330: mol_type = other DNA
atggagccaaactcccctaaaaagattcagtttgccgttcctgtgttccagagtcaaatagccccggaggccgctgagcaaatccgtaaacgaaggcccacaccagcatctctcgttatactgaacgagcataacccacccgagattgacgacaaaagaggccccaacacccagggggaactgcagaacgcatctccaaagcagagaaaacagtcagtgtacacaccaccaacaataaaaggtgtgaaacacctcaaggggcagaacgagtcagcattcccggaggaagaagaagggactaatgagcgagaggagcaacgagatcattag

SEQ ID NO: 130694 - DNA, 618 bp, synthetic construct
  misc_feature 1..618: note = Description of Artificial Sequence: Synthetic coding sequence
  source 1..618: mol_type = other DNA
atggcagcgagtacagctagtcacagacctatcaaaggcatcctcaagaacaaaacctcaaccactagcagtatggtggcctctgcagaacagcccagggggaatgttgacgaagaactgtcaaaaaaaagccagaagtgggatgaaatgaatattctggctacctaccatccggcggacaaggactacgggctaatgaaaatagatgaaccctccaccccataccatagcatgatgggggatgacgaggacgcctgtagtgacacggaggctaccgaggctatggctccagatatcctagcacgaaagctcgccgccgctgagggactggaacccaaatatagaatccaggagcaggagtctagtggagaagaggattctgaccttagtccagaggagagagaaaagaagagacagtttgaaatgaaacgtaagctgcattacaacgaaggtcttaacataaaactggcaagacagctgatttccaaagacctccatgacgacgacgaggacgaggagatgctcgagactgctgacggggaatccatgaacacggaagaatcaaatcagggatcgactccaagcgaccagcagcaaaataaattgaggtcctcttag

SEQ ID NO: 130695 - DNA, 3093 bp, synthetic construct
  misc_feature 1..3093: note = Description of Artificial Sequence: Synthetic coding sequence
  source 1..3093: mol_type = other DNA
atgaaaatggccgacgcaaaacagaagcggaacgaacagctcaaaagatggattggctccgaaacagatctggaaccgccagtcgtcaagcgccagaaaactaaagtcaagttcgacgacggggcagtcttcctggcagcatgttcctcgggagataccgacgaagtgctcaagcttctgcatcgcggagcagatatcaactacgctaatgtcgatggactcactgcgctgcaccaggcctgcatcgacgacaatgtggacatggtaaagtttttggttgaaaacggcgcaaacattaatcaacccgacaacgaggggtggattccactgcatgccgcagcttcatgcgggtacctggatattgctgagttcctgatcgggcagggcgcccacgtcggggccgttaacagcgagggcgatacccctttagatatcgccgaagaagaggctatggaagagttactccagaacgaagtcaatcggcagggtgtcgacatcgaagctgctcgcaaagaagaagaaagaatcatgctcagagatgctagacagtggctgaactctggtcatatcaacgacgttcgccatgcgaagtccggcggtaccgccctgcacgtggctgctgccaaggggtacacggaggtgttgaaactgttgatccaggccggttatgacgtgaacatcaaggattacgatgggtggacccctcttcacgccgctgcccattggggcaaagaagaggcctgtcgaatcttggtggacaatctttgtgatatggaaatggtgaataaagtgggacagactgcctttgatgtcgctgatgaagacatcctgggttatctcgaagagctgcagaagaagcagaatctgctgcactcggaaaagcgggacaagaaaagccctcttatcgagtctaccgcaaatatggacaataaccagtcccagaagaccttcaaaaataaagaaacgctgatcattgaacctgagaagaacgcctctcgtatagagagcctggagcaggagaaagttgacgaggaagaggagggcaaaaaagacgagtctagttgctctagtgaagaagacgaggaggacgatagtgagagtgaggccgaaactgacaagactaagccattagcctctgttaccaatgcgaatacgagctcaacccaggccgcacccgtagcagtaaccactcccacggtgtcaagtggccaggctacacccacctcaccaatcaagaagttccccacaacagctactaaaattagtcccaaggaggaggagcgcaaagacgagtcgcccgcaacgtggcgactgggccttcgaaaaaccggatcatatggcgccctggccgagatcactgcctccaaggaaggtcagaaagagaaggacactgccggcgtcacaaggagtgccagttcccctagactgagcagctctctcgacaacaaagagaaagaaaaggacagtaaagggaccaggctggcatacgtggctcctactattcccaggcggctagcctccactagtgacattgaagagaaggaaaatcgggacagttctagtttacgtacatccagctcttatacccgtcgcaagtgggaagacgatctaaagaaaaatagtagtgtaaacgagggttctacctatcataagagctgttccttcggccgaagacaggacgatctgatctcctctagcgtgccttctacaaccagtactcccactgttactagcgccgcagggctgcagaaaagccttctgagctcaacctcgacgactaccaagatcacaacaggctcttcctccgctggcacccagagcagcacgtccaaccgactttgggcagaggacagcacagaaaaggagaaagattccgtcccgacggccgtgacaatccctgtcgcaccgactgttgtcaatgcggcagccagcaccacaaccctcacaactacaaccgctggaaccgtgtctagtacgactgaggtccgcgagcgacgtaggtcctacttgactccagtgcgggatgaggagagcgagtcacagcgcaaagctagatcccggcaggctcgacagagtagaagatccactcagggggtgacactgacagatcttcaagaggcagaaaagaccataggaaggagccggagcactcgcactcgtgagcaggagaacgaagaaaaagaaaaggaggagaaggaaaagcaggataaggagaaacaggaagagaagaaggaatccgagacttcgagggaggatgaatacaagcagaaatacagccgtacctacgacgaaacttaccagcgctatcgccccgtgtctacaagcagctcaaccacaccttcgagcagtctctctacgatgtcgagcagcctttatgcatcctctcagctcaataggcctaactcccttgtcggtattacatccgcgtactcccgcggaatcacgaaggaaaatgagcgtgaaggtgaaaagcgtgaggaagagaaggagggggaggataaatctcagcccaagtctatccgggaaaggcgtcgcccgcgtgaaaagcggcgtagcaccggggttagcttctggacccaggacagcgacgagaatgagcaggaacagcagtcggacacagaggaggggtcaaataagaaagaaacccagactgacagtatttctagatacgagacctcttccacaagtgccggggatcgctacgactcactattgggcagatcagggtcctactcttatctggaggaacgaaagccctattcctcccggttagaaaaggacgatagcactgacttcaaaaaattatatgagcagatcttagccgaaaacgagaagctcaaggcccagttgcatgacaccaacatggagctgacagatctcaagctacagcttgaaaaggccacccagagacaggagcggtttgctgacaggtccctactcgagatggaaaagcgagaaaggagagcactcgagagacggattagcgaaatggaagaggagcttaaaatgctgcccgatctaaaagcggataatcagcgccttaaggacgagaacggtgcactgatacgcgttatcagtaaactgtccaaatag

SEQ ID NO: 130696 - DNA, 2916 bp, synthetic construct
  misc_feature 1..2916: note = Description of Artificial Sequence: Synthetic coding sequence
  source 1..2916: mol_type = other DNA
atgaaaatggcggatgccaaacagaagcggaatgagcagctcaaaagatggattggaagtgaaacagacctagagccacctgtggttaaaaggcagaagacaaaagtaaagtttgatgacggagctgtcttcctcgctgcttgctctagtggtgacacggacgaagtgctcaagcttctgcatcggggtgctgatatcaactacgccaatgtagatggattaacggctctccaccaggcctgcatcgacgataacgtggacatggttaaattccttgttgagaatggtgctaatataaatcagccagataatgaggggtggatacccctccacgctgcagcttcttgtggatatctggacatagcagagttcttaataggacagggagcccacgtcggggcagtcaactcagagggtgacacccccctggatattgcagaagaagaggctatggaggaacttttacagaatgaggtcaaccgccagggggtagatatcgaggccgccagaaaagaagaagagcgcatcatgttgcgcgacgccaggcagtggctcaacagtgggcacattaatgatgtgcgacacgccaagagcgggggaacagcgctgcatgtcgctgcagctaaagggtacaccgaggtgctcaagcttttaatccaggcaggctatgatgtgaatatcaaagactatgatggatggacacctcttcacgccgccgctcactgggggaaagaggaggcttgtaggatactggtagacaacttgtgcgacatggaaatggtcaacaaagtgggacaaactgcattcgacgtcgcggacgaggacattctcgggtacctggaagagttgcaaaagaaacagaacctgcttcattccgagaagagagataagaagagtcctttgatcgagtcgactgcaaatatggacaacaaccagagtcagaaaacgtttaaaaacaaggaaaccctaatcatcgaacccgagaaaaatgcttcacggattgaaagtctcgagcaggagaaagttgatgaggaggaggaggggaaaaaagatgaatcatcatgtagctcagaagaggatgaagaagatgactcggaatctgaagcggagacagataagactaaaccactggcaagcgttacaaatgctaacaccagctctactcaggctgccccagtggccgttactacccccacggtgtctagtggacaggccacacccacttcaccaattaagaagttccccacaaccgcaaccaagattagtcctaaggaggaagagaggaaggacgaaagtcccgccacctggcggctgggactaaggaaaactggaagctacggggcactagcggagattacagctagcaaagaaggacaaaaggagaaggataccgccggcgttactagatctgccagttcaccacgtctctcctcaagccttgacaacaaggagaaggagaaggactctaagggtaccagactggcatacgttgctccaacaattccaaggcgcctggccagtaccagcgacattgaagagaaggagaacagggacagtagttccctccgcacttcttctagttatactcggcgaaagtgggaggatgacctgaagaagaattcctcggtgaatgaaggttcaacctaccataagtcttgctcctttggtaggaggcaagatgacctcattagtagcagtgtcccaagcaccacatcgacacccactgtgacaagcgccgccgggctgcaaaagagtctattgtcttccacatctactacaactaagataacaaccggatccagtagtgctggtacccaaagccggagctatttaacccccgtccgtgacgaagagtctgaatcacaaagaaaggctcgctcccggcaggcccggcagtcaaggcggagtactcagggcgtcaccttaacagacttacaggaggcggagaagacaatcgggcgaagtcgatcaacccgcacccgagaacaggaaaatgaggaaaaagaaaaagaggaaaaggagaaacaagacaaagagaaacaggaagaaaagaaggaatccgagacaagcagagaggacgagtataagcagaaatacagcagaacttacgacgaaacctaccaaagatatagacccgtgagtacaagctcgagcactactccctccagctctctctctaccatgtcgtcgtcactgtatgccagttcacagttgaaccgtcccaattcactggtgggcatcacaagtgcatactcacggggtatcacaaaagaaaacgagagggaaggcgagaagagggaggaagagaaggagggggaggataagtcccagcctaaatctattagagagcggagaaggccacgagagaagaggaggtccacaggcgtgagcttctggacgcaggatagcgatgagaatgagcaggaacagcagtctgacacggaggagggcagcaacaagaaagagacccaggtcaataccattaccctctacgaaactagctctacttccgccggcgacaggtatgacagtcttttggggcgatcaggatcctatagctaccttgaggaacgtaagccctactcgtctaggttggagaaagatgattctactgactttaagaagctttacgagcaaatactggctgagaatgagaaactgaaggcccaactgcacgataccaatatggagttaacagaccttaaattgcagctcgagaaggctactcaacggcaggaacgctttgccgaccgttccctgctggaaatggagaagagggagcgcagagctctggagaggcgcatctcagagatggaagaggaattgaagatgctccccgatctcaaggcagataatcagcgcctgaaagacgagaatggagccctgatacgggtgatatccaaactgtccaagtag

SEQ ID NO: 130697 - DNA, 2925 bp, synthetic construct
  misc_feature 1..2925: note = Description of Artificial Sequence: Synthetic coding sequence
  source 1..2925: mol_type = other DNA
atgaagatggcggacgccaagcagaaacgcaatgagcagctgaagcgctggattggttcagaaactgacctggaaccgcctgtagtgaaacggcagaagactaaggtgaaatttgatgatggagcagtgttcctggctgcctgttcctctggtgacactgatgaagtcttgaagctcctgcatagaggcgccgacatcaactacgccaacgtggacgggctgactgcacttcatcaagcttgcatcgatgacaacgtggatatggtaaagtttctcgtggagaacggggcgaacatcaaccagcccgataacgaaggatggatccccctgcatgctgccgcttcttgtggctatctggacattgccgagtttctgatcggtcagggggcccatgtcggggccgtgaatagcgaaggagatacgcccttggacatcgccgaggaggaagctatggaggagcttttacaaaacgaagttaaccgtcagggcgttgatattgaggccgcacggaaagaggaggaacggataatgctgcgggatgcgagacaatggctgaacagtggtcacattaacgacgtaaggcacgctaaatcaggcggcacagccctgcacgtagcagcagctaaaggctataccgaagtgctgaaactccttattcaggctggatatgatgtgaatattaaagactacgatggttggacgcctttacacgcggctgctcattggggtaaagaagaagcgtgtcgcatcctggtggataacctatgcgatatggaaatggtcaacaaggttgggcagaccgcattcgacgtcgctgatgaagatatactaggctatttggaggagctgcagaagaagcaaaatttgcttcacagcgaaaagagagacaaaaaatcgccccttatcgagagcacagccaatatggacaataaccagtcccaaaagacatttaaaaataaagagaccctaatcattgagcccgaaaagaatgcaagccgtattgaaagtctggaacaggaaaaagtggacgaggaggaagaaggcaaaaaggatgagagttcgtgcagcagcgaggaggacgaagaagatgactccgagagcgaggccgagaccgacaaaaccaaacccctggcaagtgtgaccaatgccaacacaagctctactcaggctgccccagtggccgtaaccacccccacagtgtctagtggccaagcgacgccaacatcaccaattaaaaagttccccaccaccgctaccaagattagccctaaagaagaggaaagaaaggatgagtcccctgccacatggcggttaggtttaagaaaaaccgggtcttacggcgccctggcagagatcactgctagcaaagaaggccaaaaggaaaaagacactgctggcgtaacacgatcggctagctctccccgcctctcctcgagcctggacaacaaggaaaaggaaaaagatagtaagggcacgcgcctggcgtacgtcgcaccaaccataccaagacgcctagccagtacatctgatattgaggaaaaagaaaaccgcgattccagttctctgagaacgtcaagctcctatacccggcgcaagtgggaagacgatcttaaaaaaaattctagcgtgaacgagggttccacctaccacaagagtactagtaatcgcctttgggcagaggattcaacggagaaggagaaagacagtgtcccgactgcagtgacaatcccagtggcacccacggtagtcaacgccgctgcctccactacaacactcaccacaacgactgcaggtacagtgtcgagcactacggaagttagagagaggaggcggtcttaccttactccagtgagggacgaggagtctgagtctcaaagaaaagcacggagccggcaagctcgacagagtcgtcggtccacccagggagtcactttgaccgacttacaggaggctgagaaaacaattggccgtagtaggtcgacacgtacacgagaacaggagaatgaagagaaggaaaaagaggagaaagaaaagcaggacaaggaaaagcaggaggagaagaaagagtcggagactagccgagaggatgaatacaagcaaaaatacagccggacatacgacgagacctatcagaggtaccgaccagtgagtacaagttccagcaccaccccgagctcatctctgagtacgatgagttcttccctttatgcctccagtcaactgaaccgaccaaactccctcgtaggaattactagcgcttatagccgcggaatcacgaaggaaaacgagcgcgagggggaaaaacgagaggaagaaaaagagggagaggacaagtcacagcccaagagcattagagaaagaaggagacctcgggaaaagagacggtccacaggagtgagcttttggacccaggacagcgacgagaatgagcaggaacagcagtcagataccgaggaggggtcgaacaagaaggagacacaggttaacacaattacactgtatgaaacctctagcacctccgccggagatcgctatgatagcctgttggggcgtagcgggtcctattcatacctcgaagaaaggaagccttactcttccagactggaaaaagacgactcaaccgatttcaaaaagctttatgagcaaatactggctgagaacgaaaagctcaaagctcagctgcatgacactaatatggagctgaccgacctgaagctgcaactagagaaagcgactcaaaggcaggagaggttcgctgacagatccttgctcgagatggagaagcgagaacggcgcgctctcgagaggcggatcagtgaaatggaggaggagttaaaaatgctgcctgatctgaaagctgacaatcagcgactgaaggacgagaatggggcccttatcagggtaattagcaagctgtctaaatag

SEQ ID NO: 130698 - DNA, 2988 bp, synthetic construct
  misc_feature 1..2988: note = Description of Artificial Sequence: Synthetic coding sequence
  source 1..2988: mol_type = other DNA
atgaaaatggccgacgcaaaacagaaaaggaacgagcagctgaaaagatggattgggtctgaaacggaccttgaacctcctgtggtgaaacggcaaaagacaaaggtcaagtttgatgacggcgcagttttcctggctgcctgttccagtggagacactgatgaggtactaaagctgctgcacagaggagccgacattaactatgccaacgtggatggtctgactgcccttcatcaggcttgcatcgatgacaatgtcgacatggtcaaatttttggtggagaacggcgccaatatcaatcagccagacaatgagggttggatccctttacacgcagccgcctcctgcggttatttagacatcgctgaattcctgatcggacaaggagcccatgtcggagcagtgaattcggaaggagacaccccactggacattgcggaagaagaagccatggaggaattacttcagaatgaggtgaataggcaaggcgtggacattgaggctgctcgcaaagaagaggaacgtattatgcttcgtgatgcccgccagtggctgaatagcggacacataaacgacgttaggcacgccaagtccggggggacagctctccacgtggccgccgccaaaggctacactgaggtgctgaaactgctgatacaggccggatacgatgttaatatcaaggactacgatggatggacccccctccacgccgccgcccactggggaaaggaggaagcatgccggatacttgtggacaacctgtgcgacatggagatggtgaacaaggtcggacaaacagcattcgatgttgcggatgaggatatcctgggctacctagaggagctgcagaagaaacagaacctgctgcacagcgagaagcgggataagaagtcccctctgatcgaaagcacagccaatatggacaacaaccagtcacagaagacatttaagaacaaagagactctgattattgagccagagaagaacgctagcagaattgaaagtctggagcaggagaaggtcgatgaagaagaggaagggaaaaaggatgaatcttcctgtagctctgaagaggatgaggaggacgattcagagagcgaagcagaaacggataaaacaaaaccgctggcttccgttaccaatgcaaacacctccagcacccaggccgccccagtggccgtgactactcccaccgtaagctctggacaagcaacacccacaagccccataaaaaaattcccgacaaccgccaccaagataagtcctaaggaagaggaaaggaaagacgagtctcccgcaacgtggagactcggcctacgaaaaaccggatcatatggcgccctcgccgagatcaccgcaagcaaggaaggtcaaaaagagaaagatactgccggcgttacacggagtgccagctcgccacgcctttcctcgtcactggacaataaagagaaagaaaaggacagtaaagggacccgcctggcctatgtcgcgccgactattccaaggaggcttgctagcacatcggatatagaggagaaagagaatcgtgattcctccagtctgcggacctctagctcatacacgcgtcggaagtgggaggacgacctgaaaaaaaactcaagcgttaacgaaggcagcacctaccacaaatcttgcagtttcggccgcagacaggatgatcttatctcgtcttcggtgccatccaccacttctacccccactgtaacctctgcggccggtctacaaaagtcactgctgtcatccactagtacaacaacgaaaattaccactggtagcagttccgcggggacgcagtcctcgaccagcaaccgcctctgggccgaggatagcactgagaaagagaaggacagtgtgccaaccgcggtgacaattcctgtggcccctacagtcgtgaatgcggcggctagtactaccacacttacaactactactgccgggacggtgtccagcacaacggaggttagagaacgtagaagatcatacctgacacccgtgagggatgaggagagtgagagccaacgcaaggcccgctcacggcaggctcgccagtcaagacggagcacgcaaggcgttaccctgaccgacctgcaagaggccgagaaaacaatcggaagatcacggagcaccaggaccagggagcaggagaatgaggagaaagaaaaggaagaaaaggagaaacaggacaaagagaagcaggaggaaaaaaaggagtctgaaacatcacgtgaggacgaatacaagcagaaatatagtcgcacgtacgacgaaacttatcagcgctatcgaccggtcagcacgtcttcttccactacaccgtcctccagcctttctactatgtcatcatccttatacgcttcatcccagctcaatagacccaactctttggtggggatcacttccgcttatagccggggaatcaccaaagagaacgaaagggaaggggagaagcgagaagaggagaaagagggcgaagacaaatcacagcccaagtctattcgagaacgacgtaggccgcgcgaaaagagacggtctacaggtgtctcattctggacccaagactctgacgaaaacgaacaggagcaacagtccgatacggaggaggggagcaataaaaaggagacgcaggtgaacactatcactctctacgaaacaagtagcaccagtgctggcgatcggtacgactccctcttggggagatccggctcatactcctatttagaagagcgtaagccttattcttcaaggttggaaaaagatgatagcacagacttcaaaaagcgacaggagcgattcgcagaccgctctctgctcgaaatggaaaagcgcgaaagacgggcgctggagagacggatctccgaaatggaggaagagctgaagatgctcccagatttgaaggcagacaaccaacgcctcaaagacgagaacggcgctttgatcagagtgatctcaaagctcagcaagtag

SEQ ID NO: 130699 - DNA, 2988 bp, synthetic construct
  misc_feature 1..2988: note = Description of Artificial Sequence: Synthetic coding sequence
  source 1..2988: mol_type = other DNA
atgaaaatggcggatgccaagcagaaacgtaacgaacagctaaaacgttggataggcagcgaaacagatctggagcctccagtcgtcaagaggcaaaagactaaggttaagtttgacgatggcgccgtgttcctagccgcgtgctcatctggtgacacagatgaggtgttgaaactgttgcatagaggagccgatataaactacgctaatgtggatgggctcacagctctccaccaagcctgcatcgacgataacgtggatatggtcaagttcctcgtggaaaacggggccaacattaatcagccagacaacgagggatggatcccacttcacgcagctgcctcatgtggttacttagatatagcagagttcctgattgggcaaggtgctcacgtgggcgcagtcaactctgagggagatactcccctggatattgctgaagaagaggctatggaagaactgctccagaacgaggttaacaggcagggtgtggatattgaggcagcacgcaaggaggaggagcggatcatgcttagggacgcccgccagtggttaaattctggtcatatcaacgacgttcggcatgcgaaaagcggaggcacagcactccatgtggctgctgccaaggggtacaccgaggtactcaaacttctcattcaagctggctacgatgtgaatatcaaggactacgatgggtggaccccattgcacgcggcagctcactggggaaaggaagaggcctgccgtatcctggtcgacaacttgtgtgatatggagatggtcaataaagtaggacagaccgccttcgacgtggctgatgaggatatcttgggatatttggaggaactgcagaaaaaacagaacttactccactcagaaaagagggataagaagtccccactcatagagagcaccgcgaacatggataacaaccagtctcaaaagacttttaaaaacaaggagacactgattattgaaccagaaaagaacgctagccgtattgagtctctcgaacaggagaaggtcgacgaggaagaggaaggtaagaaagacgaatcctcttgctcctccgaagaagacgaagaggacgactcggaatcagaagccgaaaccgacaagaccaagcctctagcatccgtgacaaatgctaacacctccagtacacaagccgctccagttgctgtgaccacccccaccgtctcctcgggacaggctacacccacttcccctattaagaagtttccgactacagcaacgaaaatttcgcctaaggaggaggagcgcaaggacgagagtcctgcgacctggcgcctcggtttgagaaagacagggtcttatggagccctagcggagatcacagccagcaaagagggtcagaaggaaaaggacacagcgggggtcacaaggtccgccagctctccccggctgagctccagcttggataacaaagagaaagagaaggacagcaaggggacccgtctcgcatacgttgccccaaccattccgagacgcctggccagcacaagcgacattgaagagaaagagaatcgcgatagcagctccctgcggactagctctagctataccagaagaaaatgggaagatgatctaaaaaagaatagcagcgtgaatgaggggagcacataccacaaaagttgcagcttcgggaggcgccaagacgacctaattagctcgagcgtgcctagcacaacgagcacacctaccgtcacaagcgcagctggactgcaaaagtccctgttgagctctacatccaccaccacaaaaatcacaactggatcaagctctgccgggacccagtccagcacctccaaccgactctgggcagaagattctaccgagaaagagaaggatagtgtcccaactgcagtcactattcccgtcgcccccaccgtcgttaacgccgctgcctccaccacaactctgacaacaaccacagctggaacagttagcagtacgacggaagtgagagagagacgaagatcctatctcacacctgtccgcgatgaggagagcgagagccagaggaaggcacggtcccggcaggccaggcagtcaagaagaagcacccagggcgttacgctcacagacctgcaggaggccgagaaaactatcggccgctcccggtcaacaaggaccagggaacaggagaacgaggagaaggagaaagaggaaaaggagaaacaggataaagagaaacaagaggaaaagaaggaatctgaaacaagccgggaggatgagtataaacaaaagtactcccgaacctacgatgagacctatcagagataccggcccgtgtcaacttcatcatctaccactccttccagttccctgagcaccatgtcatctagcctgtatgcctcgtctcagttaaaccgcccgaattccctggtcggaatcacctcggcatacagtcgcggaattactaaggagaatgagagggaaggagaaaaaagagaagaggaaaaagagggagaggataagtcccagcctaaatctatcagggagcgtcgacggccccgggaaaaaaggcgctccactggggtgtcattttggacccaggattcagatgagaatgagcaagaacagcaaagcgacaccgaggaaggatcaaataagaaggaaacccagactgattctattagtcgttatgaaactagctccacgagcgcaggggacaggtatgacagtctcttgggcaggtcagggtcctatagctatctggaagagagaaagccctattcctcaagactggagaaggatgactcaactgactttaaaaaacgccaggagcgattcgcagaccgctccctgctggagatggagaagagggaaagacgggctctggagcgccgtatcagtgaaatggaggaggagctgaaaatgcttccggacctaaaagctgataaccagaggctgaaagatgaaaatggtgccttgattcgcgtcatttccaagctcagcaagtag

SEQ ID NO: 130700 - DNA, 3093 bp, synthetic construct
  misc_feature 1..3093: note = Description of Artificial Sequence: Synthetic coding sequence
  source 1..3093: mol_type = other DNA
atgaaaatggccgacgcaaaacagaaacgaaacgagcagttgaagaggtggatcggctctgagactgacctggaacctccagttgtgaaaagacaaaagacgaaggtaaagtttgatgacggcgccgtctttctcgctgcttgcagctccggcgatactgacgaagttctaaagctgctccaccggggagccgatataaactacgccaacgtggatggtctgactgccttacaccaggcctgcattgacgacaatgtcgacatggtgaagtttcttgtagaaaatggggctaatattaaccagcccgataacgagggttggatccctttacacgctgccgcaagctgcgggtatttggacattgccgagttcctgataggtcagggtgctcacgttggggctgtcaactccgagggcgacacccctctggacatcgcagaagaggaggccatggaagagctgctgcaaaatgaggtgaacaggcagggggtagacatcgaagccgcacggaaggaagaggagaggattatgttacgtgacgctcgtcagtggctgaattctgggcatatcaacgatgtgaggcacgccaaatcaggcggcactgctctgcatgtggccgcggctaagggatataccgaggtcttaaaactgctcattcaagccggatacgatgtgaatatcaaggattatgacgggtggacgccccttcacgctgccgcacactggggcaaggaggaggcatgtagaatcctggtggacaatttatgcgacatggaaatggtcaataaggtcggacagactgcttttgatgtggccgatgaagatattctcggataccttgaagagctgcagaagaagcagaatttactgcattctgaaaagagagacaagaagagtcccctgatagagagtaccgctaacatggataataaccagtcccagaagactttcaaaaataaagaaaccctgatcatagaaccggagaagaacgcctcaagaattgagagcctggaacaggagaaagtggacgaagaagaggaaggcaaaaaagatgagtcaagttgcagctcagaagaagacgaggaagacgactctgagagcgaggccgaaacagataagacgaagcctctggccagcgtaacgaacgccaacacgagtagtacgcaagctgctccagtggcagtgaccacccccactgtaagttccgggcaagccacccctaccagtccaatcaaaaaattcccaacaacagctaccaagatcagcccaaaagaagaagagcggaaagatgagtcacccgccacttggagactgggcctcaggaaaacaggctcctatggggccctcgctgagatcactgccagtaaagagggccaaaaggagaaggatacagcaggcgtgactcgctccgcatcttcgcctagactaagttcaagccttgacaataaagaaaaagaaaaagactccaaagggacaagactggcctacgtggcacccaccatcccaaggaggttagcgtctacctccgacatagaggaaaaggaaaatcgggactccagctcgttacgaacctctagcagttatacccggaggaagtgggaagatgacctgaaaaaaaactcttccgtgaatgaaggcagcacttaccacaagtcctgtagctttggccgaaggcaggacgacctcatctcatcatcggtcccttccacgaccagtactcccaccgtcacttcagccgccggcttacagaaaagcctgctatccagcacaagcactaccacgaagatcacaacgggttcttccagcgccggcacgcagagctctactagcaaccgactgtgggctgaagacagtactgagaaggaaaaagactctgtcccaaccgccgtgactattcctgtcgcccccaccgttgtcaatgctgctgcctctaccacgaccctgaccaccaccacagccggtacagtgtcttccaccaccgaggtccgggagcgcagaagatcttacctgacccctgtgagagatgaagagagtgagtcgcagaggaaggccaggtctagacaggcacgtcagtcacggaggagcactcagggtgtaactttaaccgacctacaggaggcagagaaaactatcggccgatcccgtagtacccgcacgcgggaacaggagaatgaggagaaagagaaggaggagaaggagaaacaagataaggaaaagcaggaggaaaagaaggaaagtgaaacaagccgggaagacgagtataagcagaaatattctagaacttatgacgaaacctaccaacgttacagacctgtgtccacatcgtcttcaaccactccatcatcgtcattaagcacgatgagttcttccctctacgcctctagtcagcttaaccgtcctaatagtctggttgggattacatctgcatactctagggggatcacaaaagaaaacgaaagagagggggagaaaagagaggaagagaaggaaggtgaggacaagtcccaaccgaaatcgatcagggagcgtagacggccccgagagaaacgccgatctaccggcgtatccttctggacgcaagactctgatgaaaacgaacaagagcaacagtcagatacagaagagggatctaacaagaaagagacccaaacagactctatttcaagatatgaaacgtcatcgaccagtgcgggggatagatacgattcactgctggggcggtccgggtcctactcctacctcgaggaaaggaagccctactcttccagactagagaaagacgatagcaccgatttcaagaaattgtacgagcaaatcctggctgagaacgagaaattaaaggcccaacttcatgatacgaatatggagctcacggaccttaaattacagctggagaaggcaacccagaggcaagaacgattcgcggatcggagcttgctggagatggaaaagcgtgaacgaagagcactggagcgccggattagcgagatggaagaagagctaaagatgctgccagatctcaaagcggataaccagcgcttgaaggatgagaatggcgcattaatacgggtgattagtaaactgtcaaagtag

SEQ ID NO: 130701 - DNA, 3093 bp, synthetic construct
  misc_feature 1..3093: note = Description of Artificial Sequence: Synthetic coding sequence
  source 1..3093: mol_type = other DNA
atgaaaatggccgacgccaagcagaaaaggaatgagcaattgaagaggtggataggatcagagacagacctggagccccccgtggtgaagcgtcagaagaccaaagtgaagtttgatgatggcgctgtgtttcttgctgcctgctcaagtggcgacacggatgaagtgttgaaattactccatcgcggcgccgatatcaactatgcaaacgtcgacggtcttacggccctgcatcaggcctgtattgacgataatgtcgacatggtcaagttcctggtggagaacggggctaacattaaccagcctgacaatgagggctggattccactacacgctgccgctagctgtgggtacctggatatcgccgaattcctcatagggcagggcgcccatgtcggggccgttaacagtgagggggacaccccacttgacattgccgaggaggaggccatggaggaattgcttcaaaatgaggttaatagacagggcgtggatattgaggctgccaggaaggaggaagaaaggatcatgttgcgggatgcaaggcaatggctaaattctggccacattaacgacgtccgccatgccaagagtggaggcacagccctgcatgttgctgcagctaaaggatatactgaggtcttgaaacttctgattcaggctggatatgatgtaaacattaaagactacgatgggtggacccctctccacgcggcagcccattgggggaaggaggaggcgtgtcgcatcctggtagataacctttgcgacatggagatggttaataaggtagggcagactgcatttgacgtggctgatgaggatatattgggctaccttgaagagctgcagaagaaacaaaatctgctgcatagtgagaagcgcgataagaagagtccactgatcgagagtaccgccaacatggataacaaccagtcccagaaaactttcaaaaacaaggaaacactgatcattgagcccgaaaaaaacgcttctaggattgagagccttgagcaagagaaggtcgacgaagaggaagaaggaaaaaaggacgagagtagctgctcatcggaggaggatgaggaagatgactccgagagtgaggcagaaacggacaaaactaaacctctcgcctcagtgactaacgccaatacctcctcaactcaagccgcccctgttgccgtaaccacgcccaccgtgtctagtggacaggcaacccctacttcacctatcaagaagttcccgactacagcaactaagatctcacctaaagaggaggaacgcaaagatgagtcacctgccacttggcgcttaggcctgcgcaaaaccgggagttatggagctctcgcagagatcacagcttctaaagagggacagaaagagaaagatacggcgggggtcacaagatcggcctctagtccgagactcagctcaagtctggacaacaaggagaaggagaaagattctaaaggaacacgtttagcctatgtggcaccaactatacccagacggctggcttcaacgtccgacatcgaggaaaaggaaaaccgggacagttcttctctgagaacctcaagctcttacacaaggagaaagtgggaggacgaccttaaaaagaattcgagtgtcaatgagggatcaacttaccacaagagctgcagctttgggaggaggcaggatgatttgatatcttcaagtgtgccgtccactaccagcactcctaccgttacctcagcggctggcctgcaaaagtcactgctcagctctacgtctacgaccaccaagatcacaacagggagctcctcagccgggacgcaatccagtacctcaaaccggctgtgggccgaggacagcacagaaaaggaaaaagacagcgtgcccacagctgtgaccatccccgtcgctcctactgtggtgaacgccgctgcatctacaacgacgctgacgaccaccacggcaggcaccgtctccagtactaccgaggttcgcgagcgaaggaggagttacttaactcccgtgcgcgacgaggaatcagaatcacagcgtaaagcaaggtctcgtcaggcccgacagtctcgtcgctccacacaaggggtaacccttactgatcttcaagaggcagaaaaaacgattggtaggagtcgctctacaaggacacgggagcaagaaaacgaagagaaggaaaaggaagagaaagagaagcaggataaggagaaacaggaagagaagaaggagagcgaaacatcccgcgaagacgagtacaaacaaaagtattctcgaacctacgatgaaacctaccagaggtatcgaccagtttctacctctagctctaccacgccctccagctccctgtcaactatgtcctccagcctatacgcttcctcccagttaaatcgacccaacagcctagttggaattacgtccgcatattccagaggcatcactaaagaaaacgagcgagagggggagaaaagggaggaggaaaaagaaggagaggacaagagccagcccaagagtattagagaacgacgcaggcctcgagaaaaaaggcggagcaccggcgtgagcttctggactcaggattcagacgagaacgagcaggagcaacagtcggacaccgaggaaggctctaacaaaaaggaaacccaggtgaatacaattactctctatgagacgagcagcacatctgcaggtgataggtacgattccctgctgggacgaagtggatcttatagctacctggaagaaagaaagccatactcctcacgcctggagaaggacgattccaccgatttcaaaaaattgtacgaacaaattcttgctgagaacgaaaagctgaaggcacagttgcatgatacaaatatggaactgactgatctgaaacttcagctggaaaaggccactcaacggcaggaacgttttgccgatcggagcttactggaaatggagaagcgggagaggagggcattagagcggcggatcagcgagatggaggaggaacttaaaatgctaccagacttaaaagctgataatcagcggctgaaggacgaaaacggggcattaatcagagtgatttctaagctctccaagtag

SEQ ID NO: 130702 - DNA, 2832 bp, synthetic construct
  misc_feature 1..2832: note = Description of Artificial Sequence: Synthetic coding sequence
  source 1..2832: mol_type = other DNA
atggtgaagttcctagtcgaaaacggcgcgaatatcaaccagcccgataacgaaggatggattcctctgcacgccgccgcctcatgcgggtacctggacatcgcagagtttttaatcggacaaggcgctcatgtgggtgcagtgaacagcgagggagacaccccactcgatatagcagaggaagaagctatggaggagctgttgcagaatgaagttaatcggcagggcgttgatatcgaggccgctcgtaaagaagaagagcggattatgcttcgggatgcgagacagtggttgaactcgggacacatcaatgacgtgcggcacgctaaatccgggggcacggcattacacgtggccgctgcaaagggctataccgaggttcttaagttattgatccaggctggttatgacgtcaacattaaggattacgatggctggactcccctgcatgcagcggcgcactggggtaaggaagaagcgtgcaggatcctggtggacaacctttgtgacatggagatggtcaataaggtcggacagaccgccttcgacgtagctgacgaggatattctgggctatttggaagagctgcagaaaaagcagaatctgttgcactccgagaaaagggataagaagtcccctctgatagagtctacggcaaatatggacaacaatcagtcccagaagaccttcaaaaacaaggagactctgataatcgaaccggagaagaatgccagtcggattgagtctctagagcaagaaaaggttgatgaagaggaggagggcaagaaggatgagagtagctgttcctccgaggaggatgaagaggacgacagcgagtctgaggctgagacagacaagactaaaccattagcttccgttactaacgctaatacatctagcacgcaggccgctccagtggctgtgaccaccccgacagtgtcttcgggccaagcgacacctactagccccattaagaaattcccgaccacagccacaaagattagtccgaaggaagaggaacgaaaggatgaaagccccgcaacctggcgcctgggattgaggaaaacaggcagctatggagccttagccgaaattactgcatccaaggaaggtcagaaagagaaagatactgctggcgttactagatccgccagtagccccaggctgagtagtagcctggataataaagagaaggaaaaggattctaaagggacacgcttagcatatgtagctcccacaatcccccggcgcctcgcatccacctctgatatcgaagaaaaggagaatagggactccagcagcctgaggaccagtagtagttacaccagaagaaaatgggaggacgatctcaagaagaacagtagcgtgaacgagggaagcacttaccacaagtcatgcagctttgggcggcggcaggatgacctcatttccagtagcgttccatccactacgtcgacacccaccgtgacgtccgccgccggactgcagaaaagtttacttagttcaacatccaccactactaagattaccacagggagtagcagcgccggaactcagagttctaccagcaaccgcctctgggccgaagattctacggagaaggagaaagactctgttccaaccgccgtaacaatccctgttgctcctaccgtggtaaatgccgccgcttccaccaccacgctgacaaccactacggccggcactgtatcatctacgacagaagtgcgagagcgtcggcgctcttacttaaccccggtgcgggacgaggaaagcgagtctcagcgaaaagctaggtccagacaggcccgccagtctaggcggagtacgcagggggtgaccctgactgacctgcaggaagccgaaaaaaccattgggcgctctaggtcgacacgtactcgagagcaggagaatgaggagaaagagaaggaggagaaggagaaacaggataaggagaagcaggaagagaaaaaggagtcggaaacaagtcgggaggatgaatacaaacagaaatatagccgaacctacgacgaaacttaccagagatatcgtcctgtgtccacgtcaagcagtaccacccctagcagcagcctctctactatgtcatcttccctgtatgcctcatcgcaactgaaccgtccaaacagtctagtcgggatcacatctgcctatagtaggggcattacaaaagagaatgaaagagaaggggaaaaacgggaggaagaaaaagagggcgaagataaatctcaaccgaaaagtattagagagcgccgtaggccccgcgagaaaagacgatccacaggcgtctccttctggacccaagactcagatgagaacgaacaagaacagcagtctgataccgaggaggggtcaaacaagaaggagacccagacagattcaattagcaggtacgagacatcctcaacatctgccggagaccgctatgactcacttcttggccgatcgggtagttactcttatctggaagagagaaagccatattcttccaggctggagaaagacgactcaacagatttcaagaagttgtacgagcagatcctggccgaaaatgaaaaactcaaagcacaactgcacgacacgaacatggaactcaccgacctcaaactccagctagaaaaagcaacgcagcggcaggagagatttgccgatcgttccctcctggaaatggagaagagggagaggcgcgctctggaaaggcggatttcagagatggaggaggagctgaaaatgctcccggacctgaaggccgataaccagcgcctgaaggacgagaatggcgccctgattcgagtgatctccaaacttagtaaatag

SEQ ID NO: 130703 - DNA, 2925 bp, synthetic construct
  misc_feature 1..2925: note = Description of Artificial Sequence: Synthetic coding sequence
  source 1..2925: mol_type = other DNA
atgaagatggctgatgccaaacaaaaaaggaatgagcaactcaaacggtggataggatctgagaccgacctggagcccccggtcgtcaagcggcagaaaactaaggtaaagttcgatgatggggccgtgttcctcgctgcttgctcttctggggatactgatgaggtgttgaagttgctacaccggggcgccgatatcaactatgcaaatgtagatggcctgacagctctccaccaggcctgtatcgatgataacgtagatatggtgaaatttttggtggaaaatggagctaatattaatcaaccagataacgaagggtggatcccattgcacgccgcagcatcctgtggttacctagacattgctgaatttctgattggacagggagcacacgtcggagctgtcaacagcgaaggtgacacaccattggacatagcagaggaggaagccatggaggaattgttgcaaaacgaggtcaaccggcaaggtgtggatatcgaagctgcaagaaaggaggaggagcggatcatgctccgtgacgcccggcaatggcttaactccggccacatcaatgatgttagacacgccaagagtggagggacagccctgcacgtggctgcagctaaggggtacacagaggttctgaagcttctgatccaagccggttatgatgtgaacattaaggactatgatgggtggacaccactgcacgctgctgcacattggggcaaggaggaggcctgtaggattttggtggacaatctgtgcgacatggagatggtgaataaagtgggccaaactgcgtttgacgtggcagacgaggatattttgggctacctggaggaacttcagaaaaagcaaaacctcttacattcagaaaagagagacaagaagtcacctctaatcgaaagcaccgcaaatatggacaataatcagagtcaaaagacatttaagaataaagagactctcataatcgaacctgagaagaacgcatcaaggatcgagtctctcgagcaagagaaggtggatgaagaagaagaagggaagaaggatgagtccagctgttcctcagaggaggatgaggaagacgactccgaaagcgaggccgaaacggataagaccaaaccgttggcaagcgtgaccaatgccaatactagtagtacgcaagcagccccggttgctgtgaccacacccaccgtctcaagcggacaggccacaccaacatcccctatcaaaaagtttcccacaactgccaccaagatcagccccaaggaagaggagaggaaggatgagtcccctgccacatggaggctcggacttcgcaagacaggaagttatggagctctagcagagattaccgcgtcaaaggagggacagaaagagaaggataccgcgggggttacacgctcagcctcttctccccgcttatcgagctcgctggacaacaaagagaaagagaaggatagcaagggcacacgactggcctatgttgcccccacgattccgcgccgcctcgcctccacctcagatatcgaggagaaagaaaatagagacagtagctctttaaggacatcttcgagctacactcggaggaagtgggaggatgacctaaaaaaaaactccagcgtgaatgagggctccacctatcacaaaagtacctccaaccggctgtgggctgaagattccacagaaaaggagaaggattcagtacccaccgctgtgacaatacccgttgcacctactgtggtcaacgcagcagcgagtactaccactctgaccaccactaccgccgggaccgtgtcatccactacagaggttcgagaacggaggagatcttacctcacacccgttcgtgacgaggagagcgagagccaaaggaaggcaagatcaagacaggctaggcaaagtagaaggtcaacccagggagttaccctcacagacttgcaggaggccgagaaaacaatcggcagaagtaggtctactcgaactcgcgagcaggaaaatgaggagaaggagaaggaagaaaaggaaaaacaggataaggagaaacaggaggaaaagaaagagtctgaaacgtcacgagaagatgagtataagcagaagtatagcagaacttatgacgagacttaccagaggtatagaccagtatccacaagctcttctactaccccttcttcttctctttcgaccatgtcatcatcgctctatgcctcatcccagctgaatcggccgaatagtctggttggtattacaagcgcttacagtagggggattacgaaggagaacgagcgggaaggggagaaaagggaggaagaaaaagagggggaggataagtcccagcctaaaagcattagagaacggaggcgcccacgggaaaaaaggcggagtactggcgttagtttttggacacaagactcagatgaaaacgaacaggaacaacaatccgacacggaggaagggagcaataaaaaggagacccagaccgatagtatttctaggtatgagacttcctccacctctgctggggaccggtacgactcactgctcgggagatcagggagttattcgtacttagaggaacggaagccctattccagtaggttagaaaaagatgacagcaccgattttaagaagctgtatgagcagatcctagcagagaacgagaagctaaaagcacagctccacgatacaaacatggagcttacggatctgaagctacagctggagaaggccacgcagaggcaggaaaggttcgccgatcggagtcttctcgaaatggagaagcgcgagagacgggctcttgagaggagaatcagtgagatggaggaagagctgaaaatgcttcccgacctgaaggctgataatcagaggttaaaagacgaaaatggggctcttatcagggtgataagcaagcttagcaaatag

SEQ ID NO: 130704 - DNA, 2949 bp, synthetic construct
  misc_feature 1..2949: note = Description of Artificial Sequence: Synthetic coding sequence
  source 1..2949: mol_type = other DNA
atggccgagctggagcaccttggaggcaagcgagctgaaagcgccagaatgcgcagggcagaacagctgcggaggtggagggggtctctgacagaacaagaacctgctgaacgaagaggagctggcagacaacccctcacccggaggggatccccacgtgttaggttcgaagatggtgccgtgttcctggcagcatgtagcagtggagataccgacgaagttcggaaactgttggcccggggagccgacataaacacagtgaacgtggacgggctgaccgccttgcatcaggcttgtattgatgagaacctggacatggttaagtttctggttgagaaccgggctaatgtcaatcaacaggataatgaagggtggacacccctgcatgccgctgcctcttgcggatacctgaatattgccgagtatttcatcaatcatggggcttccgtgggcatcgtgaactcggaaggtgaggtaccatctgacttggcagaagagcctgctatgaaggacctcctgctcgagcaggtgaagaagcaaggggtggatcttgaacaatcccgcaaggaggaggaacagcaaatgctgcaagacgctagacagtggttgaattcaggcaagattgaagatgtgagacaagcacggagcggcgctacagctctccacgttgcagccgcgaagggctacagtgaggtattgaggcttctgattcaagccggctacgagctgaacgtgcaggattatgatggctggactcccctccatgcggcagctcactggggtgtgaaagaagcgtgctccatcctcgcagaagccctgtgtgatatggacataagaaataagctgggccagaccccatttgacgtggccgacgagggcttggtcgaacacttggaattgctacaaaagaaacagaacgtgcttcgctccgaaaaggaaactagaaacaagctaattgagtccgatttaaattctaagattcaatcaggtttctttaaaaataaagaaaaaatgctgtacgaggaagagacccctaaaagccaggagatggaggaggagaataaggagtcttccagcagtagcagcgaggaggaggagggcgaggatgaagccagtgagtctgagacagagaaagaggcggacaagaagccggaggcgttcgtgaaccactccaacagtgagagtaagtcttctatcacggagcagatccccgcgcctgcccagaacacattcagtgcctcttcggcaaggaggttctccagcggactgtttaataagccagaggaacctaaggacgagtcaccctcttcttggcgcctgggtcttcggaagacaggcagccataatatgcttagcgaagtcgccaattcaagagaacctattcgcgacaggggctcatctatttaccggtccagttcgtcacctcgtatcagtgccctgctagacaacaaggataaggaacgggagaacaaaagttacatttctagcctggctccacgaaagttaaactccacgagtgatatcgaagagaaagagaaccgtgagagcgctgttaacttagtccgcagtgggagttatactaggcagctgtggagagacgaggccaagggaaatgagattccacagacgatagccccaagcacatacgtgagcacttatctaaagaggacaccacacaaaagtcaagctgacacgaccgccgagaagacagccgataacgtcagttcttcgacaccgctgtgtgtaatcactaaccggcccctgccttcaaccgccaacggagtgaccgctacccccgttctctcaattactggaacagacagctccgtggaggcgagagaaaaacgtcgctcctatctaacccccgtacgcgatgaggaagccgaatcgctccggaaagcaaggtccagacaggcgaggcagacaaggaggtccactcagggcgtgacactgaccgatttgcaggaggctgagaggaccttctcccggagcagagccgagcgtcaggctcaggaacagccgcgcgagaagccaacagatacagagggccttgaaggatcacctgagaaacatgaaccttcagctgtccctgccactgaggctggcgaaggccaacagccatggggaaggtctctagacgaggaaccaatctgtcaccgcctgcgctgtcccgcccagccagacaaaccaacaacacccgccagtcccagtactagccggccatctctgtatacctcctcacacctgttgtggacaaatcgatttagtgtgcccgactcagagtccagtgaaacaaccaccaacacaaccacggcaaaggagatggataagaacgagaacgaagaggccgatctagatgagcagtcttccaagcgtttatccattagagagcgacgaaggcctaaggaaagacgaaggggcactggcatcaacttttggaccaaagacgaggacgagaccgatggtagcgaggaggtcaaggaaacatgggctgagcgcctgaaacgtctcgaaagcggaggatctaatcccaccaccagcgacagttatggagacagagctagtgctcgggcgaggagagaggcgagggaggcccggttagctacacttaccagtagagtggaggaagactctaaccgcgattacaaaaaactgtatgagtcagcactgacagagaatcagaaactgaagacaaagctgcaggaagcacaacttgagcttgcagacatcaaatctaaactggaaaaggtcgcacagcagaaacaggagaagacctcagacagatctagcgtactggaaatggagaagcgtgagagaagggcccttgagcggaaaatgtccgaaatggaggaggaaatgaaggtgctgactgagctgaagtctgacaatcagaggctgaaggacgaaaacggggcccttatcagagtcatctccaaactttctaagtag

SEQ ID NO: 130705 - DNA, 1161 bp, synthetic construct
  misc_feature 1..1161: note = Description of Artificial Sequence: Synthetic coding sequence
  source 1..1161: mol_type = other DNA
atggccgaacttgaacacttgggtggaaagagggccgagagtgcccgcatgcgtcgcgcagagcagctccgtaggtggcgaggcagcctgactgagcaagaaccagcagagcgccgtggagccggtcgtcagccgctaacaaggcgaggaagcccaagagttcggttcgaagacggagccgtctttcttgctgcctgttcctcgggggataccgacgaagtgcgcaagctcctggcgcgaggggccgacataaacacagtgaatgttgacggcctgaccgccctacaccaggcctgtatcgacgagaacctagatatggtaaagttcctcgtagagaaccgggcaaacgtgaatcaacaagacaacgaagggtggactcctttacacgctgccgcctcttgcggctatttaaacatagcagagtactttattaatcatggtgcttctgtgggaattgtcaattccgaaggagaggtgcccagcgatttagccgaggagcctgctatgaaagatcttcttcttgagcaggttaaaaaacagggagtggatctggagcagtcacgaaaagaagaggaacagcagatgctgcaggatgctcgccagtggctcaactctggaaagatcgaggacgtgagacaggctcgcagtggggctaccgccttgcatgttgccgccgccaaagggtatagcgaggtcctgagactgctcattcaggctgggtatgagctgaatgtgcaggactatgacggctggacacccctgcacgcggccgcccattggggtgtgaaggaggcctgctccatcctcgcagaagctctttgtgacatggacattcgcaataaattgggacagaccccattcgacgtggcagacgagggactggtggagcatctggagctcttgcaaaagaagcagaacgttctgcggagcgagaaggagacgagaaataagctcattgaatcggatcttaactccaaaatacagtctggtttcttcaagaataaagaaaagatgttatatgaggaagaaaccccgaaaagtcaagaaatggaggaggagaacaaggaaagctcttcgtcatcttcagaagaggaagaaggtgaggatgaggcgagtgagtccgagactgaaaaggaggccgtcttgttctggcccttctag

SEQ ID NO: 130706 - DNA, 675 bp, synthetic construct
  misc_feature 1..675: note = Description of Artificial Sequence: Synthetic coding sequence
  source 1..675: mol_type = other DNA
atggacaagaatgagaacgaggaagctgacctggatgaacagagttctaagcggctttccatccgcgaacgccgcaggcccaaggaaagacgaaggggaacgggaattaacttttggactaaagatgaggacgagactgatggatccgaagaggtaaaggaaacttggcatgaacgactttctagactcgagagtgggggctcaaaccctacaacgagcgatagctacggcgatagagcctctgccagggcccgcagagaggcccgggaggctcggctggccaccctgacaagcagggtggaagaggacagcaatagagattacaagaagctgtacgagagtgctctaaccgaaaaccagaagctgaaaacaaaattgcaggaggcccagctggaactggccgatataaagtctaaattggagaaagttgcccagcagaaacaagagaaaactagtgatcggagcagcgttctcgagatggaaaaaagggaaaggcgcgcgctcgaaaggaaaatgtccgaaatggaggaagaaatgaagaacctccaccagctgaagcagatccaaacgctgaaacaaatgaacgaacagcttcaagccgagaacagggctctgactcgtgtggtggcgcggctctccgaatctatcgagtcttcagacacccaggagctctag

SEQ ID NO: 130707 - DNA, 627 bp, synthetic construct
  misc_feature 1..627: note = Description of Artificial Sequence: Synthetic coding sequence
  source 1..627: mol_type = other DNA
atggacaagaacgaaaacgaggaggccgatctcgacgaacagtcatctaaacgactgtcaatccgcgagcggcggcggccgaaggagcgtcgtcgggggacggggatcaatttttggaccaaggacgaagacgagactgacggcagtgaggaagtgaaggagacatggcacgagcgcctgagtaggcttgaaagcggaggctctaaccccaccactagcgactcgtatggggaccgtgcaagtgcccgagcgagacgcgaagctagggaagctcgtctcgcgactctgacctctcgcgtggaggaagattctaacagggattacaagaagttgtacgagagcgctctgacagagaaccagaagttaaaaacaaaactccaggaggcacagcttgaactcgctgatattaaatcaaagctagagaaggtggcacagcagaagcaagaaaaaacttcagacagatcttccgtgctcgagatggagaaacgcgaaaggagggccttggaaagaaaaatgagtgagatggaagaggagatgaaagttctgacagagctcaagtctgataatcagaggcttaaggacgaaaacggggccctcatccgtgtaattagtaagttatctaagtag

SEQ ID NO: 130708 - DNA, 2949 bp, synthetic construct
  misc_feature 1..2949: note = Description of Artificial Sequence: Synthetic coding sequence
  source 1..2949: mol_type = other DNA
atggcggaactcgaacacctgggaggcaaacgggctgagtccgcaaggatgaggagggcggagcagctccgtaggtggcggggaagtcttaccgagcaggaaccagctgagcggagaggcgcagggagacagcctttgacacggcgggggtctccaagagtgaggtttgaggacggagccgtgttcctggctgcatgcagttccggcgacacggacgaggtgcggaagctgttggcccgcggcgcagacatcaacacggttaatgtggacggtctgaccgccttacatcaggcatgtatcgacgaaaatctggacatggtcaagttcctggtggaaaacagggccaatgtcaatcaacaggacaacgaagggtggactcctctgcatgccgcagcttcttgcggctatctcaatattgctgagtacttcattaaccatggggctagcgtgggaatcgtgaactcagaaggtgaggtgccatcagacctggctgaagagcctgcgatgaaagaccttttgctcgagcaagtgaagaagcagggtgtcgatctggagcagtccaggaaggaggaggagcagcagatgctgcaagatgctcgtcaatggctgaactctggaaaaatcgaggacgtcaggcaagcgcgctcaggagccactgctttacacgtggcagcagccaaagggtactccgaggtactgcgcctgctgattcaggccggctacgagctgaatgtccaggattacgatggctggactcccctgcatgctgctgcacattggggggtcaaggaggcctgttcaatcctggcagaagcactctgcgacatggacatacgcaacaagctgggacagaccccatttgacgtggctgatgaggggttagtggagcatttggagctgttgcagaagaagcagaatgtactaaggtcggagaaagagacaaggaacaagttgatcgagagtgaccttaactcaaagatccagtctggcttctttaaaaataaagaaaaaatgctatacgaggaagagacacctaaatcacaggagatggaggaagagaacaaagagagctcctcatcttcttccgaggaggaggagggtgaggacgaagcttctgaatccgaaactgagaaagaggcagacaaaaaacctgaagcctttgtgaaccacagcaactcagagagtaagtctagcatcaccgagcagattccagcgcccgctcagaacaccttcagtgcaagcagcgccaggaggtttagctctggcctgttcaacaagcccgaggagccgaaggatgaaagtccatcttcgtggagactgggtttaaggaagaccggatcccataatatgttgtccgaggtcgccaattcaagggaaccgatccgagatagaggatctagcatctacagatcttcttcttctcctcgcataagcgctctgctggacaataaggacaaagaaagggagaataaatcctatatttcaagccttgcaccaagaaagcttaactcaactagcgacatcgaggaaaaggaaaatagagagtccgccgttaacctagtgcggtccggctcgtacacccgccagctgtggcgagatgaagccaaagggaacgaaatcccccagacgatagcaccttccacatacgtctcgacgtacttaaaaaggacacctcacaagagccaagccgacactaccgccgaaaaaacagctgacaacgtatcctcttccacccccttatgtgtcattactaatagacctctcccatctaccgccaatggggtgacggccacacccgtgctttctattacaggaacagacagcagcgttgaagctagggagaaacgccggagttatctgactcccgtgagggacgaagaagccgaaagtctgaggaaagcccggtcacgacaggctcggcagactagacgcagcacacagggagttaccctcactgacttgcaggaagcagagagaaccttctcacgctctagggccgagcgccaggctcaggaacagccacgcgagaagccgaccgacaccgaagggttggaaggaagtccggagaaacacgaaccgtctgccgtgcctgctacagaggcaggggagggtcagcaaccgtggggacggtcacttgatgaagagcccatctgtcaccgcctcagatgccccgctcagccagataagcccaccacccccgccagtcctagtacctctagaccttcactgtatactagttctcatctgttgtggactaatcgcttcagtgtgccagattcagagtcttctgagaccactacaaataccacgacagccaaagagatggataagaatgaaaacgaggaggctgacctagacgagcagagttccaaacgattgtcaattcgggagaggaggagacctaaagaacgaaggagaggcactgggatcaacttctggaccaaggatgaggatgagaccgatgggtctgaggaggtaaaggaaacatggcatgagagattatctcggctcgagtctggaggttctaatcccactacaagcgattcctatggcgaccgcgcctctgccagagcgcgccgagaggcccgcgaagcccggctggcgactctgacatcccgcgtcgaagaggattcaaatcgggactacaagaaactgtatgagtccgccctaacagagaaccagaagctgaaaactaagctccaggaggcccagctggagttagccgacatcaagtcaaagcttgaaaaagtagctcagcagaaacaagaaaagacttccgacagatcatcggtactggagatggagaagcgggagaggcgagccctggagcgcaagatgtcagaaatggaagaagagatgaaggtcctcacggaactcaaaagcgataaccagcgcctgaaggacgaaaacggggcactgattcgagtgattagcaaactgtctaagtag

SEQ ID NO: 130709 - DNA, 2349 bp, synthetic construct
  misc_feature 1..2349: note = Description of Artificial Sequence: Synthetic coding sequence
  source 1..2349: mol_type = other DNA
atgagtggggaagatggacccgctgctggaccaggagcagccgcggcagcagcccgagaacgccgaagagagcagttgaggcagtggggcgcgcgagcaggcgccgaacccgggccgggtgaacgaagggcccgaaccgtgaggttcgagagagcagctgagtttttagcagcctgcgcaggcggagatttagacgaggcgcggcttatgctccgcgccgcagatcccggcccaggtgctgaattggatccggctgctccaccacccgctagggcagtgctcgattcaactaacgctgatggaatttcggctctacaccaggcatgcatcgatgaaaatttagaagtggtgagattcctcgtggagcagggcgcgaccgtgaatcaagccgacaacgagggatggacacctcttcatgttgcagcgtcctgcggctacctggacatcgctaggtacctgctgagtcatggcgccaatatcgcagctgtcaattcagacggagaccttccacttgacctggctgagtctgatgcaatggaagggttgctgaaagccgagattgcgagacggggggtcgatgtagaagccgccaagcgagccgaggaggaactattgcttcatgatacacgctgctggctgaacgggggtgctatgccagaagcacggcacccgagaactggagcttcagcgctccacgtagccgctgcgaaaggatacatcgaagtgatgagactgcttctgcaggcagggtacgaccccgagctgagagatggcgacggatggactccgcttcatgctgccgcccactggggcgttgaggatgcttgtaggctgctggccgagcatggcggaggtatggatagcctcactcatgccggccagaggccatgcgatctggccgacgaggaagtcctgagccttctggaagaattggccaggaaacaggaagaccttcggaaccaaaaagaggctagccagtctcgaggtcaggagccacaagcacccagctcctctaagcataggaggtcttccgtgtgcagactcagcagtagagaaaagatctctctgcaggatcttagtaaggagagacgccccggcggtgctgggggaccccctatccaggatgaagacgaaggcgaggagggtcccactgagccaccgccagccgagccacgcacgctgaatggcgtgtctagtccaccccacccgtctcctaagagcccagttcagttggaggaagcccctttcagccgccgattcgggttgcttaaaaccggctcgtctggggcacttgggccccctgaaaggaggaccgccgaaggggcccctggggcgggcctgcagcggagcgctagctcctcgtggctggaagggacaagtacccaggcaaaagaacttaggctggcacggattacaccaacccccagcccaaaactgcccgagccttctgttcttagcgaggttacaaagccaccaccatgcctggagaattcttctcccccttcaagaattccagagcccgagtcccctgcaaagccaaatgtgcccacggcatccactgccccccctgctgactccagggacaggcgacggagttatcaaatgcccgttcgcgatgaagagtcagagagtcagcgcaaggctagatctcggctaatgaggcagtcccggcgctcgacacagggagtcacgctgacagatctgaaggaagcggagaaggcagctggaaaggcccctgagtcagagaagcctgctcaatctttggatccttctcggcgtccccgcgtcccaggtgtggagaactcggactctcccgcccaaagggccgaggcacccgatggtcagggcccaggccctcaggcggccagggaacaccgtaaggtggggaaggaatggcgggggccagcagagggcgaggaagccgagccagctgatagatcacaggagtcatccactttggaaggcgggcctagcgcacggcgacaaagatggcagcgggacctgaatcctgaacctgaacctgagtctgaagagccggacggtggctttcgtaccctatatgccgagcttagacgggagaacgagagattgcgagaggccctgaccgagaccacactgcgcttagctcagctcaaggtggaactggaacgagctacacagagacaggagcgtttcgcagagcgaccggccctgttagagctggagagatttgagagacgcgctctggaaagaaaagcagcggagctggaagaggaactaaaggccctttcagacctgcgtgcagataatcagcggcttaaggacgaaaacgctgctttgatccgcgtgatctccaagctgtccaagtag

SEQ ID NO: 130710 - DNA, 2160 bp, synthetic construct
  misc_feature 1..2160: note = Description of Artificial Sequence: Synthetic coding sequence
  source 1..2160: mol_type = other DNA
atgtctggggaggatggcccagcagccgggcctggagccgccgcagcagccgccagggaacggcggagagagcagcttagacaatggggagctcgcgccggagctgagccgggcccaggagagagacgggcccgaaccgtccggtttgaaagggccgctgaatttctggctgcctgcgccggcggagacttggatgaggccagactcatgctccgagccgctgacccagggcccggggctgaactcgaccctgctgccccccccccggccagagcggtactggattcaacaaatgcggacgggatttcggctctgcatcaggcgtgcattgacgaaaatttggaagttgtgaggttcctcgtcgaacaaggggctaccgtgaaccaggccgacaatgagggctggactcccctacatgtggcagcctcttgcggctacctggatattgcccggtatttgctcagtcacggagctaatattgccgctgtgaatagtgatggagaccttcccctcgacttagccgagagtgatgccatggagggactccttaaagcggaaattgcccgcaggggagtcgacgtcgaagcagccaaacgagctgaggaggagcttcttctacatgacacgcggtgttggttgaatggaggtgccatgcctgaggcacgccatccaagaacaggcgcctccgcccttcacgtggccgcagccaagggatatattgaagtaatgcggctgctcttgcaggccgggtatgacccggagttgcgcgatggtgatgggtggactcccctccacgccgctgcccactggggtgtggaggacgcatgccggcttcttgcagaacacggagggggcatggattctttgacgcatgcgggacaacgaccctgtgatctcgctgatgaggaagttctcagtctcctcgaggagttagcacgtaaacaagaagatcttagaaatcagaaggaggcttcccaaagtcgtgggcaggaacctcaggcaccttcctccagcaagcacagacggtcatcagtgtgccggctgagctcacgcgagaagatctctctgcaggatctgtctaaggagcggcgaccagggggagcgggaggccctcccatccaggacgaagacgagggcgaggagggcccaaccgagccgccaccggccgaaccacgcactctgaacggcgtttcatcaccaccccacccaagtcccaaatcaccagtgcagctggaggaggcgcccttttctcgtcgcttcggccttctgaaaacaggcagctctggggcactgggaccgcccgagcgtcgcacagcggagggtgctccaggcgccggactgcaaagatcagcatcatcaagctggttagagggaacctcgactcaggctaaagagctgcggctcgctagaattacccccacccctagcccaaaacttcccgaacctagcgtccttagcgaagtaaccaagccccccccctgtctggaaaattcctctcccccatcaagaatccccgagcctgaaagtccagccaaacccaacgtgcccacggcatcaaccgcgccaccggcggattctagagacagacggaggagctaccagatgcctgtgagagacgaggaaagcgaaagtcagcgcaaagccaggagcaggctaatgcgtcagtctcgcaggtctacccagggtgtgactttaaccgaccttaaggaggccgagaaggccggcgaagaggcggagcctgccgaccggagtcaggagtccagcactctggaaggcggaccttcagctcgacggcagagatggcagcgggacctaaacccggaaccggagcccgagagcgaagagcctgatggtggcttccgaacactctacgccgagctgcgcagggagaatgagagactgcgcgaggcgcttacagaaacaactttgaggctggcccagctcaaggtggagcttgagcgggctacacagagacaggaaaggttcgccgagagaccagccctcttggagctggaacgctttgagagaagggccctcgagcgcaaggccgccgaactggaggaggaactgaaagccctctccgatctgagggccgataaccagcgactgaaggacgagaatgccgctttgatacgagtgatctcaaagctctccaagtag

SEQ ID NO: 130711 - DNA, 2124 bp, synthetic construct
  misc_feature 1..2124: note = Description of Artificial Sequence: Synthetic coding sequence
  source 1..2124: mol_type = other DNA
atgcgtaatggcggaccttgccagccattggccgccgggccaagggccgagggggcctccgttaattggagtgtgactgcctgggggcccggtacccaggcctgtatagacgagaacttggaagtggtgaggttcctggtggagcagggagctactgtgaaccaggccgacaacgaaggatggacacccctgcacgtcgccgcgtcctgcggatatttagacattgccaggtacctgctgtctcacggggccaacatcgcagccgtcaatagcgatggcgacctccccctggacctcgccgagtccgacgccatggagggactgctcaaagccgagatcgcgcgacgcggggtcgacgtggaggccgccaaacgggctgaagaagagctattgctacatgatacgcggtgttggctgaatgggggagcaatgccagaggcacgccacccacggacaggtgcctcagctctccacgtcgccgctgcaaaggggtacatcgaagtgatgaggctgctgctccaggcaggctacgaccctgagctgcgcgatggagacgggtggacgccgcttcacgccgccgctcattggggcgtagaagatgcctgtaggctcttggccgagcatgggggcggtatggatagcttaacgcatgcaggtcaacggccatgtgatttagccgatgaggaggtgctgtccttactcgaagagctggccaggaaacaggaggacctgagaaatcagaaagaggcctcgcagagtcgaggacaggaacctcaggcaccatcctcctcgaaacaccggagatcttcagtgtgccgactgtcatctagagagaagatctcactgcaggacctctctaaagagaggagaccggggggggccggagggccccccatccaagatgaggatgaaggagaagaaggacccaccgagccaccccccgccgaaccccggactttaaacggcgtttctagccccccacatccaagtccaaagtctccggtgcagctagaggaagcccccttttccagaaggtttggactgctgaagacagggtccagcggcgcactcggcccacctgaaagaaggaccgccgaaggtgcccccggagctggcctccaaaggtccgcttccagcagctggctggagggcaccagcactcaggctaaggagttgcgccttgctagaatcacgccgactccatctccgaaactgccggagccctcggtgctctccgaggtgacaaaaccccctccgtgcttggagaattcttctccaccctccaggatcccagagccagagtcccccgcaaagcctaatgtcccaacggcaagcacagcgcccccggccgatagccgggaccgccggaggtcatatcaaatgccagtcagagacgaggaaagtgaatcacagcgcaaggcaaggtctcgcttgatgagacagtctcgccgaagtacccagggggtcacactgactgacctcaaggaagctgaaaaggcggcagggaaggcacctgaaagtgagaaacccgcccaaagcctggatcccagccgtaggcctcgcgttcctggtgtcgagaactctgatagtccagcccagcgtgaggcccccgacggccagggccctggaccacaggccgcccgcgagcaccgcaaggtgggtaaggaatggagggggccagccgaaggcgaggaagctgagccagccgatcgctctcaagaatcctctaccctagagggcggcccgagtgccagaagacagcgctggcaacgtgatcttaaccccgaaccagaacctgaaagcgaggaaccggacgggggatttaggaccctgtatgccgagctgcgtcgcgaaaatgaaaggcttcgagaagcattgactgagaccacactacgtctggcccagctgaaagtggaattggaacgggccactcaacggcaagaaaggtttgccgaaagacctgctttgctggagttagaacgtttcgagcgacgcgcacttgaacgcaaggccgcggagttagaggaagagctcaaggcactgtcagatctccgcgccgacaatcaacggcttaaggatgaaaatgcagcccttatcagagtaatttcaaagctgagcaaatag

SEQ ID NO: 130712 - DNA, 2142 bp, synthetic construct
  misc_feature 1..2142: note = Description of Artificial Sequence: Synthetic coding sequence
  source 1..2142: mol_type = other DNA
atggagcccggaaccggaggctctcgcaaacgtctgggcccccgagctggcttcagattttggcccccgttcttcccgaggcgatcccaagctggatcctctaagtttccaacccctctcggaccagaaaatagcggcaatccgaccttactctcatcagcacagcctgagaccagggtcagctactggacgaaactcctatctcagctgttggctcccttgcctggcctgctacaaaaggtgttgatctggagccaattattcgggggtatgttccccacgcgatggctggatttcgccggtgtgtactcagctctcagagcgctgaaaggaagagaaaagccggccgcgcctacggcccagaagtcattgagtagtttgcagttggactcctcagatccaagtgtgacttcacctctggattggctggaagaaggaattcattggcagtactcccctccggacctcaagcttgagctgaaggccaaggggtcagccctggaccccgccgcccaggcgttcctcctggagcaacagttatggggggtcgagttattacccagtagcctgcaatccaggctctactcaaaccgggagctaggaagttctcccagcggcccacttaatattcagagaatcgataattttagtgttgtgtcatacctgcttaacccgtcctacctggactgtttccctcgactggaggtgagctatcagaattctgacggaaatagcgaagttgtcggcttccagaccctgaccccagaaagctcctgcctcagagaagaccattgtcatccccaacccctgtccgctgaactgatcccagctagctggcagggctgccccccactgtctaccgaagggttgcccgaaatccaccacttgcgcatgaagcgcttggaattcctgcagcaggccaacaaggggcaggacttgcctacaccggatcaagataacggctaccatagcctcgaagaggaacattccctgttgcgcatggaccccaaacactgtcgggataatcccacccagtttgtacccgctgccggcgacattcccggaaatactcaggagagtactgaagaaaagattgagctcctgacgacagaggtccccttagccttggaggaggagagcccttcggaagggtgcccttcatcagagatccctatggaaaaggagcctggagaaggccgcatatcagttgttgactacagctacctggagggggatctgccgatttcggcacgtcctgcttgctccaataaattaatcgactacatactgggaggtgctagtagcgatttagagacatcaagcgaccctgagggggaagattgggacgaagaagcggaggatgatggatttgactccgacagctccctttcagatagcgaccttgagcaggaccccgagggcctccatttatggaattctttctgctccgtcgacccatataatccacaaaactttaccgctaccattcaaaccgccgcaaggatcgttcccgaggaaccttctgactccgaaaaggacctcagcggcaaatctgatttggagaattcaagtcagtccggatcactgccagaaactcccgaacactcctcaggagaagaagatgattgggagagctccgcggatgaagccgaaagcctcaagctttggaactcattttgcaactccgacgatccctataatcctctcaattttaaggctccgttccagaccagtggagagaacgaaaagggatgccgcgactccaagaccccgagtgagagcattgtggccatatcagagtgtcatactttattatcttgcaaggtacagttattaggttcccaggaatcagagtgtcctgatagtgtccagcgggatgtgctgtctgggggtcggcacacccacgtgaaacgaaaaaaggtgacgttcctcgaagaagtgactgagtattatatatccggggacgaggacagaaaggggccttgggaagaatttgctagggatggatgtaggtttcagaagcgcatacaggagacagaagatgcaatcgggtattgcctgaccttcgagcaccgcgagcgaatgtttaaccgattacaggggacatgtttcaaggggctcaacgttcttaagcagtgctag

SEQ ID NO: 130713 - DNA, 1872 bp, synthetic construct
  misc_feature 1..1872: note = Description of Artificial Sequence: Synthetic coding sequence
  source 1..1872: mol_type = other DNA
atgttccccaccagatggctggactttgctggagtgtactctgcactgcgcgccctcaaaggccgcgagaaaccagctgctccaactgcccagaagagtctgtcaagccttcagctcgacagcagcgacccctctgttacaagcccactcgattggctcgaagagggaattcactggcaatacagtcctccagacctgaagctcgaactgaaagctaaggggtctgcccttgaccccgctgcccaggcttttctgctcgagcagcagctgtggggggtcgagctgctcccttcatccttacaatctaggctttactcaaaccgcgaactcggtagctctcctagtggaccactcaacatacagagaattgacaactttagtgtagtgtcatatttactgaacccgtcctacctggattgttttccaagactggaagtaagctaccaaaactccgacggaaacagcgaggtcgttggtttccagaccctgactccagagagctcatgcctcagggaggaccattgccatccacaaccccttagcgccgaactcattccggcttcctggcaggggtgtccacctctatccacagaggggctccccgagatccaccatcttcgcatgaagagactggagttccttcagcaggcgaataagggccaagacttgcctacccccgaccaggataacggctatcattctctagaggaggaacattccctgctgcgcatggacccaaaacattgccgcgataacccaacccagtttgtcccagctgcaggtgacattcctggtaatacgcaggagtctacagaagagaaaatagaattacttacaaccgaggtccctctggccctcgaagaagagtctccttccgagggttgtcccagcagtgaaattcctatggaaaaggaacccggtgaaggaagaatatctgtggtggactactcatacctggaaggagacctccccatctctgctcgtcccgcctgctcgaataagctaatcgattatattttggggggagcttctagtgacctagaaacatcgagcgacccggagggagaagactgggatgaggaggccgaagatgatggtttcgacagtgattccagtctgtctgactctgatttagaacaggatcctgaaggcctgcacctgtggaattcattttgtagcgtcgacccttataatccacagaactttacagccactatacagacagccgcccgtatagtgccagaggagccaagtgacagtgagaaagacctgtccggaaagtccgatctggagaattcttctcaatcaggctcactgcctgagactcctgagcattcttccggagaagaagacgactgggaaagctctgctgacgaggccgagtcactgaagttatggaattccttctgtaactccgatgacccctacaatcccctcaattttaaagccccgtttcagaccagcggcgagaacgagaagggatgcagggatagtaagaccccctccgagtcaatcgtggctatctccgagtgccacactttattgtcatgtaaggtgcaattgctcggctcccaggaatccgaatgtcctgacagcgttcagcgcgacgtgctttcaggcggaaggcatacgcacgtgaagcgcaaaaaagtgacgttcctcgaagaagttactgaatactacatctcaggtgacgaagaccgaaaaggaccatgggaggaatttgcccgggatggctgtaggttccagaagcgtatccaggagaccgaagatgcaatcggttattgtcttacattcgaacacagagagcgtatgtttaacagactgcaagggacttgtttcaaaggcctaaacgtgctgaaacagtgttag

SEQ ID NO: 130714 - DNA, 1704 bp, synthetic construct
  misc_feature 1..1704: note = Description of Artificial Sequence: Synthetic coding sequence
  source 1..1704: mol_type = other DNA
atggcttctcacgtcgacctgcttacagaactgcagttgctggagaaggttcccacattggaacgccttcgggccgctcagaaacgaagagcgcagcagctgaagaagtgggctcagtacgaacaggatcttcagcacaggaaacggaaacatgagcggaaacgctctactgggggcagaagaaagaaggtgagttttgaggctagcgtcgcactgctggaagcctcactcaggaatgacgctgaagaggtgagatacttcctcaagaacaaggtgtctccagatctttgtaatgaggacggcctgactgcactgcaccagtgctgtattgacaactttgaagagatagtcaaacttctgctgagtcacggggctaacgtgaatgccaaggacaacgaactctggacgcccttgcacgccgcggcaacctgcggacacatcaacttggtgaagatcctggtacagtatggagcggatctccttgccgtgaactctgatggaaatatgccctacgacctgtgcgaagacgagcctacccttgatgtcattgaaacttgcatggcataccaaggtatcactcaggaaaaaattaacgagatgcgggtagcccccgaacaacagatgattgctgacatccattgtatgattgccgccggacaggacttagactggattgacgcgcagggagctaccctactgcacatcgccggggctaacggatacctccgggccgcggagctgctcctcgatcacggagtgcgggtcgacgtgaaagactgggacggatgggagcccttacacgcagcagcgttttggggccagatgcagatggcagagttgttggtaagtcatggtgcttcgctgtccgctcgaacaagcatggatgaaatgccgatcgatctgtgcgaggaggaggagttcaaggttctgctgctggagttgaagcataagcacgatgttatcatgaagagtcagctacggcacaagtccagcctgtccagacgcacgtcttcggcgggcagcagagggaaagtcgtgcggcgcgctagtttatccgacaggactaatctatatcgaaaagaatacgaaggcgaggccattctttggcagcgtagcgccgccgaagatcagcggaccagcacctacaatggagacatcagggaaactagaacagatcaggaaaataaggacccaaaccctcgactggaaaagccagtgctcctttcagagtttccaactaaaattcctagaggagagctggacatgcccgtggagaatggtttgcgtgctcctgtgtccgcctatcagtatgcactcgctaacggagatgtttggaaggtccatgaggtgcctgactactcgatggcttatggcaaccctggtgtagccgacgcaacccctccctggagctcttataaagaacaatccccgcagactttactggagttgaagaggcaacgtgccgcggccaaactgttaagtcacccatttctctccacgcacttgggcagctccatggcacgcaccggagaatcttcaagcgaaggtaaggcaccgttgatcggtggtcgaacatctccctatagtagtaacggaaccagcgtgtattatacagtgaccagcggcgatcccccattactgaagttcaaggccccgatagaggaaatggaggaaaaggtccatggctgctgtaggataagctag

SEQ ID NO: 130715 - DNA, 1578 bp, synthetic construct
  misc_feature 1..1578: note = Description of Artificial Sequence: Synthetic coding sequence
  source 1..1578: mol_type = other DNA
atggcttcccacgtcgatcttcttactgagctgcagttgctagagaaagtaccaaccttagagcggttgcgcgccgcccagaagcggcgagcacagcagctcaagaaatgggcacaatacgaacaggacctccagcatcggaagcgaaagcacgaacgtaagcgatcaacaggaggacggcgcaaaaaggtgagttttgaagcctcagtggcattattggaggccagcctgcggaacgacgccgaagaagttcgttacttcctgaagaacaaggtctctcctgatctgtgcaatgaagatggccttacggctctgcatcagtgttgtatagataatttcgaggagatcgttaaactgttattgtcacacggggccaacgttaatgccaaggataacgagctgtggacgcctctccacgcggccgcgacctgcggacatatcaacttggtgaagattctagtgcaatatggggccgatctgctggcagttaactcggacggcaacatgccatacgatctgtgtgaagacgagcccacactggatgtcattgaaacctgtatggcctaccaggggataacacaagaaaagataaatgagatgcgtgttgcacccgaacagcagatgatcgccgatatccattgtatgatcgccgcagggcaagaccttgattggatcgacgcccagggtgccacactgatgcagatggcggagctactggtttcacatggggccagcctgagtgcgcgtactagcatggatgagatgccgatcgacctgtgtgaggaggaggaatttaaggtcctcctcctggaacttaagcataagcatgacgtgatcatgaagtctcagctgcggcataaaagctctttgtcccgccgtaccagcagcgcgggatcaaggggaaaggtggtgcggcgggcaagtctgagcgacagaaccaatttgtaccgtaaggagtacgagggagaggcaatcttatggcagcggtctgcagctgaagaccagagaaccagtacctataacggggatatcagggagactcgaaccgaccaggaaaataaggatcccaatccacgactagaaaaacccgttctgctgagcgaattccccacaaagattcctcggggggagttagacatgcctgtggagaatggcctgcgggctcctgttagcgcataccagtacgccctcgcaaatggagatgtgtggaaagtgcatgaggtgcctgactatagcatggcttatggcaaccctggagtcgccgacgcaaccccaccctggtctagttataaggagcagtctcctcaaacgctcctggagcttaagcgacagagagcggcagcaaagctgttgtcccatccctttttatcaacccatctgggaagctcaatggctcggaccggagaatcttcatccgaaggcaaagctcccttaattgggggccggacttctccatacagcagtaacggaacaagcgtttactatacagtgacatctggggaccccccactgcttaagttcaaggcccctattgaagaaatggaagaaaaggtgcatggctgttgtcggattagttag

SEQ ID NO: 130716 - DNA, 3369 bp, synthetic construct
  misc_feature 1..3369: note = Description of Artificial Sequence: Synthetic coding sequence
  source 1..3369: mol_type = other DNA
atggaacctagcgaagtgccttcgcagattagtaaagacaactttttagaggtgcctaatttgtccgattccttatgtgaggacgaggaagtcacctttcagcctggcttctctccccagcccagtaggcggggctccgatagctcagaggacatctaccttgataccccgtcctctggcacaaggcgcgtaagtttcgccgactcctttgggtttaatctggttagcgtgaaggaatttgactgctgggagctgccatctgcctcaacaacttttgacctgggcacggacattttccacacggaagagtacgtcctggctccattattcgacctgccgagctctaaggaagatctgatgcagcagcttcagatacaaaaggcaattctggaaagcaccgaaagcctgctcggcagtacctccataaaaggaatcattagggtgctgaatgtcagctttgagaagctcgtgtacgtgcggatgtcactcgacgactggcagacccattatgatatcctggctgagtacgtgcctaattcatgtgatggtgagaccgaccagtttagctttaaaatcgttctggtgccaccataccagaaggatggatccaaggtcgagttctgcatccggtacgaaaccagtgtggggactttttggtccaacaataacggcacaaactacactttcatctgtcagaagaaggagcaggagccagagccggttaaaccctggaaggaagtgccaaaccggcagatcaaggggtgtttgaaagttaaaagctccaaagaggagagctctgtcacatctgaagagaacaacttcgagaacccaaagaatactgacacttacatccctacaattatttgcagccacgaggacaaggaggatctggaggcctcaaataggaatgtgaaagatgtgaatagagagcacgacgaacataatgagaaggaactggagctgatgattaatcagcatcttattcgaacccgttccactgccagcagggatgaacgcaataccttttctaccgatccagtgaactttccgaacaaagccgagggcctggaaaagaagcagattcacggggagatatgcactgacctgttccaaaggagtctgtcccctagcagttctgcagaatcgagcgttaagggcgacttctattgcaacgagaagtacagctccggagacgattgtacacaccaacctagcgaagaaacaactagcaatatgggtgaaattaaaccctctctcggcgacacatcaagtgacgagcttgtgcaattgcacactggatctaaggaagtcctggacgataacgcaaaccctgctcatgggaacggcactgttcagatcccttgtccctcaagcgaccagctgatggccggcaacctgaataaaaaacacgaaggcggcgccaagaatatagaagtaaaggatctaggctgcctgcgccgcgacttccattccgacaccagtgcgtgtctgaaggagtctactgaggagggctcttccaaggaagattattacggaaacggaaaggatgacgaagagcaacgaatctatctgggcgtgaacgaaaagcaacgcaagaacttccagaccattctgcacgatcaggaaaggaagatgggtaacccaaaaataagtgtagctggtatcggggcgagcaacagggacctggccactctgctttctgagcacaccgcaatccccactagagccattaccgccgatgtgtcacacagcccacgtactaatctgagttgggaggaggccgtactgacacctgaacatcatcatctgacttcagaaggaagtgcccttggaggaattacaggacaagtgtgctcctcccgcacggggaacgtgcttcgcaacgattacctctttcaggtagaagaaaagagcggcggaatcaatagcgaagaccaggataacagccctcaacacaaacagagttggaacgtcctggaatctcagggaaagtcccgcgagaacaagacaaacatcacagagcacattaaagggcagaccgattgtgaagatgtctggggcaaacgcgacaatacccggagcctgaaggctactaccgaggagctcttcacctgccaagagactgtgtgctgcgaattaagttcactcgcggaccacggcataacagagaaagctgaggccggaacagcctatatcattaagacaacgtctgagagtacgcctgagagtatgtcagccagagaaaaggcaattattgcaaaactgcctcaggagaccgcccgctccgacaggccaattgaggtgaaggaaacagcttttgatccgcacgaagggagaaacgatgatagccactatacactttgccaaagagacaccgtaggggtaatctacgataacgatttcgaaaaggaatcacgtctcggaatctgcaacgtcagggtagacgagatggaaaaagaggagaccatgtccatgtataacccaagaaaaacacacgaccgcgagaagtgcggcactgggaacatcacttctgtcgaagagagcagttgggtaataaccgaatatcaaaaggccaccagcaagctggacctgcagctcggcatgctacccactgacaaaactgtgttttcggaaaacagagacttacggcaagtgcaggagctctcgaagaaaactgatagcgatgccattgtgcactccgcttttaatagtgataccaatcgtgctccgcagaatagctccccattttctaagcatcacaccgagatctctgtcagtactaacgagcaggcaattgcagttgagaacgcggtgaccaccatggcgagccaaccaatctccacaaagagcgagaacatctgcaattccacccgcgagatccaaggaatagaaaagcacccgtacccggaaagcaagcctgaggaggttagcaggagttccgggattgtgacttccggcagcagaaaggaacgatgcatcgggcaaatattccaaactgaagaatatagtgtggagaagagccttggccccatgatcctaatcaacaagcctctcgaaaatatggaagaggcacgacacgaaaatgagggtctggtgtcttcaggccagtctctgtacacctcaggagagaaagagtcggattcgtccgcctcaaccagtctgcccgtggaagaaagccaggcgcagggcaacgagagcctgttcagcaaatacaccaacagcaaaattccatacttcctgttattcttgatttttctgatcacagtataccactatgatttgatgataggcttgaccttttatgtattaagcctgtcctggttgtcttgggaagagggtcggcaaaaagagagtgtgaagaagaaatag

SEQ ID NO: 130717 - DNA, 954 bp, synthetic construct
  misc_feature 1..954: note = Description of Artificial Sequence: Synthetic coding sequence
  source 1..954: mol_type = other DNA
atgtcttgtacaagaatgattcaggtactcgaccctcggccactgacatccagcgtgatgcccgtcgacgtggcgatgcggttgtgtttggcccactccccacctgtaaaaagttttcttgggccctatgacgaattccagagaaggcactttgtgaacaagctgaagcccctgaagagctgtctgaacatcaagcacaaggccaaaagccagaatgactggaagtgctcccacaaccaggcgaaaaagagggtggtgtttgcagattctaaaggactaagtctaaccgcgatacacgtgtttagtgacctccctgaggaacctgcatgggacctacagtttgacctcctcgatctcaatgacatctccagcgcgctgaaacaccatgaggaaaaaaacctcatcctcgattttccacaacccagcactgactacttatcattcagaagtcattttcaaaagaattttgtctgtctcgagaactgtagtttgcaggagcgaactgtcaccggcacggtcaaggtgaaaaatgtatcattcgaaaagaaagtgcagatccgtatcacatttgatagctggaagaactacaccgatgtagattgtgtctatatgaagaatgtgtacggagggaccgactctgacacctttagctttgccattgatcttccaccagtgatacccacagagcagaagatcgagttttgcatctcctaccacgctaacgggcaggtgttttgggacaacaacgacggccagaactataggatagtccacgtacagtggaaacccgacggggtccaaacgcagatggcacctcaggactgcgcctttcatcagacatctccaaaaactgaattggaaagcacaattttcgggtcacccagactggcatctggcctgtttcccgagtggcagagctgggggaggatggaaaaccttgctagctacaggtag

SEQ ID NO: 130718 - DNA, 894 bp, synthetic construct
  misc_feature 1..894: note = Description of Artificial Sequence: Synthetic coding sequence
  source 1..894: mol_type = other DNA
atgagctgcacaagaatgatccaggtcctggacccgcgtccgctgaccagctctgtgatgccggtggatgtggcgatgagactttgcttagcacactcccccccagtgaagtcatttttgggcccctatgacgagtttcagagacgacattttgtgaataaacttaaaccacttaagtcctgcctcaatataaagcataaagcgaaatcccagaatgattggaagtgttcacataaccaggcgaagaaacgggttgtgtttgcggactctaagggactgtccctgacggccatacacgtgttcagcgatctgcccgaagaacccgcatgggatctacagtttgacctgctggatttgaacgatataagctctgctttgtcgttccggagccatttccagaaaaactttgtatgtcttgagaactgttcactgcaggaaaggaccgtcactggtaccgttaaagtaaaaaatgtgagtttcgaaaagaaggtacagattagaatcacattcgattcctggaaaaactacacagatgtagactgcgtttatatgaagaatgtctacggtgggactgacagcgacactttcagcttcgccatagacctccctcctgtgatccctactgagcagaagatcgagttttgtatctcctatcacgcgaacggccaggtcttctgggataataacgacggtcagaattaccggattgttcatgtgcagtggaaacccgacggcgtgcagactcagatggctccacaggactgtgccttccaccagacatctcccaagaccgagctggagtcaacaatctttggatcaccccggctggctagtggcttatttcccgagtggcagagctggggtaggatggaaaacctcgcttcctatcggtag

SEQ ID NO: 130719 - DNA, 600 bp, synthetic construct
  misc_feature 1..600: note = Description of Artificial Sequence: Synthetic coding sequence
  source 1..600: mol_type = other DNA
atgagttcccctacatcccccttgaagcatcacgaggagaaaaaccttattctcgatttccctcagcctagtactgactatctttcattccgctcccactttcaaaagaattttgtgtgtctggagaactgctcattgcaggagagaaccgtgaccggcactgtgaaggtgaaaaatgtgtccttcgaaaaaaaggtccaaattaggattaccttcgacagttggaagaattacactgatgtggactgtgtctacatgaagaacgtttacggagggaccgattccgataccttttcttttgctatcgacctaccacccgtaatcccgacggagcagaagatcgagttttgcatttcctaccatgccaacggtcaagttttttgggacaataacgacggtcaaaattatcgcattgtgcatgttcaatggaagccggacggcgtgcagacccaaatggcaccacaggattgcgccttccaccagacaagccccaagactgagctggagtccaccattttcggcagtccacgattggcctctggactgtttccggagtggcagtcctggggaaggatggaaaacctggcgtcatatcgctag

SEQ ID NO: 130720 - DNA, 900 bp, synthetic construct
  misc_feature 1..900: note = Description of Artificial Sequence: Synthetic coding sequence
  source 1..900: mol_type = other DNA
atgtctcgcgggcctagctctgccgtgctaccttctgctctgggcagccgaaagctgggacctcgctccctgagttgcctctcagatctagacggcggagtggctttagaaccccgcgcgtgccgccccccaggttcccccggaagggcgccgccccccacccctgcaccatccggttgtgatcccagactccggccaatcattctgaggcgtgctaggtcactcccaagcagcccagagcggcgccaaaaagctgcaggcgccccgggagctgcatgtaggcccggctgcagccagaagctgcgggtacgatttgccgatgccctcggtctcgaactggctcaggtgaaagtcttcaacgcaggggacgacccatccgtgcccctgcatgtcctgtccagattagccattaacagcgatctctgctgcagctcccaggacctcgagtttaccctgcactgcctggtgcccgattttccccctccagtcgaagcagcggacttcggtgaacggctgcaaagacagctggtgtgcctcgaacgcgtgacctgctccgacctgggcatttccggaaccgtaagagtgtgcaacgtcgcctttgagaaacaggtggcagtgcgctataccttttcgggctggagatccacgcacgaggctgtggctcgatggcggggtcccgctggaccggaggggactgaagacgtgttcacatttggctttccggttcccccttttctgttggaactcgggagcagagtacactttgccgtacgttaccaggtggccggggctgagtactgggataacaatgaccacagagactattcactcacctgtaggaatcatgcattgcacatgccaaggggtgagtgcgaggaaagctggatccattttatttag

SEQ ID NO: 130721 - DNA, 756 bp, synthetic construct
  misc_feature 1..756: note = Description of Artificial Sequence: Synthetic coding sequence
  source 1..756: mol_type = other DNA
atgacaaggctgaccgttctggccctcctggccggactgctcgcatctagccgggctggtagctcccccctcctggacatagttggtggacgcaaagctagaccacgccaatttccattcttggcctccatccagaaccaggggaggcacttttgtggtggagccctcattcacgcccgattcgtcatgacggcagcatcatgttttcagagccagaatcccggggttagcactgtggtgctgggggcttacgacctccgacgcagggaaagacagagtagacagacgttcagcattagctctatgtctgagaacgggtacgacccccaacagaacttaaatgacttgatgctacttcagctcgatcgggaggccaacctgacgtcttctgtgaccattctgcctcttccactccaaaatgcgactgtcgaggccgggactcgctgtcaggtcgctggatggggctcccagcggtccggaggcagactgtctcggtttccccggtttgttaacgtgaccgtcacaccggaagatcagtgcagacctaataacgtttgcactggggtgctgacacgacgagggggtatctgcaatggcgacggggggactccattggtttgtgagggactggcacatggtgtagcaagcttctccctcgggccttgcgggcgcggcccagatttctttacccgagtagcattgtttcgggattggattgatggtgtgctgaacaatcccgggccaggccctgcctag

SEQ ID NO: 130722 - DNA, 954 bp, synthetic construct
  misc_feature 1..954: note = Description of Artificial Sequence: Synthetic coding sequence
  source 1..954: mol_type = other DNA
atggccgctgagcgtggtgctgggcagcagcagtcccaggagatgatggaggaagaacacgagctacctgtggacatggagactataaacctggaccgtgacgcggaagacgttgatctgaaccactataggattggtaaaattgaagggttcgaggtcttaaagaaggttaagaccctatgtctgcggcagaacctaatcaagtgtattgagaacctcgaagaactccaatccttgagggaactggacttgtatgacaatcagattaagaagatcgagaacctggaggccctcaccgagctcgagattttggatattagttttaatctcctgcggaacatcgaaggagtggacaagcttactcggctgaaaaaacttttccttgtgaataacaaaatttcgaagatagaaaatctgtcaaatctgcaccaactacagatgctagagctgggaagcaatagaattagggccattgagaacattgatactcttacaaatttggagtcactcttcttgggtaaaaataagattacaaagctgcagaacctggacgcactgacaaaccttacagtgctcagcatgcagtccaacaggttgacgaaaatagaaggcctacaaaacctggtgaacctgcgcgaactctacctttcacataatggaattgaagtcattgaaggtttagaaaataacaacaagttaacaatgctagacattgcgagtaatcgcatcaaaaagattgagaacatatcccatctgactgaactgcaggaattttggatgaacgacaatttgctggagagttggtccgacctcgatgagctgaaaggcgccagatctctagaaaccgtgtaccttgaacggaatccacttcagaaggacccacaataccgacgtaaagtgatgttggctctccctagtgttagacagatagacgccacatttgttagattttag

SEQ ID NO: 130723 - DNA, 714 bp, synthetic construct
  misc_feature 1..714: note = Description of Artificial Sequence: Synthetic coding sequence
  source 1..714: mol_type = other DNA
atggccgccgagcggggtgctggccaacagcaatctcaagaaatgatggaggaggaacacgaattacctgtggacatggaaaccattaatctcgatagagacgctgaagacgtggacctgaatcattatagaattggtaagatcgaaggcttcgaagtattgaagaaggtgaaaacgctgtgtctgagacagaacctcattaaatgcattgaaaatctcgaggagttgcagagtctgagggaactggatctgtacgacaaccagatcaagaagatcgaaaacctggaggcgctcacggaattagagatattggatatttcctttaacctcctgagaaacatagaaggagtggataagttgactaggcttaagaagttatttctcgtaaacaacaagataagcaaaatagagaacttaagtaacctccatcagcttcagatgctggagttaggttccaatcggataagggccatcgagaatatcgacaccctgaccaatctggaatcactgtttctggggaagaacaaaattaccaagctacagaacctggatgctctcactaatctgaccgtactgtctatgcagtccaatagactcacgaaaattgagggactgcaaaacctggttaatctaagagaactctatctgtctcacaacggtattgaggtgattgagggattggaaaacaatgtgcaggatagcctaacctattag

SEQ ID NO: 130724 - DNA, 843 bp, synthetic construct
  misc_feature 1..843: note = Description of Artificial Sequence: Synthetic coding sequence
  source 1..843: mol_type = other DNA
atggccgccgagaggggcgctggccaacagcagtcgcaggaaatgatggaggtagacaggagggtcgagtcagaagaaagcggggatgaggaagggaaaaaacactcatctggtattgtcgccgacttaagtgagcagagcctgaaagatggcgaggagagaggggaggaggaccccgaagaggagcacgaattacctgtggacatggaaacgattaacctggacagagatgccgaagacgtggaccttaatcattatcgcatcggcaagatagaaggcttcgaggttctgaaaaaagtgaaaacactgtgccttaggcagaatctgatcaagtgcatcgaaaacctggaggagcttcagagtctccgggagcttgacctttacgataaccagatcaaaaagatcgaaaatctggaggctctgaccgagttggaaattcttgacatcagcttcaacctcttacggaacattgaaggcgtggataagctcacccgcttgaaaaagctgttcctcgtaaataacaaaatatcaaaaatagagaacctctccaacctgcaccagctgcagatgctcgagttgggttcaaaccggatccgcgcaatagagaatatcgatactctgactaacctggaaagtcttttcctaggaaaaaacaagatcactaagctgcaaaacctcgacgcgctcacaaacttaacagtgttgtccatgcagtctaacagactgactaaaattgaaggacttcaaaacctggtaaatttgcgggagctctacctgtctcacaatggcatagaagtaatagaaggcctggaaaacaacgtccaggatagtctcacttactag

SEQ ID NO: 130725 - DNA, 1083 bp, synthetic construct
  misc_feature 1..1083: note = Description of Artificial Sequence: Synthetic coding sequence
  source 1..1083: mol_type = other DNA
atggctgcagagcgaggtgctggtcagcagcagtcacaggagatgatggaagtggatcgcagggtggaatccgaagagtccggggacgaggaaggtaagaagcattcctctgggatcgttgccgacctctcagaacagagtctcaaggatggagaagagaggggagaggaggacccggaggaggaacatgaattgcccgtggacatggagactatcaacctggatcgggatgccgaggatgtggacctcaaccattacagaatagggaagatcgagggctttgaggtactgaaaaaggtgaagaccctgtgcctgcgtcagaacctcatcaaatgcatagagaatttggaggagctccagagcctgcgcgagctggacctgtatgacaatcagataaaaaagattgaaaatctggaggccctcaccgaactagagattttggatattagctttaacttattacgaaatattgagggagtcgataagctcacacggctgaagaagctctttttagttaataacaaaatatccaaaatcgagaacctctcgaacctccaccaactccagatgttggaacttggaagcaaccggattagggcgatagaaaacatcgacacgctcacaaacctggagagcctgtttctgggcaagaataagatcacaaagttgcagaatctggatgctctgaccaatctgaccgtgttaagtatgcagagtaatcgcttgacgaaaatcgagggtctccaaaacctcgtgaacctgagggagctatacctgagccacaatggcattgaagtgattgagggcctagagaacaacaacaagttaaccatgctggatattgcctcaaacagaattaaaaagatagagaatattagccatttgactgagcttcaggagttctggatgaatgacaatttgcttgagtcttggtcagacttggatgaattgaaaggcgccagatccctggagactgtatatctcgagaggaaccccctgcagaaggaccctcagtaccgccgcaaggtcatgctggcactcccttccgtccggcagattgatgctacattcgtgcgattctag

SEQ ID NO: 130726 - DNA, 384 bp, synthetic construct
  misc_feature 1..384: note = Description of Artificial Sequence: Synthetic coding sequence
  source 1..384: mol_type = other DNA
atggttcagacagctgttgtccctgtgaaaaagaaacgtgtggagggtcccggaagcctggggctcgaggaaagcgggagcaggcgaatgcaaaacttcgctttctccgggggcctctatggtggtcttcccccaacccactcagaagcgggttcccagccgcacggcatacacggaactgccttgataggaggactaccgatgccttatcccaatctggccccagacgtcgatctcaccccagtggtgccttctgcagtaaatatgaaccccgctcccaatcccgccgtatacaaccctgaagccgtgaacgagccaaaaaaaaagaagtatgctaaggaggcctggcccggaaagaaacctacacctagtctactcatttag

SEQ ID NO: 130727 - DNA, 1056 bp, synthetic construct
  misc_feature 1..1056: note = Description of Artificial Sequence: Synthetic coding sequence
  source 1..1056: mol_type = other DNA
atggctgccgccgctaacagcggctcgagtctcccactttttgattgccctacctgggccggtaaaccccctcccggtcttcacctggatgttgtaaagggggacaaactgatagagaagctcattatcgatgagaagaagtactatttattcggaagaaacccagacctgtgtgattttacaattgatcatcaatcctgctccagggtccatgcagctctagtctatcacaagcatctcaagagagtcttccttatagacctgaattccactcacggaactttcctggggcatatacggctggaacctcataagccccagcaaattccaatcgattccactgtctcgttcggagcctcgacaagagcatacactttgcgtgaaaagcctcagactctcccatctgcagtcaaaggggacgagaaaatgggtggggaggatgacgaacttaagggacttctgggtttgccggaggaggagaccgagcttgacaacctgacagaattcaacactgctcacaacaagcgcatttctaccttgacgatcgaggaagggaacctggacattcaaagacccaagagaaagagaaagaattcgagagtcaccttcagcgaggatgacgagatcatcaatccagaggatgtcgatccaagcgtgggaaggtttaggaacatggtgcagacggccgtggtcccagttaaaaagaagagagtggagggacctggtagcctcgggttggaggagtcaggatctcgacgcatgcaaaactttgcattcagcggggggctgtatggaggactccctcctacacactccgaggcgggaagccagcctcatggaattcacggaaccgcgctgattggcggccttcctatgccttatcccaatctagcccccgacgtggatcttactccagtcgtgcctagcgccgtgaacatgaatccggcgccaaacccagcggtgtacaatcccgaggcagttaatgagcctaaaaaaaaaaagtacgctaaggaggcctggcccgggaagaagccaacacccagtttattgatatag

SEQ ID NO: 130728 - DNA, 630 bp, synthetic construct
  misc_feature 1..630: note = Description of Artificial Sequence: Synthetic coding sequence
  source 1..630: mol_type = other DNA
atggggggcgaagatgatgaattgaagggcctgctgggcctccccgaggaggaaaccgaactagacaatctgaccgagttcaacaccgcgcacaacaagcgaatttcgacccttactattgaggagggcaatctggatattcagagacctaagagaaagagaaaaaactcccgagttactttttccgaggacgacgagataattaatcctgaagatgtagacccttcggtgggtaggtttaggaatatggtccagacggcagttgtccctgtcaagaaaaagcgtgtcgaaggtcccgggtccctgggtctggaagaaagtggctcacgcagaatgcagaacttcgcattctccggcggactttacggagggttacctcctactcacagtgaagcaggaagtcaaccgcatggcatccacggaactgcccttatcggtggattgccgatgccgtaccccaatctcgcccctgacgtggatctgactcccgtggttccgtccgccgtgaacatgaaccccgcccccaatcccgccgtctataacccggaggctgttaatgagccaaagaaaaagaagtacgccaaggaagcctggcccggcaaaaagcctaccccctccctacttatctag

SEQ ID NO: 130729 - DNA, 711 bp, synthetic construct
  misc_feature 1..711: note = Description of Artificial Sequence: Synthetic coding sequence
  source 1..711: mol_type = other DNA
atgggcggagaggacgatgaactgaaagggttgttaggccttccagaggaggaaacagagctggacaatcttacagagttcaacaccgcacacaataaacgcattagcaccctcaccattgaagaaggaaatctagacatccagagacctaagaggaaaaggaaaaattctcgcgttactttttctgaggatgatgaaatcataaatcctgaggatgttgacccctcggttggaagatttaggaacatggttcagacagccgttgtcccagttaagaagaaacgggtagagggtccaggctctctcggcctggaagagtccgggtcaagacgcatgcagaacttcgccttcagtggcgggctctacggcgggctgcctccaacacattcagaagcagggtctcaaccacatggtattcacggcacagcactgatcggaggacttcccatgccatacccaaacctggctccggacgtggacctgacgccggtggtgccctccgcggtcaacatgaatcccgcccctaaccccgcggtgtacaatccagaagccgtgaatgagccaaaaaagaagaaatacgccaaagaagcctggcccgggtgtgaatttgtgtcccagagccttattgccaccgctatttggaagtgcctgttaaaggcccagtcgctgggcctgggtggaaatgcaccaagccccctctactataagtag

SEQ ID NO: 130730 - DNA, 618 bp, synthetic construct
  misc_feature 1..618: note = Description of Artificial Sequence: Synthetic coding sequence
  source 1..618: mol_type = other DNA
atgggcggtgaagacgacgagctcaagggtctattgggcctgcccgaagaagaaaccgaactcgataacctaaccgaattcaatacagcccacaataagaggatcagcacacttacgatcgaggaggggaacctagatattcagaggcctaagagaaagcgcaagaacagtagggttacatttagtgaagacgacgaaatcattaacccggaagatgtagatccaagtgtgggcaggttcagaaatatggtgcaaacagctgtggtcccggtcaagaaaaagcgcgtggaaggacccggatctctggggctggaagaaagcgggtccaggaggatgcagaattttgccttttccggagggctgtacggaggtctacctccaactcatagcgaagcaggatcccagccgcacggcatacacggcactgctctgattggagggctgccaatgccgtacccgaatctggcccccgatgtcgacctgacaccagtggttccaagtgccgttaatatgaaccctgcacctaatcccgcagtttataatccagaagcggtgaacgagccgaaaaaaaagaagtatgctaaggaggcatggccaggaaaaaaacccacgccctag

SEQ ID NO: 130731 - DNA, 600 bp, synthetic construct
  misc_feature 1..600: note = Description of Artificial Sequence: Synthetic coding sequence
  source 1..600: mol_type = other DNA
atggccgcagccgctaattctggttcttctctgcctctgttcgactgtcctacctgggccggaaaacctccacctgggctacatctggacgtcgtcaaaggggataaactgattgaaaagcttataatcgacgagaaaaagtattacctgtttggtcgcaaccccgatctttgtgacttcacaatcgaccatcagagttgtagtagggtgcacgccgcactcgtgtaccataagcacctgaagcgtgtctttctaatagaccttaatagcactcatggaaccttcctgggacatatcaggcttgagccacacaagccacagcaaattcctattgatagtaccgtgagttttggggccagtacacgggcctacaccctcagggagaagccccagacactgccctccgccgtgaaaggagatgagaagatgggtggagaagatgacgagctgaaggggctgctagggctgcccgaagaagagactgagctggacaatttgaccgaattcaatacagcacacaaccatatggcttccatgggccaacatagttctgtagcttgtccctgccacacccagactctgcctctgatgtggacttag

SEQ ID NO: 130732 - DNA, 3891 bp, synthetic construct
  misc_feature 1..3891: note = Description of Artificial Sequence: Synthetic coding sequence
  source 1..3891: mol_type = other DNA
atgctgaaaactgagtcgagcggggagcgaaccacattgcgatccgcctccccacaccggaatgcgtaccgcactgaatttcaggctctgaaatcaacctttgacaaacctaaaagcgatggcgagcagaaaacaaaggaaggagaaggatctcaacagtctcgggggaggaagtatgggtctaatgtgaaccgcataaagaacctgtttatgcagatgggcatggaacctaacgagaacgctgcagtgattgcgaaaacccgggggaagggtggccacagttctccccagaggcggatgaagccaaaggagttcctggagaagaccgacggatcagttgttaagcttgagagcagcgtttctgaacgaatctccagattcgataccatgtatgacggacccagttattctaagtttactgagacgcgcaaaatgttcgagcgctctgtgcatgaaagcggccagaacaacaggtattcacctaaaaaagaaaaagccggcggaagcgagccgcaagatgaatggggcggctcaaagtcaaatcggggctctactgattctcttgatagcctgtccagtcgcactgaggctgtatcgcctaccgtgagtcagctcagcgctgtctttgagaacactgatagccccagcgctattatatccgagaaggccgaaaacaacgagtactcagttacaggacattatcctctcaacttgcctagcgttacagttaccaacctggacaccttcggtcacttaaaggattccaattcttggccaccatcaaacaaaagaggggttgacactgaagatgctcataagtcaaacgctaccccggtgcccgaagtggcgagtaagtccaccagtctagctagtatccccggggaggaaattcagcaatcaaaggagccagaggactccacctcaaaccaacagactccggactccattgacaaggatggccccgaggaaccatgtgctgaatctaaagcgatgccaaaatccgaaataccctcacctcagtctcaactgctcgaggacgccgaggccaacctcgtgggaagggaggccgctaagcaacagcgtaaggaactagctggaggagactttactagccccgatgcttctgcctcaagctgtggcaaagaggtgcctgaagattccaataacttcgacggttctcatgtttacatgcactccgattataacgtatatagggtacgctccaggtataatagcgactggggtgagacaggcactgagcaagacgaggaggaggacagcgacgagaacagctattaccagccagacatggaatactcagaaattgtagggctgcctgaagaagaagagatacccgccaacagaaagatcaagttttcaagcgcgcctattaaggtgtttaatacctattccaatgaggactatgataggcgaaacgatgaagtcgatcccgtggctgcttcggccgagtacgagttggagaaaagagtggaaaagctcgagctttttcctgtagagctcgagaaggacgaggatggtctgggcataagcattatcggaatgggagtcggagcagacgcaggtctggagaagttaggcatcttcgtgaaaaccgtcacagaggggggcgctgcacaacgggacggccggattcaggtgaatgaccagatcgtcgaagtagatggtataagtttagtgggggtgacccagaattttgccgcaaccgttcttcggaatacaaaaggaaacgtgcgctttgtcatcggacgagagaagcccggacaggttagcgaggtagcccagttaatctcccaaacactggaacaggagaggcgacaacgggagctgctggaacaacactacgctcaatacgacgcagacgatgacgagaccggtgagtacgccactgacgaagaggaggacgaggtgggccccgtactgcccggaagtgacatggcaatcgaagtgttcgaactccccgagaatgaggacatgttctcaccttcagagctggatacctctaagctgagccataagttcaaagaactgcagataaaacacgctgtgaccgaagcagagatccagaaattgaagaccaaactccaggccgcagagaacgagaaggtacgatgggagctggaaaagactcagcttcagcagaacatcgaagagaataaggaaaggatgttgaaacttgaatcttactggatagaggctcagacgctgtgccataccgtcaacgagcatctgaaggaaacgcaaagtcagtatcaagcccttgagaagaaatacaataaagcaaagaaactcataaaggacttccagcagaaagagctggactttatcaagcgccaggaagccgagcggaaaaagattgaagatctagaaaaggctcatttagtggaagtgcaaggcctacaggttcggatccgagatctggaggcagaggtcttccgattactgaaacagaatggtactcaagttaataacaataataacattttcgaacgacggactagtttgggggaagtgagcaaaggagatacaatggaaaacctcgatggaaaacaaacctcatgccaggatggcctcagccaggacctgaatgaggccgtgccagagaccgaaagactcgattcgaaagcactgaagacacgcgcgcagctgagcgttaaaaataggaggcagcggccctcacggacccggctatacgattcagtgtcttccacggatggagaagatagcctcgaacgaaaaggactacgtacaagcagtcccgagtcagatagtggagtgccccctctaacaccagtcgactccaacgttcctttttcttccgaccacattgccgaattccaagaggagcctctcgaccccgagatgggccctctgagctctatgtggggcgacacctctctgttttcaacctccaagagcgatcatgatgtggaggagagcccatgtcatcaccagacaacgaacaaaaaaattctacgtgagaaggatgatgccaaagatcctaagtcccttcgagcctcgtcatccctagcggtccagggtggcaagatcaaacggaagtttgtggacctgggcgcaccattgaggagaaatagctctaaagggaaaaagtggaaggagaaggaaaaggaggcaagccggttctcagcaggctctcggatcttcagggggagactggagaattggactccaaaaccttgtagcaccgcccagaccagtacgcgcagcccgtgcatgcccttttcctggttcaacgacagtagaaagggcagctactcttttagaaatctgccagcacctacgtcttctctccagccctcgccagaaaccctgataagcgacaaaaagggtagcaagaattttacatttaatgacgacttctctccttcctctactagttccgccgacctgtccgggttgggcgctgagcctaagacgcccggcctgtcacagagtctggccctgtcatctgatgagatcctagacgacggccaatcccctaagcacagccagtgtcagaatcgggcggtgcaggagtggtcagtgcagcaggtgtcccactggctgatgtctctgaacctagagcagtacgtatccgagttttccgcacagaacataacaggggagcagctcctccagctggacggcaataagttaaaggccctaggtatgacagccagccaggaccgtgcagtcgtgaagaaaaaactgaaagaaatgaagatgtctctggagaaagcccggaaagctcaggagaagatggagaagcaaagagagaaactgcggcgtaaagaacaggaacagatgcagcggaagagtaagaagactgaaaaaatgacctccaccaccgccgagggagctggagaacaatag

SEQ ID NO: 130733 - DNA, 3297 bp, synthetic construct
  misc_feature 1..3297: note = Description of Artificial Sequence: Synthetic coding sequence
  source 1..3297: mol_type = other DNA
atgctgaagactgagtctagcggagagagaaccacactaagatctgctagcccccataggaacgcttaccggacagagtttcaggccctaaagtccacgttcgataagccaaaaagcgatggagagcagaagacgaaagagggggaggggtcacagcagtcacgagggcggaagtacggcagtaatgtcaataggatcaaaaacctctttatgcagatgggcatggaacccaacgagaatgctgccgtgattgcaaagacccgcggaaagggaggtcactcttcaccccagaggcggatgaaaccgaaggagttcttagaaaaaacggatgggtctgtggtcaagcttgaatccagtgtttcggagcggatttcacgttttgacactatgtatgacggcccctcttattctaaattcacagagactcggaagatgtttgagcgttctgttcacgaatccggtcagaataatcggtacagccctaagaaggagaaggccggaggctccgagccacaggatgagtgggggggctccaagtcgaatcgaggcagtacggattccctggactcactttccagtcggacggaagcagtgtcccccactgtaagtcaactatccgctgtcttcgaaaacaccgatagcccgagcgccatcatcagcgagaaggctgaaaacaatgaatacagcgtaaccggccattatcctctgaacttgcccagcgtcaccgttaccaaccttgataccttcggacatttaaaagactcaaactcttggccgccctcgaacaaacgcggggtggacaccgaggatgctcacaaatctaacgctacccccgttcccgaggtggccagcaagagtacatctcttgcttcgattccaggggaggagattcaacagagtaaggaacccgaagatagcacgtcaaatcagcagacacctgattcaattgacaaggatggaccagaagagccatgcgccgagtccaaagctatgcctaaatcggagattccttcacctcaatcccagctactggaggacgccgaggcaaacctagttgggcgcgaggccgccaagcaacaacgaaaagagctggcaggtggagacttcaccagtcccgatgcttccgcttcatcctgcggtaaggaagtcccggaagactccaataacttcgacgggtcgcatgtgtacatgcactctgattacaacgtctatcgggtccggtcccggtacaattctgactggggcgagacaggtactgagcaagatgaagaggaggattccgatgaaaacagttactaccaacccgatatggaatactcggagatcgtgggtctccctgaagaggaggagatccctgcaaaccggaagattaagttctcttcggccccaatcaaggtgttcaacacatatagcaacgaagattacgatcggcgcaatgacgaggtcgatcccgtggcggcgtctgcagaatatgaactggaaaagagagtcgaaaaactcgaactgttccccgtcgagcttgagaaggacgaagatggcctcggaatatctattatcggcatgggtgttggagcagacgccggtctggagaaacttggaatcttcgtcaaaacagtcactgaaggaggcgcagctcagcgcgacggtagaatccaggttaacgatcaaatagtggaggtggatggtatctcactagtgggcgtaacccagaacttcgccgccacagtgctgagaaacacaaaagggaatgtgagatttgttattggaagggagaaaccgggccaggtgtcagaagtcgctcagctcatctcccagacactggagcaggaaaggaggcagcgagagttgttggagcagcattatgcgcaatatgacgctgacgacgacgagacaggagagtacgcaaccgatgaagaggaggacgaagttggtcccgtgctgccggggtctgatatggcaatcgaagtgtttgagctgcctgaaaacgaagatatgtttagcccctctgagctggatacctccaagttatcgcataagttcaaggagttacagataaagcatgcagtgaccgaggccgaaatccagaagttgaaaaccaagctgcaggcggctgaaaacgagaaggtgagatgggagctggagaaaactcaattgcagcaaaacatcgaggagaacaaggaacgcatgctcaaattagaatcatactggattgaggctcagacactgtgccatactgtgaatgagcatttgaaggaaacccaatcccagtatcaggctctcgaaaagaagtacaataaagccaagaaactgatcaaggacttccagcagaaggagctggactttattaagagacaagaggcagaacggaaaaaaattgaagacctcgagaaggctcatttggtggaagtccagggtctacaagtaagaattcgcgatctcgaggccgaggtctttaggctgctcaagcagaacgggacccaggtgaataataacaacaacatcttcgaaagacgtacctccctgggcgaggtgagcaagggcgacacgatggagaatctggacggcaaacagacctcatgccaagatggcctcagccaggacctcaatgaggccgtccccgaaacggagcgcctggatagtaaagcattgaagaccagagcccagctgagtgtcaagaatcgacgacagagaccttctaggacgcgactatacgatagtgtgtcttctacagacggggaggattctctggaacgaaaaaattttacatttaacgacgatttcagcccgtcaagcacctcatccgccgacttgagcggactcggtgccgagcctaagactccaggcctctcacaatctctcgctctgtcctcagacgaatctcttgacatgatcgacgacgaaatactggacgacgggcagtcacctaaacactctcagtgtcaaaaccgggccgtccaggaatggagcgtgcagcaggtgagccactggctgatgtccctgaacctagaacaatacgtttcggagttctctgcacagaatataacgggggagcagctgctgcagctcgacggcaacaaactgaaggctttaggcatgactgcgtcccaagaccgggccgtggttaagaaaaaactcaaagagatgaaaatgtccctggagaaagcccgaaaggcccaggagaaaatggaaaaacagagagaaaagctccgaaggaaggagcaggagcagatgcagcgtaagagcaagaagaccgagaagatgacatctacaaccgctgaaggggctggagagcaatag

SEQ ID NO: 130734 - DNA, 222 bp, synthetic construct
  misc_feature 1..222: note = Description of Artificial Sequence: Synthetic coding sequence
  source 1..222: mol_type = other DNA
atgttgaagactgagagttccggagagcggaccacactgaggtctgcttcacctcaccgaaacgcttacaggaccgagtttcaggctctgaaaagcacatttgacaaaccaaagagtgatggcgaacagaagacaaaagaaggcgagggcagccagcagagccgcggaaggaagtatggatctaacgtcaatcgcatcaagaacctgtttatgcagatgtag

SEQ ID NO: 130735 - DNA, 126 bp, synthetic construct
  misc_feature 1..126: note = Description of Artificial Sequence: Synthetic coding sequence
  source 1..126: mol_type = other DNA
atgctgaagacggagtcttctggtgagcggacgactctgcgcagcgcctctccgcatcgtaacgcataccgcacagagttccaggcccttaagtccacattcgataaaccgaaaagcgacgggtag

SEQ ID NO: 130736 - DNA, 3297 bp, synthetic construct
  misc_feature 1..3297: note = Description of Artificial Sequence: Synthetic coding sequence
  source 1..3297: mol_type = other DNA
atgctgaagaccgaatcgagcggtgaacggaccaccctccggagcgccagcccacaccgtaacgcatataggaccgagtttcaagccctcaagtcaactttcgataaaccgaaatcagacggcgagcaaaaaactaaggagggggagggcagtcagcaatcccgcggtaggaaatacggatctaacgtgaaccgaattaagaatctgttcatgcaaatggggatggaacccaacgagaatgccgcggtcattgctaagactaggggcaagggaggacacagtagcccccaacgccgaatgaagccaaaggagtttctagaaaaaaccgatggtagcgtggttaagctcgagagcagtgtgtccgaacggatctcaaggttcgatacaatgtatgatgggccttcctacagcaaattcaccgagacaaggaaaatgttcgagcggagcgtacatgagagcgggcaaaataatagatattctccaaaaaaggagaaggctggggggtccgagccacaggacgaatggggcggctccaagtcaaacaggggctctacagattcccttgactctctttctagccggacagaggctgtcagccccaccgtgtcacagctgagcgctgtttttgagaatacagacagtccctccgcaataatctccgagaaggctgaaaataatgagtactccgtgacgggacattaccccctcaacctcccctccgtgactgtgactaacttagatacatttgggcacctgaaagattccaatagttggcccccgagcaataaacgcggcgttgacaccgaggatgcccacaaatcaaatgcaacaccggtgccagaggtcgctagtaaatctacgtccctagccagtattccgggggaagaaatacagcagagtaaggaacccgaggactctacgtccaatcagcaaacacctgactctatagacaaagacggtcctgaagaaccttgtgccgagagcaaggccatgcccaaatccgagatcccctcgcctcagagtcagctcctcgaggatgccgaggctaacctggtcgggagagaggctgcgaagcagcagcgaaaggagctcgctggcggagattttactagtcccgacgctagtgccagctcctgcggcaaggaggtacccgaagactctaataactttgatggttcccacgtttatatgcattccgattataatgtgtatagggtgcggagtcgctacaactctgactggggcgagacggggactgagcaagacgaagaggaggattccgatgagaatagttactatcaacccgatatggaatacagcgaaattgtcggtttacccgaggaggaagagatcccggcaaaccggaaaatcaagttctcctctgctccaataaaagtttttaacacctacagtaacgaggattatgataggcggaacgatgaggttgaccccgtggccgcttcagctgagtacgagttggagaaacgagtcgagaagctagagcttttccctgtagagttggaaaaagacgaagacggcctaggaatctctattatcgggatgggcgttggagccgacgctgggctggaaaagctgggaatcttcgtgaagaccgtgaccgaggggggtgcagcccagagggacggacgaattcaagttaacgaccagatcgtggaggtagacggcattagcctggtgggcgtgactcagaatttcgccgcaaccgtgctccggaacaccaaaggaaacgtcagattcgtaattggaagagagaaacctggacaagtgagcgaggttgctcagctaatctcccagacacttgaacaggagagaaggcagcgggaacttctcgagcagcactatgctcagtacgacgcggacgacgacgaaaccggggagtatgccacagatgaagaggaggatgaggtcggtccggttctcccaggctccgatatggccatcgaagtgtttgaattgccagaaaatgaggatatgttctctccttcggagctggataccagtaagctcagccataagttcaaggagctgcagattaagcatgctgtgaccgaggcagagattcagaaactgaagacgaaactccaagcagcggagaacgagaaggttcggtgggagttggaaaaaactcagttgcagcaaaatatcgaagaaaataaggaacggatgctgaagctcgaatcctactggatcgaggctcagaccctttgtcacacagtcaatgaacaccttaaagaaacccagtcccagtatcaggccttagagaagaaatacaacaaagcaaaaaaattgattaaagatttccagcagaaggaattagatttcattaagagacaggaagccgagcggaagaagatagaggacctggaaaaagctcaccttgtggaagttcagggacttcaagtgaggattcgcgaccttgaggccgaggtttttcgcctgctgaaacagaacgggacacaggtgaacaacaataacaatatcttcgagaggcggacttcactcggggaggtgagcaagggcgatacaatggagaatctcgacgggaaacaaaccagctgtcaggatgggctcagccaagacctaaatgaggccgtgcctgagaccgagagattggactccaaagcattgaagacgagggcgcagctttcagtgaagaatcggcgtcagaggccgtcccgtacacgcctgtacgacagtgtgagctcgactgacggggaggattccttggagcgcaagaacttcacattcaacgacgacttctctccaagtagcacctcttccgccgacctctccggcctgggagctgaacccaagacacctgggttatctcagagccttgccctctcgtccgatgagagccttgacatgatagacgacgagattttggacgatggacagtctcctaagcactcccagtgccaaaatagggccgtgcaggagtggtctgtccagcaagtaagtcactggcttatgtccttgaacttggagcaatacgtgtctgagttttccgcccagaacataacaggcgagcagctcctgcagctggatggtaacaaactaaaggcactgggaatgacagcctctcaggacagagctgttgtgaagaaaaaattgaaggaaatgaagatgtctctggaaaaggccagaaaagcccaggaaaaaatggagaaacagagggaaaaactgaggcggaaggaacaggaacagatgcagaggaaatctaagaagacggaaaaaatgacctctactaccgcagagggcgctggggaacagtag

SEQ ID NO: 130737 - DNA, 3762 bp, synthetic construct
  misc_feature 1..3762: note = Description of Artificial Sequence: Synthetic coding sequence
  source 1..3762: mol_type = other DNA
atgctcaagactgagtcttctggggagcggacaactttacggtcagcctcgccacacagaaacgcgtaccgaaccgagttccaggcactgaaaagcaccttcgacaagccaaaatctgacggagagcagaaaactaaggaaggcgaggggtcgcagcaaagcagaggccggaagtacggttcaaacgtgaatcgaataaagaatctgttcatgcagatgggcatggagcccaatgaaaacgccgcggtgattgccaagaccagaggcaagggtggccatagttcccctcaacgccggatgaagcctaaagaatttctcgaaaaaaccgacggaagcgtcgtgaagctggagagctcagtgagtgagaggatctctagattcgacacaatgtatgatggcccttcatattccaaatttacggagacacggaaaatgtttgaacgaagtgtgcacgagagcggtcagaataataggtacagccctaagaaagaaaaagccggcgggtctgaaccacaggatgaatggggagggtcgaaatctaatagaggcagcacggatagcctggactcgctcagttctagaacggaggccgtctctcctactgtgtcccaactgagtgcagtcttcgaaaatacggacagccccagtgccataatatcagagaaggcagagaataacgaatatagtgtgacgggccattacccacttaatctaccgagtgtgacagtaacaaacctggatactttcggccatctaaaagatagcaattcttggcccccttcaaacaagagaggcgtggacactgaagatgcccataaaagtaacgccacacccgtcccagaagtggcgagtaagtccacctcactggcttcaattcccggggaagagatacaacagtccaaggagcctgaggattctacatccaaccagcagactcccgattccatcgataaggacggccctgaagaaccctgcgcagaatccaaagcaatgcctaaaagtgaaattcctagccctcagagtcagctcctggaggatgccgaggcaaacttggtgggacgtgaggcagccaagcagcagagaaaggagctggctggcggggactttacctcccccgacgcatcagctagtagctgtgggaaagaggtccctgaagactccaacaactttgatgggtctcacgtgtacatgcatagcgattataacgtttacagagtgcgttctcgctataactctgattggggcgagactgggaccgagcaggacgaggaagaggacagcgatgaaaactcctattaccaacctgacatggagtattctgagatcgtgggattgccagaggaagaagagatcccagcgaaccgtaaaatcaagttctcctcagcgccaattaaggtctttaacacttactcaaatgaagattatgaccgaagaaatgatgaagtagatcctgtcgccgctagtgccgaatacgagctcgagaagcgcgtcgaaaaacttgagctttttcccgtggagctggaaaaagacgaggatgggctgggtattagcatcattggtatgggcgtgggagccgatgcaggcctcgagaagctcggtatttttgtcaaaacggtgaccgaaggcggagctgcccagagggacggcaggattcaggtcaatgatcaaatcgtagaggtggatggcatctctttggttggagtcacacagaactttgcagcaactgtgctgcggaatacgaaagggaatgtgagatttgttattggccgtgaaaagcccgggcaggtttcggaagtggcccagctgattagccaaactctggagcaggaacgacgccaaagagaactgttggagcaacactacgcacagtacgacgcagatgatgacgaaacaggagagtacgcgaccgatgaagaagaggatgaagtgggcccggtgctgcccgggtccgacatggctatcgaggtcttcgagctgcctgagaacgaggatatgttcagcccatcggagctggataccagtaagctttcacacaaatttaaagagctccagataaagcacgcagttactgaagctgaaatacagaaactcaagactaaactccaggccgccgaaaatgagaaggttaggtgggaactagaaaaaacgcagctccagcagaacatcgaggagaataaagaaaggatgttgaagctggaaagctactggattgaagctcagactctgtgccacacagtaaacgaacacctcaaagaaactcagtctcagtaccaagctcttgaaaagaagtacaacaaagcaaaaaaactcatcaaggacttccaacaaaaggaactcgactttatcaagcgtcaggaggccgagcggaaaaaaatcgaggaccttgaaaaggctcacttggtggaggtgcagggacttcaggtgcggattcgggatctggaggccgaagtgtttcggttgctgaagcagaatgggacacaagtgaacaataacaacaacatcttcgaaagacgcaccagtcttggcgaggtttctaaaggcgataccatggagaacctggacggcaagcaaacgtcttgtcaggacggccttagccaggacctgaatgaggcggtccctgagactgagcgactcgattccaaagccttaaaaactagagcacaacttagtgttaagaacaggcgacagcgaccctctcggactcgtttgtatgatagtgtgagttccactgatggcgaagatagcttagaacgcaagccaagtaactctttctacaatcacatgcacattacaaaattgctgccacctaagggcctgcggacgagttcacctgagtccgatagtggagtaccacctttaacacccgtggactcaaacgttcctttttcgtctgatcatatcgctgagtttcaggaagaacccctcgaccctgaaatgggcccattaagctccatgtggggggatacctcactgtttagcactagtaagagcgatcatgacgtcgaggaatccccctgtcatcaccaaactaccaataaaaagatcttaagggagaaggacgatgccaaagaccccaaatcactccgtgcgtcgtccagcctggctgtacagggtggaaagatcaagcggaagtttgtcgatctcggggcacccctcagaagaaatagttccaaaggtaaaaagtggaaggagaaggagaaggaggcaagtagattttcagctgggtcacgcattttccggggacgcctcgaaaattggaccccgaaaccatgcagcactgcccaaacgagcacacggtccccttgtatgccattcagctggttcaacgactcccggaagggaagctactccttccgcaatcttcctgctcccacgagctcccttcagcctagcccagaaaccttgattagtgataaaaagggttcaaagaactttactttcaatgatgatttttctccatctagtacaagctctgcagatttgtccgggctcggggccgagcctaagactcccggcctgtcccagagcttggcactgtcctccgacgaagccctgggcatgaccgcttcacaggaccgggccgtggtcaagaagaaattaaaggaaatgaaaatgtccctcgagaaagctcggaaggcccaggaaaagatggaaaagcagagagaaaagctgcgtaggaaggagcaggagcaaatgcagcgaaagtcgaaaaaaacagagaaaatgacatcaaccacggctgaaggagcaggtgagcagtag

SEQ ID NO: 130738 - DNA, 930 bp, synthetic construct
  misc_feature 1..930: note = Description of Artificial Sequence: Synthetic coding sequence
  source 1..930: mol_type = other DNA
atggatgagaaggtcttcacaaaagagctcgaccagtggatagaacaacttaacgagtgcaaacagctgtccgagtcacaggtgaagtcgctttgtgaaaaagctaaggaaattctgacaaaagagtcgaatgttcaggaggtcaggtgccctgtgactgtgtgcggtgatgtgcacggacaattccacgacctcatggagctttttagaataggaggcaaaagtccggatactaactacctgttcatgggcgactacgttgatcggggctattacagcgtggaaacagtcactctcctggtggcattgaaggtacgatacagagaacggataaccatcctccggggaaatcatgagagccggcagatcactcaggtctatggcttttatgatgaatgcttaaggaagtacggtaatgctaacgtctggaaatactttacagatctcttcgactacctgccactgactgccttagtggatggccagattttctgcctgcatggtgggttgtcaccatccattgataccttggaccatatccgtgcactggatagactgcaggaggtgcctcacgaaggccccatgtgcgacttgctgtggtcggacccagacgatcgtggcggttggggtatcagccccaggggcgcaggctacacattcggccaggatatctccgaaaccttcaaccacgccaatggactgaccctggtaagccgggcccatcaactggtaatggagggttacaattggtgccatgacagaaatgttgtgactatcttctctgcaccaaattactgttacaggtgcggcaaccaggccgctataatggaactcgacgataccctgaagtattcatttctgcagttcgaccccgctccccggaggggcgagccccacgtgacaagaaggacacccgattactttctctag

SEQ ID NO: 130739 - DNA, 1407 bp, synthetic construct
  misc_feature 1..1407: note = Description of Artificial Sequence: Synthetic coding sequence
  source 1..1407: mol_type = other DNA
atggcccctcccccagcccgagtccacttgggagctttcctggcagtcaccccaaatccaggctccgcagcttcaggaacagaggctgccgctgccaccccgagcaaggtgtggggatcttctgccggtcgcatcgagccccgcggcggcggcaggggcgccctaccaacctccatgggtcaacatgggccctccgctcgagccagagctgggcgggctcccgggcccaggccggcgcgagaagcttcccccagactaagagtgcacaaaacgttcaagttcgtggtggtcggagtcttactgcaggtggtcccatcgtctgcagcaacaattaaactgcatgatcagtccattggcacacaacagtgggagcatagcccactaggcgagctctgccctccaggcagtcaccgctccgagcacccaggtgcatgtaacagatgtacagaaggggtcggctacaccaatgcgagcaataacctctttgcttgcctcccctgcaccgcctgtaaaagtgacgaagaggagagatcaccatgcactacaactaggaatacagcctgccagtgtaaacccggcactttcaggaacgacaactccgcggaaatgtgtcggaagtgttcacgaggctgtcccaggggcatggtcaaagtgaaagactgtacaccctggtcagacatagaatgcgtccataaagagtccggcaacggccacaatatttgggtcatactcgtagtaacactcgttgtaccactgttactggtggcagtgctgatcgtctgttgctgcattggcagcgggtgcggcggtgaccccaagtgtatggatagggtttgcttctggcggttagggctgctcagggggcctggcgcagaggataacgcccataacgaaatcctgtctaatgctgattcattgtccacattcgtcagcgagcagcagatggagtcccaggagcccgctgatctcactggggtgaccgtgcagagccctggagaggcacaatgtctgcttggccctgcggaagcagagggatctcagaggaggcggttgctcgtccctgctaatggcgctgatccaaccgagacactgatgctgttctttgataagtttgctaacattgtgccatttgattcctgggaccagctgatgcgacagttggatctgacgaaaaatgaaatagacgtggttagagcgggtactgcaggccccggagacgccctctacgccatgctgatgaagtgggttaataagacaggtcgtaacgcctcaattcacaccctgcttgacgcactggagcggatggaagagcggcatgccagggagaagatacaggatctcttagtagacagcggtaaatttatttatctcgaagacgggactggctctgccgtgagccttgaatag

SEQ ID NO: 130740 - DNA, 930 bp, synthetic construct
  misc_feature 1..930: note = Description of Artificial Sequence: Synthetic coding sequence
  source 1..930: mol_type = other DNA
atggacgataaggcgttcacaaaagaattggaccagtgggtggaacagctcaatgaatgcaagcagctgaacgagaaccaggtccggacactttgtgagaaagccaaggaaatcttgactaaggagtccaatgtgcaggaggtcaggtgcccagttactgtgtgtggcgacgtacatgggcaattccacgacctcatggaacttttccgtattggagggaagtctccggacacgaactacctgtttatgggtgactacgtggatcggggctactattctgtcgagaccgtaacactgctggtagcactgaaagtccgatatcctgagcgcataacaattctgagaggcaatcatgaaagccgccagatcactcaggtgtacggcttctacgacgaatgcctgcggaaatacggtaacgctaacgtgtggaagtatttcactgacctctttgattacctcccacttaccgcattggtggacggacagattttctgcctccatggaggcctttccccatctatagatactttagatcatatccgcgctctggacaggctgcaggaggttccgcacgaggggcctatgtgcgatctgctgtggtccgatccagatgacagaggaggatggggcatcagcccaaggggcgcaggatacacattcggccaagatatttcagaaaccttcaatcacgctaatggcctgaccctggtttcacgggcccaccaactcgtgatggaggggtacaactggtgtcatgatagaaacgtagtgaccatttttagtgcacccaactattgttatagatgtgggaaccaggcggctatcatggagctggatgacaccctgaagtactcatttcttcagttcgaccccgctccgagaaggggcgaacctcacgtaacccgccggaccccggactacttcctgtag

SEQ ID NO: 130741 - DNA, 1461 bp, synthetic construct
  misc_feature 1..1461: note = Description of Artificial Sequence: Synthetic coding sequence
  source 1..1461: mol_type = other DNA
atgtcttctagcagcccgcccgccggagcagcatccgcggccatttcagccagcgagaaagtggacggctttaccagaaaaagtgtgcgcaaggcgcagagacagaagcggtcccaaggatcctcgcagtttaggtctcagggaagtcaggcagaactgcatccgctcccacaactcaaagatgccaccagtaatgagcagcaagaactgttttgccaaaaactgcaacagtgttgcatattgttcgacttcatggactcagtgagcgatctgaagagtaaggaaatcaagcgggcaacactcaacgaactcgttgagtacgtttcaaccaatcggggagtcattgttgagtcggcgtacagcgacatcgtcaaaatgatttccgcgaacatcttcaggacactgcccccgagtgacaatcccgacttcgaccccgaggaagatgaaccaactctggaggctagctggccccacattcagctggtgtacgaattcttcttaagattcctcgagtcccccgatttccagccgagcatcgcaaaacgatacatagatcagaaatttgtgcagcagctgttggaattgtttgactccgaggacccccgcgaaagagacttcctgaaaaccgtgcttcacagaatctatggtaagtttctaggcctgagggccttcatcaggaaacagatcaacaacatctttctcaggtttatctatgaaaccgaacacttcaatggtgtggctgaactgcttgaaattttaggaagcattattaatggctttgcactgccactgaaagccgagcacaagcaattcttaatgaaggtgctgatccccatgcacacagccaaaggattagcactgtttcatgcacagttagcttattgtgtagtgcagttcttagaaaaagacaccaccttgactgaacctgtcatccggggcctgttaaaattctggcccaaaacctgctcccaaaaggaggtcatgttcctcggggagatcgaggaaatcttggatgtaatcgagccaacacaattcaagaagatagaggagcctttattcaaacaaatctccaagtgcgtgagtagttctcattttcaggtggcggagcgcgccctgtacttttggaataatgaatacattctaagcttgattgaagaaaacatcgataagattttaccaatcatgtttgcatccttgtacaagatatctaaggaacattggaaccccacaattgtcgcgcttgtctataatgtcctgaaaacgttaatggaaatgaacgggaagctctttgatgacctgacttcctcctacaaggcagaacgccaacgcgagaagaaaaaagagctggagcgggaagagctttggaaaaagctggaggaactgaagttgaaaaaggctctggaaaagcagaatagcgcctataatatgcactcgatcctgtcaaatactagcgcagaatag

SEQ ID NO: 130742 - DNA, 1290 bp, synthetic construct
  misc_feature 1..1290: note = Description of Artificial Sequence: Synthetic coding sequence
  source 1..1290: mol_type = other DNA
atgatcatgaacgcaacctccaacgagcaacaggaactgttctgtcagaagctgcaacagtgctgcatattgtttgatttcatggatagcgtgtctgatctgaaatctaaagaaattaaacgcgccaccctgaatgaactcgttgagtacgtcagcactaaccggggcgtaatcgtcgaatccgcgtactctgacatcgttaaaatgatctctgcaaacatttttcgaacgctgcctccatccgacaacccagatttcgatccagaagaggatgaacccactctggaggcatcttggccccacatccagctcgtctatgaattttttctgaggttcctggagtcaccagactttcaaccatctattgccaaacgctacatcgaccaaaaattcgtgcaacagttactggagctgttcgatagtgaggatcccagagagagggacttcctcaaaaccgtgctgcaccgtatttacggtaagtttctgggcctgagggcctttataaggaagcaaattaacaacatctttcttcgcttcatttatgaaactgagcatttcaatggagtagctgagctgctcgagatcttaggttccatcatcaacggcttcgcgctgcccctgaaggccgagcacaaacaattcctaatgaaagtcctcattcctatgcatacagccaagggtctcgccctgtttcacgctcagctggcatactgcgtagtccagtttctggagaaagataccacattaactgaacctgttatccgggggctccttaagttttggccgaagacctgctcgcagaaggaggtcatgtttctaggagagattgaggaaatcctagatgtgattgagcccactcagttcaaaaagatcgaggagcccttatttaaacagatctccaaatgtgtgagctcttcgcatttccaggtcgccgagcgagctttgtacttctggaataacgagtatatcctcagcttaatagaagagaatatcgataaaatcttgcccattatgtttgcaagcctgtataagatatcaaaggagcattggaatccaacaattgtagccctggtgtataacgtgctgaagaccttaatggagatgaatggaaagctattcgacgatcttacaagctcctacaaagccgaacgtcagagagagaagaaaaaagagctggagcgggaggagctctggaagaagttagaagaacttaaactgaagaaagccttggagaagcaaaactccgcatataatatgcacagtatcctcagtaacacctctgccgagtag

SEQ ID NO: 130743 - DNA, 1461 bp, synthetic construct
  misc_feature 1..1461: note = Description of Artificial Sequence: Synthetic coding sequence
  source 1..1461: mol_type = other DNA
atgtctagcagtagtcctccagctggcgccgcaagcgctgctatttccgcctcagaaaaagtggacggattcaccagaaaatctgtccggaaagcccaacggcagaaacggtcacagggctcgtcacagttccgctcccaaggatcacaagctgaactgcatccactcccacagcttaaggacgctacttctaacgaacagcaagagctcttctgtcaaaaactccagcagtgttgtatcctgtttgactttatggattcagtgtccgacctcaagagtaaggagatcaagcgcgctacactgaacgaactcgtggagtacgtgtctacaaatcgcggcgtcatcgtggaatccgcctatagtgatattgtgaaaatgatctccgctaatatcttccgcaccttaccgccgagtgacaacccagatttcgaccctgaggaggatgagcctacactggaagcatcctggccgcatattcaactcgtctacgagttctttcttcggtttttggagtcacctgattttcaaccatccattgcaaagagatacatagaccaaaaatttgtccagcagctgctcgagctgttcgatagtgaggacccacgtgagcgggatttcctgaagacggtgttgcacaggatctacggcaaatttcttggcttgcgtgccttcattcgcaagcagatcaacaatatttttctacgatttatctatgagacagaacattttaacggcgtcgctgaacttttggagattcttggctccatcatcaacggttttgcactcccacttaaggctgaacacaaacagtttctgatgaaagtactgatacctatgcatacagccaagggtctagccctgtttcatgctcaattagcctactgtgtggtccaatttcttgaaaaagacacgaccctcactgaaccggtaatccgtggccttctcaagttttggcccaaaacctgctctcagaaggaggttatgttccttggggagatcgaagagattctcgacgtgattgagcccacgcagttcaagaaaatcgaggagcccctgttcaaacagatctctaaatgcgtgtccagctcacattttcaggtagctgagagagccctgtatttttggaataacgagtatattctgagccttatcgaggaaaacattgataagatcctgccaattatgttcgcatctctctacaagatctctaaagaacattggaatcccactatcgtagcactcgtatacaatgtgctcaagaccctcatggagatgaatggaaagttattcgacgatctaacttcatcctataaggcagaacggcagcgggaaaagaaaaaggagttagagcgtgaagaactgtggaagaaacttgaggagctgaaattaaagaaagcgcttgagaaacagaactccgcctacaacatgcatagtattttgagcaatacttcggccgagtag

SEQ ID NO: 130744 - DNA, 1341 bp, synthetic construct
  misc_feature 1..1341: note = Description of Artificial Sequence: Synthetic coding sequence
  source 1..1341: mol_type = other DNA
atgaagtgcttctcccgctacctgccatacatctttaggccacctaacactattttgagcagttcttgtcacacggaggctgatattattagcacggtggagttcaaccatactggtgaattgctggctacgggggacaaaggaggacgggtcgtgattttccagcgcgagcaggagtcgaagaaccaggtgcataggaggggcgagtacaatgtctactctaccttccagtctcatgaaccagagttcgactacctcaagtctctggaaattgaagagaagatcaacaagatccggtggcttcctcagcaaaacgccgcgtatttcctactgtctaccaatgataagaccgtcaaactctggaaggtgtccgagcgcgataaacggccagagggttataaccttaaagatgaagaggggaggctgagagacccggccacgattaccacgctgagagttccagtactgaggccaatggatctcatggtggaggcaacaccaagacgagtgtttgctaacgctcatacctaccacattaacagcatctccgtgaattctgattatgagacctacatgtcggccgacgacctgagaattaatctgtggaatttcgaaatcactaatcagtcatttaacatagtggacattaaacctgctaatatggaggagttaactgaggtgattactgcagccgaatttcatccgcaccactgcaacacatttgtgtacagctctagtaagggaacaatcaggttgtgtgacatgcgcgctagtgccctttgtgatcggcacaccaaattttttgaagagccagaggatccaagcaaccgcagctttttttcagagattatctcaagtatcagcgacgttaagtttagccactctgggaggtacataatgacgcgcgattatctgacagtcaaggtttgggatcttaacatggagaatcggcctatcgagacctaccaggtacatgattacctgaggtctaaactgtgtagcttgtacgagaacgactgtatttttgacaagtttgaatgcgtgtggaacggcagcgactctgtgataatgaccgggtcctacaacaacttcttcagaatgtttgacaggaataccaagagggatgttaccctcgaggcatctcgcgaaaactctaagccacgcgccatcctgaagcctcgcaaggtgtgtgtaggagggaaaaggcgaaaggatgagatcagtgttgattctttggattttagcaagaaaatcctacacaccgcctggcacccaagtgaaaatatcattgcggtggccgccaccaacaacttatatatcttccaagacaaggtcaactag

SEQ ID NO: 130745 - DNA, 1332 bp, synthetic construct
  misc_feature 1..1332: note = Description of Artificial Sequence: Synthetic coding sequence
  source 1..1332: mol_type = other DNA
atggaagaagatatagatacccggaagattaacaattcttttttgagggatcacagttacgctaccgaggcagatattatctcgacagtcgaatttaaccacacgggcgaactgctggctaccggggacaaggggggccgagtggtgatcttccagagggagcaagaaagtaaaaaccaggtccaccgtagaggcgagtataacgtttacagcacattccagtcacacgagcctgagttcgactacttgaaaagcctggaaattgaggagaagataaataaaatacgctggctgccgcaacagaatgcagcgtattttttactcagcaccaatgataaaactgtgaagctatggaaagtaagtgagagagataaaagaccagagggctataacttgaaagatgaggaagggaggctgcgggatccggccacgattacaacgctaagggtgcctgtcctgagacctatggacctcatggtcgaagctactcccagaagggtgttcgccaacgcgcacacctatcacatcaattctatcagtgtgaactctgactatgaaacttatatgtctgcagatgacctaaggattaatctttggaacttcgaaataactaatcagtcgttcaacatcgtggacattaaacccgctaatatggaggaactgaccgaagtgatcacagctgcagaatttcacccacatcactgcaataccttcgtatactcctcttcaaaagggacaataagactctgcgacatgcgcgctagcgcactgtgtgatcgccatactaagttcttcgaggagcctgaagatcccagcaacagatccttctttagtgagatcatatcaagcatatccgacgtcaagttcagtcatagcggcagatacattatgacacgagactacttaacagtgaaagtgtgggacctgaatatggaaaacagaccaatcgagacgtaccaggtgcatgattatctcaggtctaagctgtgttcactctacgaaaatgactgtatcttcgacaagtttgaatgtgtttggaacgggtctgactccgtgattatgactggctcttacaataatttctttagaatgttcgaccggaacacgaagagagacgtcactctcgaggcatctcgagagaactccaagcctagagctatccttaagccaagaaaagtttgcgttggagggaaacgccgcaaggacgaaatttctgtcgactccctcgatttttcaaaaaagattctccacaccgcgtggcatccatctgagaatataatagcagtggcagctactaataacctatatatcttccaggataaggttaactag

SEQ ID NO: 130746 - DNA, 1506 bp, synthetic construct
  misc_feature 1..1506: note = Description of Artificial Sequence: Synthetic coding sequence
  source 1..1506: mol_type = other DNA
atggtgctgcagccttcagaaagacattacagggattggaaccatagacgcctggggccatggtgtagtccaacagggtctcctgcccccctctcttgcgaaaccgggtgcggggagggttcttggatcctggtttgcagacttctggtgccgacccaggtttccctgctgtctatggaggaggacattgacacaaggaagatcaataatagttttttaagggaccactcctacgccaccgaagctgatatcataagcaccgttgaatttaatcatactggcgaactgctggctactggagacaagggaggacgggtcgtgatctttcaacgggagcaagagtcaaaaaaccaggttcaccgtaggggtgagtacaacgtctactccacatttcagtcccacgaacccgaattcgattaccttaagtctctagaaattgaggaaaaaataaacaaaattcggtggctacctcaacaaaacgccgcttactttctgctgtctacaaatgacaagactgtgaagctttggaaagtctcagagcgggataagaggcctgaaggatacaatctcaaagatgaagagggtcggcttagagatcctgcgaccataactacgttaagagtccctgtccttcggccaatggatctgatggtggaagcgactcctaggcgcgtgtttgcaaacgctcatacataccatatcaattctatttccgttaatagcgactacgagacttatatgtctgccgacgacctgaggattaatctatggaacttcgaaatcacaaatcagtccttcaacatagtggacatcaagcccgcaaacatggaggagctgactgaggtaattaccgccgcagagtttcacccacaccactgcaatactttcgtttacagctcctccaaaggcaccattcgcctgtgcgacatgcgcgcaagcgcgctctgcgacagacacactaagttctttgaggagccggaggacccgagtaatagatccttttttagcgagatcatttctagcatctctgacgtcaagttctctcactcaggccgatatatcatgacacgggactatctcactgtcaaggtgtgggatttgaacatggaaaacagacctatcgaaacctaccaggtccacgactatttgaggtcaaagctgtgctctctttacgaaaacgattgcatcttcgacaagtttgaatgcgtttggaatggctctgactcggttataatgacaggctcttacaacaattttttcagaatgttcgaccgaaatactaaaagagatgtcaccttggaagcctcgagggagaatagcaagccacgggctatactaaagccacgcaaagtgtgtgtgggtggaaaaagaaggaaagatgaaatttccgtcgactctttagacttcagcaaaaaaattctgcatacagcttggcaccctagcgagaatataattgccgtggccgcaactaacaatttatatatctttcaggacaaggtgaattag

SEQ ID NO: 130747 - DNA, 1299 bp, synthetic construct
  misc_feature 1..1299: note = Description of Artificial Sequence: Synthetic coding sequence
  source 1..1299: mol_type = other DNA
atgaattatcccgatgaaaatacatacggaaataaagctgatataatcagcacagttgaatttaatcacacgggtgaactgctagccactggggataaaggaggcagagtggtgattttccagcgggaacaagaaagcaaaaaccaggtgcatagaaggggggagtataatgtgtactccactttccaaagtcatgagcctgaatttgattacctgaaaagcctcgagattgaagagaaaattaataaaatacgctggctgccacaacagaacgccgcttattttcttctgtccacaaacgataaaacagtcaagttatggaaagtgtctgaacgcgataagagacctgaggggtacaatttaaaagacgaagaagggaggctgagggaccccgcgaccattaccacactgagggtgcctgtgttacggcccatggaccttatggtggaagctacccctcgccgcgtgtttgcaaacgcccacacctaccacattaattccatctctgtgaacagtgactacgagacttatatgtccgctgacgatctccgcattaatttatggaatttcgagattacgaatcagtcttttaatatcgtggacattaagccagctaacatggaggagttaactgaagtgattaccgccgctgaatttcacccacatcactgcaatacattcgtgtatagcagtagcaagggcaccattcgcttgtgtgacatgcgagctagcgcactttgcgatcgccacacaaagttctttgaggagcccgaggacccaagcaacaggtcctttttcagtgagataatttcctctatttccgatgtcaagtttagccattctggccggtatatcatgactcgtgactaccttactgtcaaagtgtgggacctcaatatggagaatagaccaatagaaacatatcaagtacatgattatctgcgatctaaactctgttctctttatgaaaatgattgcatttttgacaagtttgagtgcgtgtggaatgggtcagatagtgttattatgactggcagttacaacaattttttcagaatgttcgaccggaatacaaaacgcgacgttacattggaggcctcccgagagaatagcaagccccgagctatcctgaagccccgcaaagtgtgtgtgggaggtaaacggcgtaaggacgagatcagcgtcgattcactggacttttctaaaaaaattcttcacaccgcatggcatcctagtgagaatataatagctgtggcagcaaccaataatctgtacatcttccaagataaagttaactag

SEQ ID NO: 130748 - DNA, 1332 bp, synthetic construct
  misc_feature 1..1332: note = Description of Artificial Sequence: Synthetic coding sequence
  source 1..1332: mol_type = other DNA
atggaagaggatattgacactaggaaaattaataactcatttctcagagatcacagttacgcaactgaggctgacatcatttctacagtcgagttcaaccacactggagaactgctcgcaaccggtgacaagggcggccgggtcgttatcttccagcgggagcaggaaagcaagaaccaggtccacaggaggggtgagtataacgtctattcgacctttcaaagtcatgagcccgagttcgactacctgaagtcactcgagatcgaggaaaagatcaacaaaataaggtggctacctcagcaaaacgctgcatactttctgctgagcaccaacgataaaaccgttaagctatggaaagtctccgaaagagacaagagacccgaggggtataatttgaaagacgaggagggccggctccgggatccggcaacgatcacgactctgcgcgtccccgttctgcgaccgatggacttgatggtggaggcgacgccccgcagggtgtttgctaacgcccatacctaccatataaactctatcagtgtgaatagtgactacgagacctacatgtctgcagacgatctgcgcatcaatctgtggaatttcgagatcaccaaccagtccttcaacatcgtagatatcaagcccgcaaatatggaggagttgactgaagtcatcacagccgccgagttccatccacaccactgtaatactttcgtgtactcctctagcaaagggactatacgcctctgcgacatgcgcgccagtgccctttgtgatcgtcacacgaagttctttgaggaacccgaagatccttccaaccgctctttcttcagcgagatcatcagcagcatatcggacgtcaagttctctcatagtggaagatacatcatgaccagggactacttaaccgtcaaagtttgggatttaaacatggagaataggccgatcgagacctaccaagtccatgactatctgcgcagcaagctctgttctttatacgaaaacgattgtattttcgacaaatttgagtgcgtttggaacggctcggattctgtgatcatgaccgggagctataacaacttctttcgcatgttcgacaggaatacaaaaagagacgtgacacttgaggcatcacgtgagaactcaaagcctcgagcaatcctgaagccgcgtaaggtatgcgtgggtggtaagagacgaaaggacgagatcagcgtggacagcctagacttctctaagaagattctgcacacggcgtggcacccctccgagaacataattgctgtggcagctacaaacaatctctacatctttcaggacaaggtcaactag

SEQ ID NO: 130749 - DNA, 1332 bp, synthetic construct
  misc_feature 1..1332: note = Description of Artificial Sequence: Synthetic coding sequence
  source 1..1332: mol_type = other DNA
atggaagaggacatcgacacgcgcaagattaacaacagctttctgcgcgaccatagctatgcaaccgaggctgatatcatctcgactgtggaatttaaccatactggggagttactggccaccggagataaaggcgggagagttgtcatcttccaacgggagcaggagagcaagaatcaggtgcaccggagaggcgagtacaacgtatattccacttttcagagccatgagcccgagttcgactacctaaagtccctcgagatcgaggagaaaataaataaaatccgctggctgccgcagcagaacgcagcatactttctgctgagtaccaatgacaaaactgtaaagctctggaaagtatctgaaagggataaacgcccggagggatacaatctaaaggacgaggagggtcgactgagggaccctgccaccataactacgcttagggtacctgtcctgagacctatggatctaatggtcgaagcaactcctcgacgtgtctttgcaaacgcccacacctaccacataaattccatttcagttaactctgattatgagacctacatgtccgcagacgaccttcggatcaatttatggaacttcgagatcacaaaccagtctttcaacatcgtggacataaagcctgccaacatggaggagctgaccgaagtaatcaccgccgccgagtttcaccctcaccactgcaatacgttcgtgtactctagctctaaaggcaccatccgcctgtgtgacatgcgggcctctgcattgtgtgacaggcacacaaaattctttgaggaacccgaagatccatctaataggagcttcttttcagagatcatctcatccatctctgacgtgaagttttcgcacagtggcaggtacatcatgacgagagactacctaaccgtgaaagtttgggacctgaatatggagaaccgacctattgaaacatatcaggtccacgattatctccggtctaagctgtgcagtttgtatgagaacgactgtattttcgacaagtttgagtgtgtgtggaacggtagcgactcagtgatcatgacgggcagctataacaacttctttcgcatgtttgatcggaataccaagagagacgtcacactggaggcctctagggagaatagcaagcccagagctatactgaagcctaggaaagtttgcgttggcggcaagcgccggaaggacgagatctcagtggatagtctggatttctcgaagaagatcctgcacaccgcctggcacccatctgaaaatattatcgctgtcgcggcaactaataacttgtatattttccaagataaagtgaactag

SEQ ID NO: 130750 - DNA, 1530 bp, synthetic construct
  misc_feature 1..1530: note = Description of Artificial Sequence: Synthetic coding sequence
  source 1..1530: mol_type = other DNA
atgttactgtctttgcccgctctgcacctacagacttcggaacaccacccattctttcagttaccacatcggcgcctgggtccctggtgtagccccaccggcagcccagccccactgtcttgtgaaactggctgcggcgagggttcttggattctggtgtgtaggttgctcgtacctactcaggtcagcctcctgagcatggaggaagatatcgacacccgaaagataaacaattctttcctgagggaccatagttatgcaaccgaagccgatattatttctaccgtcgaatttaaccatacaggggagttgctagccacaggagacaaagggggtagggtagtgatctttcaaagagaacaggaatcaaaaaatcaggtacacagacggggggaatacaacgtttacagcacttttcaatctcatgagccagaattcgactacttaaagtccctcgaaatagaggagaaaataaacaaaatacggtggctgccccaacagaatgctgcctacttcctactctcaacgaatgataagacagtgaaactctggaaggtgagtgaaagggacaagcgtccagaaggttataatcttaaggacgaagagggccgcctccgagaccccgccacgatcactaccctgagagtcccggtactccggcctatggacctgatggtcgaggccacgccacgaagggtgttcgcgaatgctcacacataccatattaactcgatcagcgtcaatagcgattacgaaacctacatgagcgcagatgaccttcgcattaatctctggaatttcgaaataaccaaccagagcttcaatattgtggacataaaacccgctaacatggaagagctgaccgaagtgattactgccgctgagtttcacccacaccactgcaatacattcgtgtatagctcctcaaagggaaccattagactttgcgacatgcgagcttctgcattgtgcgatcggcatactaaattcttcgaggagcctgaggatccgtccaaccggagcttctttagcgagatcatttctagtattagcgatgtcaaattctctcatagcggacgatacatcatgacaagggattacctgactgttaaggtatgggacctgaacatggaaaatcgccccatcgagacatatcaggttcacgattacctgcggtccaagctctgctctctgtacgagaacgactgtattttcgacaagttcgaatgcgtttggaacggatctgattccgtcattatgacaggcagttacaacaacttcttcaggatgtttgatcggaacactaagcgcgacgtgacgctcgaggcctcccgcgaaaactcaaagccaagggccatcctgaagcctagaaaagtctgcgttggcgggaagcgccgcaaagatgagatcagcgtcgactccctcgacttctctaagaaaatattacacacggcttggcacccatcagagaatatcatcgcagtggcagcaactaataacttatacatatttcaggacaaggtgaactag

SEQ ID NO: 130751 - DNA, 1332 bp, synthetic construct
  misc_feature 1..1332: note = Description of Artificial Sequence: Synthetic coding sequence
  source 1..1332: mol_type = other DNA
atggaggaggatatcgatacaagaaaaatcaataacagttttttgagagaccactcatatgctacggaagcggatattatttccaccgttgagtttaatcatacaggagagctcttagcaacaggagataaaggcgggcgcgtagttatttttcagcgggaacaggagtccaaaaatcaggtccataggcggggcgaatacaacgtatactctacctttcagagtcatgagcccgagttcgattacctgaagagtctggaaatcgaagagaagatcaacaaaatccgttggctcccacagcaaaacgccgcttactttctactgtccacaaacgacaaaacagtcaagctctggaaggtgagcgagagggacaaacgtcctgaaggttacaatttaaaggacgaggaaggaaggctgcgtgatcccgctaccatcaccaccctgagggtgcccgtgctgagacccatggacctgatggttgaagctaccccccggcgagtgttcgcaaatgcccatacctatcacatcaactcaatatcggtaaatagtgactacgagacctatatgtctgctgatgatctgcgcataaatctgtggaatttcgagattactaatcagtcctttaatatagtggatatcaaaccggctaacatggaagaactcacggaagtcataacagccgcggagtttcacccccatcactgtaacacattcgtgtacagctcctccaaaggaactataagattatgtgatatgcgcgcttctgctctgtgcgatcgacatactaaatttttcgaggaacctgaggacccatccaaccggagtttctttagtgagataatttcatcaatctccgatgtgaaattcagccacagtggtagatatatcatgactcgcgactaccttaccgtgaaggtgtgggatctgaacatggaaaaccgtccaatcgagacatatcaggtgcatgactacctacggtctaaactctgtagcttgtacgaaaacgattgcatctttgataaatttgagtgcgtgtggaatgggtccgattcagtaattatgaccgggtcgtataacaactttttccggatgtttgacagaaataccaagagggacgtgacccttgaggcgtctagggagaacagcaagcctcgcgccatcctgaagccgcgaaaggtttgcgtgggaggtaaaagacgcaaggacgagatctctgtcgacagcttggatttttccaaaaaaatacttcacaccgcctggcatccgtctgagaatatcatcgccgtggccgcaaccaataatctgtatatattccaggacaaggtcaactag

SEQ ID NO: 130752 - DNA, 1350 bp, synthetic construct
  misc_feature 1..1350: note = Description of Artificial Sequence: Synthetic coding sequence
  source 1..1350: mol_type = other DNA
atgattcccgggatcgggaccctcactcaggatacactctggtgtttcagccaggtgaaggggactatcgagatcggaacgaccgaagcagacatcatttcaacagtagagtttaaccacacaggtgaacttctcgcgacgggcgataaggggggtcgcgtggtgatttttcagcgggaacaggaaagcaagaatcaagtgcacagaagaggcgagtacaatgtttactccaccttccagtcgcacgaacccgaatttgattacctgaagtcactggagattgaggaaaaaataaataagatacgctggttgccccaacaaaatgccgcctacttcctcctgtcaacaaacgataaaacagtgaaactgtggaaggttagcgagagggacaagcgaccggaaggatacaatctgaaagacgaggagggaagacttcgtgatcctgccacgataacgaccctgagagtgccggtgcttcgtccaatggatcttatggtcgaggcaactcctcgtcgcgtctttgctaatgcccacacctatcacataaattctatttctgtcaatagcgattacgagacttacatgtctgctgatgatctccgaattaatttgtggaacttcgagatcacgaatcagtccttcaacatcgtcgacataaaacccgccaatatggaggaattaacagaagtgatcacagccgccgaatttcacccccatcattgtaatacctttgtgtatagctcgtcaaaaggaaccatccggctctgcgacatgagggcttctgctttgtgtgacagacacactaagttcttcgaagaacctgaggacccatccaacaggtcctttttcagcgagataataagcagcatctcagatgtgaagttttctcattccggcagatacatcatgacacgagattacctcacagtcaaagtctgggatcttaatatggagaaccgacccatcgaaacgtaccaggtgcacgactacctccgctcgaagttgtgctccttgtatgagaatgactgcatcttcgacaagttcgagtgcgtgtggaacggctcagattctgtgatcatgactggctcctataacaacttcttcaggatgttcgacagaaatacaaagcgagacgttacgctggaggcgtccagggagaatagtaaaccgagagccatccttaagccccggaaagtgtgtgtgggtggaaaacgccgaaaggacgagatatccgtggattcattggactttagcaaaaagatcctccataccgcatggcacccctctgaaaacattattgccgttgcagcaaccaataacctctacattttccaagataaggtgaattag

SEQ ID NO: 130753 - DNA, 1299 bp, synthetic construct
  misc_feature 1..1299: note = Description of Artificial Sequence: Synthetic coding sequence
  source 1..1299: mol_type = other DNA
atgaattaccccgacgaaaatacatacggcaacaaagccgacattatcagtaccgttgagtttaatcatactggtgagctcctggctaccggtgataagggaggaagagttgtgatttttcagagggagcaggagtcgaagaaccaggtgcaccgcagaggagaatacaacgtgtactctacattccagtctcacgaaccagaattcgattatcttaagagcctcgagatcgaagagaaaatcaacaagatccgttggctgcctcaacagaacgcggcctatttcttgctcagtaccaatgataagaccgttaagctttggaaggtgtctgaacgggacaagcggcctgagggctacaatctcaaggatgaggaggggcgcctcagggacccagcaaccatcaccacactgcgcgtgcccgttctcagaccaatggacttgatggtagaagctacgcctagaagggtttttgcaaatgcacatacatatcacatcaactctatatctgtgaacagcgactatgagacctatatgagcgccgacgatcttcgaatcaatttgtggaacttcgaaatcaccaaccagagcttcaacatcgtcgacattaaaccagccaacatggaggagctcaccgaagtgattactgcagcagagtttcatcctcatcactgtaacacttttgtgtacagtagcagcaagggaacaatcaggctttgtgacatgagagcctcagccctttgtgaccgacataccaaattctttgaggagcccgaagaccccagtaataggtcatttttttccgaaatcatctcttctatctccgacgtcaaatttagccattctggtagatacatcatgaccagggactatctcacagtcaaggtctgggacctaaacatggagaatcggccaatagagacctaccaggtgcacgactacctgaggtccaagctgtgttcactatatgagaacgactgcatctttgataagtttgagtgtgtctggaacggctcagactccgtcatcatgaccggatcatataataacttctttcgtatgttcgaccggaacacgaagcgagatgtcacactcgaggcctctagagagaatagtaaacccagagctattctgaagcctaggaaggtgtgcgtgggtgggaagcggaggaaagacgaaatttcagtcgacagtctcgacttcagcaagaagatcctccacacagcttggcacccatctgaaaatataatcgccgtggcagctaccaataatctctatatcttccaggataaggttaattag

SEQ ID NO: 130754 - DNA, 1494 bp, synthetic construct
  misc_feature 1..1494: note = Description of Artificial Sequence: Synthetic coding sequence
  source 1..1494: mol_type = other DNA
atggagaccaagctccctccagcatctacccccacctcccccagctctcctgggctgagcccagtgcctcctccggataaggtggatggattcagccgtcggagtctgcgtcgcgctagaccccgaaggagccactcctcaagccagtttcgctatcagtccaatcaacaagaactgactccgttgcctcttctgaaggacgtgcccgcaagcgaacttcacgagctgctgtcacgcaaactggcacagtgcggcgtgatgttcgactttttagattgcgttgcagatctcaagggcaaagaagtgaagcgagccgctctgaatgaactggtggaatgcgttggcagtaccagaggagtacttattgagcccgtgtatcctgacattatccgaatgatctcagtgaacatatttcggaccttgccaccctccgagaacccagaattcgaccccgaagaggatgagccaaacctcgagcctagctggccgcatctccagctggtgtacgagttcttcctccgcttcctcgaatccccagacttccaaccttcagttgcaaaaaggtacgtggaccaaaagttcgtcctcatgctgctggagctgtttgactcggaggacccccgcgagagagaatacctaaaaacaatcctgcatagggtgtatggcaaatttctaggattgcgggcttatataagaaagcagtgtaatcacatttttttgaggttcatctatgaatttgaacactttaatggggtcgcggagctgctggaaatcttaggctccatcatcaacggatttgccctccctctgaagacggagcacaagcagtttctggtaagggtactgattcccctgcatagcgtgaaatcactaagcgtatttcacgcccaactcgcctactgcgtggtgcaattcttggaaaaagatgccacccttacggagcatgtgattcggggattattgaaatactggcccaagacctgcacacaaaaggaagtcatgttcctaggggaaatggaagaaatactcgacgtgattgagccatcacagttcgtaaagatacaggaaccgctgtttaaacaggtggcacgatgtgtctccagcccccacttccaggtagctgagagagccttatatttttggaataatgagtacatattgtccctgattgaagataattgccacaccgtactgcctgcagtttttgggaccctataccaagtttctaaagaacattggaatcagaccatcgtcagcctcatctataacgtccttaagacttttatggagatgaatgggaagctgtttgatgaactgaccgcttcatataaactcgagaaacagcaagagcagcagaaagcacaggagcggcaggaactttggcagggccttgaagaactgcgtctccgcagactccagggcacacagggagctaaagaggcgcctttgcaaagactgacaccgcaggtggcagcaagcggaggtcagtcctag

SEQ ID NO: 130755 - DNA, 1107 bp, synthetic construct
  misc_feature 1..1107: note = Description of Artificial Sequence: Synthetic coding sequence
  source 1..1107: mol_type = other DNA
tctgtgcagtcccaccccgccccaccaaggccccgcgaaaacccgcgaggatctgagtcactcccatgtcggctgactgcgatggagactaagttgcctccggccagcaccccaacctcgcctagttcacccggcctctcacccgttccacctcccgataaggtggacggtttttctcgtaggtccttgcgcagggcaaggcccagacgatcacattcgagctcacaatttagataccaatccaaccaacaggagttgacgccactcccactgctcaaagatgttccagcgtcggaattgcatgagcttctgagccggaagctggcacagtgcggagtcatgttcgacttccttgactgtgtggccgaccttaaaggtaaggaggtcaaaagagccgccctcaatgaattggtggagtgcgttggctctaccagaggggtgctgatcgaacctgtttaccccgacattatccgcatgatcagcgttaatatctttcggaccctgccacctagcgagaatccagaatttgatcctgaggaggacgagcccaacttagaaccgagctggccccacctgcagctggtttatgaattctttctgaggttccttgagtctcctgacttccaacctagtgtggctaaacgttatgtcgatcagaagttcgttctgatgctgcttgagctgttcgacagcgaagaccccagggagagggaatacctgaaaaccattctgcaccgcgtatacggtaaatttctgggactacgtgcctacataagaaaacagtgcaatcatattttcttgcgatttatctatgagtttgagcactttaacggcgtggctgagctgctcgaaattctaggatcgattattaacggcttcgccttgccattaaaaactgaacacaagcctggcagtcgccccgatccgcccgctttgtgccaggtggccgtctgcctgccatgccccgccggaattctatgcggtgcagtcccgggggaaggctgtcattctgacagggccagggaccccggcgccgcccaaatcctggcaaaaaatctccaccctgagggtggcgacgtcagcggcggggacggtcgagatagctag

SEQ ID NO: 130756 - DNA, 582 bp, synthetic construct
  misc_feature 1..582: note = Description of Artificial Sequence: Synthetic coding sequence
  source 1..582: mol_type = other DNA
atggagacgaagttgccgccggcctccactcccacaagcccttcttcccccggattatccccagttcctcctcccgataaggttgacggattcagtcgtcggtcacttcggcgcgcgcgcccacgacggagtcactcttcctcccaattcaggtatcaatctaatcagcaagagttaactcctttacccttgttgaaggatgttcctgctagcgaactgcacgagctgcttagtcggaagctcgcccagtgcggagtgatgttcgactttcttgactgtgtggctgacctgaaaggtaaagaagttaagagagctgcactgaatgaattggttgaatgtgtgggctctacaaggggcgtactgatcgaacctgtttaccccgacataatcaggatgatcagcgttaacatttttcgaaccttgccaccttcagagaatccagagtttgatcccgaagaggacgaacccaacctggaaccctcctggccacaccttcagcttgtgtacgaatttttccttagatttctggaatctccagattttcaaccctcagtggccaaaagatacgtggatcagaagtag

SEQ ID NO: 130757 - DNA, 1494 bp, synthetic construct
  misc_feature 1..1494: note = Description of Artificial Sequence: Synthetic coding sequence
  source 1..1494: mol_type = other DNA
atggaaactaagctgccaccggccagcacgcctacttccccctcctcccccgggttgagcccagtccctcctcctgacaaggtcgatggattcagtcgcagaagtctgagacgcgctcgccccaggcgttcccactcttctagtcaatttagatatcagagtaatcagcaggaactcacccctctgcccctgcttaaggacgttcctgcttcggaacttcatgaactcctctctcggaaactggcccaatgcggtgtcatgttcgactttctcgattgcgtggctgacttaaagggaaaagaggtaaagcgcgcagctctgaatgaactggtagaatgcgtggggagcacgcgcggtgtcctcatcgaacccgtctatccagatataattcgcatgatcagcgtcaacatattccggacactgcctccatcggagaatcctgagttcgaccctgaagaagatgagcctaatttggaaccctcctggccccaccttcagctcgtgtatgagttctttctcagatttctggaatctccagacttccagccgtcagtggctaaacggtacgtcgaccagaaattcgttttgatgttgctggaattatttgattcagaggatcctagagagcgcgagtaccttaagacaattctgcatagggtttacgggaaattcctcggattgagggcttacattaggaagcagtgtaatcacatcttcttaagatttatctacgagtttgaacatttcaatggcgtggcagagctgctggagatcctgggctctatcatcaatggattcgccctccctttgaagacagaacacaaacagttcttggtgagagtgctgattcccctgcatagcgttaaaagtctcagcgtgtttcacgcacaactggcatattgtgttgtgcagttcctggaaaaggatgcaacattaaccgagcacgtaatccgagggcttctgaaatactggccaaaaacctgtacacagaaggaggttatgttcctgggagagatggaagaaattttggacgtgatcgaaccgtcacaatttgttaagattcaggagcccttgtttaaacaagtcgctagatgcgtgtcttcaccacattttcaggtggccgagagggctttgtatttctggaataatgagtacattctgtccctcatcgaagacaattgccatacggttctgccagcagtttttggtaccctatatcaggtgtcaaaagaacattggaatcaaactattgttagccttatctataacgttcttaaaacctttatggaaatgaacggcaaattatttgatgagcttaccgcatcatataagttggaaaaacagcaggagcaacaaaaggctcaggaacggcaggagctgtggcagggcttggaggaactcagactccgccggctgcagggaacccagggtgcgaaggaggcgccgttacagagactgaccccgcaggtcgcagcctccggcggacagtcctag

SEQ ID NO: 130758 - DNA, 408 bp, synthetic construct
  misc_feature 1..408: note = Description of Artificial Sequence: Synthetic coding sequence
  source 1..408: mol_type = other DNA
atggaggagcttacagaggtgattactgccgcggagttccacccacaccagtgtaacgtttttgtatactcctcatccaaaggaacgattcggctatgtgacatgcggtcatctgcactgtgtgatagacattcaaagttcttcgaagaacctgaggatccctcatctagaagcttttttagcgaaattatcagttccattagtgatgttaaattctcccactctgggaggtacatgatgaccagagatcctgtcggtgagggcgtcgggccacagcatagggccggccgctggcggcccacgcggtctacatcaacatgcgctgcaagctctgcccttagcatgaggactacagcttctctcacttccctgagcgtagctggcaccgtgcggatcgctcctagctag

SEQ ID NO: 130759 - DNA, 1269 bp, synthetic construct
  misc_feature 1..1269: note = Description of Artificial Sequence: Synthetic coding sequence
  source 1..1269: mol_type = other DNA
ctcactgccgatattatatcaacagtagagttcaattatagcggagatctcctagccacgggcgacaagggcggccgtgtcgtgatcttccagcgcgaacaagaaaataagtcaagaccccattcccgtggagagtataacgtgtattctacttttcaaagtcatgagcccgaatttgactatcttaagagcctcgaaatcgaggaaaaaataaacaagatcagatggctgccacagcaaaacgctgcacattttctgctctctactaatgataaaactattaagctctggaaaatttccgaaagggataagcgggcagaggggtacaacctgaaagatgaagatggccggctgcgggatccgttccggatcacagccctgagggtacccatcctgaagcccatggacctgatggtggaagcctcaccgcggaggatattcgctaatgcccacacctaccacatcaattcaatcagcgttaactccgatcacgaaacttacttgagtgctgacgatctcaggatcaatttatggcatctcgaaattacagatagatcgtttaatatagtggacataaaacctgctaatatggaagaactcaccgaggtgattaccgccgcggagtttcacccacatcagtgcaacgtgttcgtgtattcaagtagcaaagggacaattaggctatgcgatatgaggagcagtgcactctgtgatcgacatagcaaattcttcgaagaaccagaagatcctagctctaggtcttttttcagtgagataataagcagcatttctgacgtgaagttctcccactccggacggtatatgatgacccgcgactacctttctgtgaaagtatgggacctcaatatggagagccgcccagtggagacacaccaagtccacgaataccttcggagtaaactttgtagcctgtacgaaaatgactgcatcttcgataagttcgagtgctgttggaacggttccgattctgcaattatgacgggttcctataacaacttctttagaatgtttgatcgggatacccggcgggatgtcactcttgaggccagcagggagagcagcaaaccacgcgcgagtttgaaaccccggaaggtgtgtactgggggaaaaagaagaaaggacgagattagtgtggattcactcgatttcaacaaaaagatcttgcacactgcatggcacccggtggacaatgtgattgccgtggccgcaaccaacaatttatatatcttccaggataaaatcaactag

SEQ ID NO: 130760 - DNA, 1713 bp, synthetic construct
  misc_feature 1..1713: note = Description of Artificial Sequence: Synthetic coding sequence
  source 1..1713: mol_type = other DNA
atgccctacaagttaaagaaggaaaaggagcctccaaaagtggctaagtgtacagctaagccctcttccagcggcaaagatggtggcggggagaacaccgaggaagcccaaccgcagccacagccacagcctcaaccacaggcgcagagccagcctccctcttcaaacaagagaccaagcaattctacacccccacctactcaactgtctaaaataaaatattcaggaggtcctcagatagttaaaaaggagcttttcatccagaaattgcgacagtgttgcgtactcttcgacttcgtgtccgatcccctgagtgacttaaagttcaaagaagtaaagcgagctggactgaatgagatggtagagtatattacacactcacgggacgtggttactgaagccatataccctgaagccgtgaccatgttttcagttaacttgtttaggacacttcctccatcctctaacccaactggtgcagaattcgatccagaagaagatgaacccactctcgaagcagcctggccccacctgcagctggtgtatgagtttttcttgcggtttctggaaagtccagactttcagcccaacatagctaaaaagtacatagatcagaaatttgtgcttgccctcctagatttgttcgatagtgaagatccacgtgaaagagatttccttaagactatcctccatcgaatctacgggaaattcctgggactccgcgcctacattagacgtcagatcaatcatatcttttatagattcatatatgagaccgaacaccataatgggatcgccgagctcctggagatactgggaagcatcatcaatggctttgctctgcctttaaaggaggagcacaaaatgttcctaatccgggttctgcttcctctgcataaggtgaagtctctgtccgtctatcacccgcagctggcctattgcgtggttcagttcctagagaaggagagcagtcttactgagcccgtaatcgtgggactgcttaagttttggcctaaaacccattcgccgaaggaggttatgttcctgaacgaactcgaggagatacttgatgtgatcgagccgagcgagttctctaaggtgatggaaccgctgtttcgccaacttgctaagtgcgttagctccccgcacttccaggttgcagaacgggcgctgtactactggaacaatgaatatatcatgagcttaatttcggataatgcagctagagtgctgccaatcatgtttcctgctctctataggaacagcaaaagccactggaataagactatccatggccttatctataatgctttgaagttattcatggaaatgaaccagaagctgttcgatgactgcacgcagcagtacaaagctgagaaacagaagggaaggtttcgcatgaaggagcgggaagagatgtggcagaagattgaagagctggcgcgcttgaaccctcagtaccccatgttccgagcaccacctccccttccccctgtgtatagtatggaaactgagactcccaccgccgaggacatccagttactcaaacggacagtagaaacagaggcagtgcagatgctcaaagatattaaaaaagagaaggtgctgctgcgaagaaaatcggagctcccccaagatgtctataccatcaaagcacttgaggcccacaagcgggctgaggaatttctgactgccagccaggaggccctatag

SEQ ID NO: 130761 - DNA, 1491 bp, synthetic construct
  misc_feature 1..1491: note = Description of Artificial Sequence: Synthetic coding sequence
  source 1..1491: mol_type = other DNA
atgccctacaagcttaaaaaggaaaaggaactcttcattcagaagcttagacagtgttgtgtactctttgattttgtttccgatcccctcagcgacttaaagtttaaggaggtgaagagggcaggtcttaacgaaatggtggaatatataacgcactcacgtgatgtagtgacagaagccatctatcctgaagccgtgacgatgttttccgtgaaccttttcagaaccctgcctccgagctcaaacccaaccggagccgagttcgacccagaggaggacgaaccaactctcgaggcagcatggcctcacctgcaacttgtctacgaattctttctgcgctttctagagtctcctgattttcaaccaaatattgctaaaaagtatattgatcagaagtttgttcttgctcttcttgatttgttcgattctgaagatccgagggagagggacttcttgaaaactatcctacatcggatctacggcaagttcctgggtctgcgagcgtacataaggagacagataaaccatatattctacagatttatttatgaaaccgagcaccacaacgggatcgcggaattactcgagatactcggtagcattattaatggtttcgctctacccctgaaagaggagcacaagatgtttctgatacgtgtgctgctgcctttacacaaagttaagagtctaagtgtgtatcatccgcaactggcatactgcgtagtccagtttctggagaaagagtcaagtctgaccgaacccgtaatcgtcggcctgctgaagttctggcctaagacacacagccctaaagaggtgatgtttttgaacgagcttgaggagatactggacgtgatcgagccgtccgagttttctaaggtgatggagcccttatttcgccagctggcaaaatgtgtgtcctcacctcattttcaggtggctgagcgcgccctctactactggaataatgaatatattatgagcttgatatccgacaacgctgcccgagtactgcctatcatgttccctgcactctaccggaatagtaagtctcactggaacaaaacaatacatggcttgatctacaatgcgctcaagttgtttatggaaatgaatcaaaagcttttcgatgactgtactcagcagtataaggctgaaaagcagaaaggaagatttagaatgaaagagagggaggaaatgtggcagaaaatcgaggagttggcacgattaaatccccaatatcctatgtttcgcgccccgccccctcttcctcctgtgtattccatggaaaccgagactcctacagcggaagatatccaattactgaagagaaccgtcgaaacggaagcagttcaaatgctgaaagacattaagaaggagaaggtactgctccgcaggaagagtgagctcccccaggacgtgtatacaattaaggctctcgaggcccacaaacgggctgaagaattcctaactgcctctcaagaggctctctag

SEQ ID NO: 130762 - DNA, 1515 bp, synthetic construct
  misc_feature 1..1515: note = Description of Artificial Sequence: Synthetic coding sequence
  source 1..1515: mol_type = other DNA
taaaaaaaggaaagacgacagtcgtcttcccgatttaacctgtcaaagaaccgagaactgcagaaactgccagctctgaaagatagtcctacacaagagcgggaggagctctttatacagaaactgcgtcagtgctgtgtgcttttcgacttcgttagcgaccctctgagcgatctgaagtttaaggaggtgaaaagggccgggctcaatgaaatggttgagtacataactcacagcagggacgtggtcacagaggccatttacccggaggccgttaccatgttttccgtgaacctgttccgaactcttccaccatccagtaaccccactggagcagaattcgatcccgaagaggacgagccaaccctggaggctgcctggccccaccttcaacttgtatacgaattttttcttcggttcctggagtcgcctgacttccaaccaaatatcgccaagaagtatattgatcagaagttcgtgctggctttactggacctcttcgacagtgaagaccctcgcgagcgggatttcttgaaaacaatcctgcataggatctacggcaagttcctcgggcttagggcctatattcgacgccagatcaatcacatattctatcgctttatatatgagacagagcaccacaatggaattgcggagctgctggagatcctggggagtataatcaatggctttgctctgcccctgaaggaagaacataagatgtttctcattcgagtgctccttcctctgcacaaagtcaagagtctctcagtctatcatccgcaggtgattgtgggtctccttaaattctggcctaaaacacactcccccaaagaggttatgttccttaacgagctcgaagaaatcctggacgtgattgagccttccgaattttcaaaggtgatggagcctctgtttcgacagctggcaaagtgcgtgtcaagcccgcactttcaggttgccgagagggcactgtactactggaacaatgaatatattatgagcttaatctcagataacgccgcaagggtgctgccaataatgtttccggccctctaccggaactccaagagccactggaataagaccatccacggtctcatttacaacgctcttaagctgtttatggagatgaatcagaaattgtttgatgactgcacccagcaatataaagctgagaagcaaaaaggaaggtttcggatgaaagaaagggaagagatgtggcagaaaatcgaggaactggcaaggctcaatcctcaataccccatgttccgcgcgccaccccctctccccccggtgtacagcatggagacagagacccccactgcagaggacattcagttattgaagcggacggtagaaaccgaagcagtgcaaatgctgaaagacatcaaaaaggagaaggtgttgttacggcgcaagtctgagctgcctcaggatgtgtatacaattaaggccctggaggcccataaacgcgccgaagaatttctgacagcctcccaagaagcactgtag

SEQ ID NO: 130763 - DNA, 1809 bp, synthetic construct
  misc_feature 1..1809: note = Description of Artificial Sequence: Synthetic coding sequence
  source 1..1809: mol_type = other DNA
atgccttacaagctcaaaaaggagaaagagcctcctaaagtggcaaaatgtaccgccaagccttccagctcagggaaggatggcggcggcgaaaataccgaagaggcccaaccgcagcctcagcctcagccccagccgcaggcacagagccagccgcccagctccaataaacgtcccagtaactcaacaccgccaccaactcagctgtctaagatcaaatacagcggggggccgcaaattgtgaagaaggagcgtcggcaatcttcatcgcggttcaatctgtccaagaacagagaactgcagaagttgccagccctgaaggactccccaacacaggaaagggaagagctatttatccagaagcttcgacagtgctgcgtgctttttgactttgtgtctgatcccctgtctgatttgaagtttaaggaggtgaaacgggcaggactgaatgagatggtagagtacataactcatagcagagatgtcgtcacagaagctatttatccggaggctgtgaccatgttttcagtgaatctgtttcggaccctgcccccatcctccaatcccactggtgctgagttcgatcccgaagaggacgagccaacactggaagccgcgtggccccatctccagcttgtttacgaattttttcttcggtttctcgagagccccgattttcagccaaacatagccaagaagtacatcgatcaaaagttcgtgttggccctgctggacctgtttgacagcgaggatccgcgggagcgagattttctgaaaactatcctccaccgaatttatgggaaattcttgggactgagggcttatatccgccgccagattaaccacatcttttatcgctttatttacgaaaccgaacatcataatggcatcgcagagcttttagaaatcctgggcagtataattaatggtttcgctctacccttaaaagaggaacacaagatgttcctgatcagagtgcttctgccgctacataaggtgaaatccctgtctgtataccacccacaattagcttactgtgttgtgcaatttctggaaaaagaaagctctctaaccgaaccagtgattgtgggacttctgaaattttggcctaaaacccattcacccaaagaagtgatgtttctcaatgaactggaggaaattctggatgtcatagagccgtcagagttctctaaagtaatggagccgcttttcagacaacttgctaagtgcgtgtctagccctcacttccaggttgcagaacgcgctctgtactattggaacaatgaatacataatgagccttatttcagacaatgctgctagagtcttaccaatcatgttccccgctctctacaggaacagcaaatctcactggaataagacaattcacgggctgatatacaacgctttaaagttatttatggaaatgaaccagaagctgtttgacgattgtacccagcagtataaggccgagaagcaaaagggcaggttccgcatgaaagagagagaagagatgtggcaaaagattgaagagcttgcccgacttaacccccagtatcccatgtttcgcgccccgcctcccctgcccccagtgtattcaatggaaacagagacaccgaccgccgaggatatacagctgctgaaacgcacagtagaaacagaagccgtccagatgttaaaagatatcaagaaagagaaggtcctgttacgcaggaaaagtgagcttccccaagacgtgtataccatcaaagctttagaagctcataagcgcgccgaagagttcttaacagcctcacaagaagcgttatag

SEQ ID NO: 130764 - DNA, 1755 bp, synthetic construct
  misc_feature 1..1755: note = Description of Artificial Sequence: Synthetic coding sequence
  source 1..1755: mol_type = other DNA
atgccgtataagctaaaaaaggagaaggagcctcctaaagtagctaagtgtaccgccaagccctcttcctccggcaaggacgggggaggggagaacactgaggaggcccagccccaacctcaaccccagcctcagcctcaggcacagagccagccaccatcatcaaataagagaccgtcaaactcaacacctcctccaactcagctcagtaagataaaatactctgggggccctcagatcgttaaaaaagaaaggcgccaatcctccagccggttcaatttaagtaaaaacagagaactgcagaagctaccggccttgaaagactctcctacccaggaacgtgaagaactgttcatccagaagcttcgccagtgttgcgttctgttcgacttcgtttctgatcccctgtctgatctcaaattcaaagaggttaagcgcgccgggctcaatgaaatggttgagtacatcactcactcgagggatgttgtaaccgaagccatttatcctgaagccgtgacaatgtttagcgtgaacctattccgaaccctgccaccttcgtcaaatcccaccggggcggaatttgatcccgaggaggacgaacctacccttgaagcagcttggcctcacctacagttggtctatgaattttttctgcgcttcctcgagagtcccgatttccagccgaatattgcaaagaaatacatagaccaaaaatttgtcctggctctgctggacctgtttgatagtgaggacccgagagaaagagattttttgaagacaatcctgcacaggatctacggcaaatttctgggccttagagcatacatcaggaggcagatcaaccacatcttctatcgcttcatttacgagactgagcatcacaatggtattgccgagctcctggagatcctcggtagcataattaatgggttcgctctaccgttgaaggaagagcataagatgttcctaattcgagtgttgctcccactacacaaagttaaatctctgtcggtctaccacccgcaggtgatcgtcggtctccttaagttttggcccaaaactcattcaccaaaggaagtgatgtttttgaatgagctagaagagatactggatgtaatcgaaccttccgagttcagcaaggtcatggaacctttattccgccaactcgctaagtgtgtatcgtcccctcatttccaggtagctgagcgcgccctctactactggaacaatgagtacatcatgtctctgattagcgataatgccgcccgcgttctcccgatcatgttccccgcattatatcgaaactctaagtcgcattggaataagacaatccacgggcttatctacaatgctctgaaactctttatggagatgaatcaaaagctatttgatgactgcacacagcagtataaagccgaaaaacaaaaaggcaggttcagaatgaaggaacgagaggaaatgtggcagaagatagaagagcttgctcgccttaatccacagtacccaatgtttagggctcccccgccactacctcccgtctactccatggagaccgaaacgcctactgccgaggacatccagttgctgaagagaactgtggagacggaagccgtgcagatgctgaaagacataaaaaaggagaaggtgctgctcagaagaaagtctgaattgcctcaggatgtatacacgattaaggcgctagaggcccataaaagggctgaggagttcctgactgcctcccaagaggcattgtag

SEQ ID NO: 130765 - DNA, 1404 bp, synthetic construct
  misc_feature 1..1404: note = Description of Artificial Sequence: Synthetic coding sequence
  source 1..1404: mol_type = other DNA
atgtccagcgcccccaccaccccgccctcagttgacaaggtggatggcttctctcggaaaagcgtccgcaaggcacggcaaaagaggagccagtcctctagccagtttcgaagccaggggaaacccattgaactgacacccctgccacttctcaaggacgttccttccagcgagcagcccgagctttttctgaaaaagctccagcaatgctgtgtaatctttgacttcatggatacgctgtcagatctgaagatgaaggagtataagagaagcaccttgaacgaactagtggattatattactatctctcgcggatgtctcactgaacagacttacccggaagtcgtcaggatggttagttgcaatatattccgcacattgcctccgtccgacagcaatgaatttgaccccgaggaggacgagccaaccctggaggccagctggccacacctccaactggtatacgagttcttcattcgcttcctggagagtcaagaatttcaaccttctatcgccaagaagtacattgaccaaaagtttgtgctgcagcttctggaactctttgatagtgaggacccacgagagcgcgactacctgaaaactgttctgcatagaatctacggaaaattcctaggtctgcgagcattcattcggaaacagatcaacaacatcttcctgcggttcgtgtacgagactgaacatttcaacggggtggcagagctcctggagatcctcggaagcatcatcaatgggttcgctctgcccctgaaggcagagcataagcagttcctggtaaaggtgcttattccactccacacagtacgttcactgtccctgttccacgcccagttggcctactgcatagttcaatttctggaaaaagacccgtccctcacggagcctgtgatcagaggtttaatgaaattctggcctaagacttgtagtcagaaagaagtcatgttccttggcgagctagaggagattctggatgttattgaaccatctcagtttgtgaagatccaggagcctctattcaaacaaatagcgaaatgtgtttcatccccacacttccaggttgccgaacgggcactctattattggaacaacgagtatatcatgagcctcattgaagaaaactcaaatgtgatcttgcccattatgttcagcagcctgtacagaatatctaaggagcattggaatccagcaattgtggcgctggtatacaatgtcctcaaggcttttatggagatgaattccactatgttcgacgaactaacggctacttataagtcagatcgccagagggagaaaaaaaaggagaaagagcgggaggaattatggaagaagttggaagatctagagctaaaacgggggctgcgtagagacggtatcatccctacctag

SEQ ID NO: 130766 - DNA, 1176 bp, synthetic construct
  misc_feature 1..1176: note = Description of Artificial Sequence: Synthetic coding sequence
  source 1..1176: mol_type = other DNA
atggatactttgagcgatctgaagatgaaagagtacaagagatcaactcttaacgaacttgtggactatatcaccatttcaagggggtgcctgacggagcaaacctatcccgaggtagtccgaatggtttcttgcaatatcttccgaaccctgcccccctccgactcgaacgagtttgatcccgaagaggatgagcctactctcgaggcctcttggccccacctgcaattggtgtatgaattttttatcagatttctggaaagccaggaattccagcctagcatcgctaagaaatatatcgatcaaaagttcgttctccagctcctagaactgttcgactctgaggaccccagggaaagggattacctgaaaactgtgctccacagaatttatggtaagtttctggggttaagagcttttatcagaaagcagatcaacaatatcttcctgagattcgtgtacgagacagaacacttcaatggggtggcagaactgttagagatcctcgggtcaatcattaatgggttcgcactgcctctcaaggcagagcacaaacagtttctagtgaaagtgctgataccgttgcacaccgtgagatcactcagtctcttccacgcacagcttgcatattgcatcgtacagttcctggaaaaagatccctcgctcacagagccggtcattcgtgggcttatgaagttctggccgaagacatgctcgcagaaggaagttatgttcctgggtgagctagaggagatcctggacgtcatcgagcccagccagtttgtaaagatacaggagccgctcttcaagcaaattgccaagtgcgtctccagcccacacttccaggtggccgagagggccctgtactactggaataacgaatatatcatgtctctcattgaagagaactcaaacgttatacttcccataatgttttcatccctttatagaatttcaaaggagcactggaaccctgctatagtcgcactggtgtataacgtcctgaaggccttcatggaaatgaacagtactatgtttgatgaactcacggcaacctacaaaagtgaccgacaaagagagaagaaaaaggagaaggagcgcgaggagttgtggaaaaagctagaagatctcgaactgaagcggggactgaggcgcgacggaatcattccaacttag

SEQ ID NO: 130767 - DNA, 1389 bp, synthetic construct
  misc_feature 1..1389: note = Description of Artificial Sequence: Synthetic coding sequence
  source 1..1389: mol_type = other DNA
atgtcatccgctcccactactcccccaagtgtcgacaaagtggacgggttctcccgtaaatccgtgcgcaaggcgagacagaagaggagccagtcctcctcccagtttcgcagccaaggaaaacccatcgagctgacacccttgcctctgctaaaagacgtgcctagttctgagcaacctgagttatttctcaaaaagctgcagcagtgctgcgtgatttttgattttatggacacccttagtgatctaaagatgaaagagtacaaaaggtcgacacttaacgaactggtcgattacatcactatctcaagaggctgccttacagaacagacataccccgaggtggtccgaatggtgtcatgcaatatctttagaacgcttcctcctagcgactccaacgaattcgacccagaggaggatgaacccacccttgaggcatcctggccccatctgcagctggtatatgagttctttatcagatttctggagtctcaggaatttcagccaagtatcgcaaagaaatatattgatcaaaaattcgtccttcaattactggagttgtttgattctgaggatcccagggagagggattacttaaagaccgtattacacagaatttacgggaaatttctcgggctccgggcgttcattcgcaagcagatcaacaacatttttcttagattcgtgtatgaaactgagcacttcaacggcgtcgctgaattgctggaaattttgggaagcatcattaacggatttgctttgccattgaaggctgagcacaagcagtttctcgtcaaagtgctgataccgctccacacagtgagatcgctcagcctcttccatgcacagctagcatactgtatcgtccaatttctcgaaaaggacccatctctcactgaacccgtcattcggggactcatgaaattttggccaaaaacctgcagtcagaaggaggtgatgtttctgggggaactggaagaaatcctcgacgtcattgagccaagccagttcgtcaagattcaggaaccactcttcaagcagatagctaagtgcgtatccagtcctcactttcaggtggcagaacgcgcactgtactactggaataacgagtacataatgtccctaatcgaggagaattctaacgtgatccttcccataatgttcagctctctctaccgcatttccaaggagcattggaacccagccattgtggcacttgtgtataatgtgttaaaggcgtttatggagatgaacagtacaatgtttgacgaactcaccgccacatataacgaaaaaaaaaaagagaaagaacgtgaagaactgtggaagaaactggaagacctggaactgaagaggggcttacgacgagacggaattattcccacatag

SEQ ID NO: 130768 - DNA, 1344 bp, synthetic construct
  misc_feature 1..1344: note = Description of Artificial Sequence: Synthetic coding sequence
  source 1..1344: mol_type = other DNA
atggggctgtctttcttttctaagcacctgcctatccaggaaggacagccatgggccctaaaaactcccgccgatatcatctcaaccgtggagttcaaccatacaggggaactgctagctacaggcgacaaaggtggcagggtggtgatcttccagagggagcctgagtcaaagaacgcccctcatagccagggggagtatgatgtttatagtacatttcaatcacacgaacccgaatttgactatctgaagtcgttagaaatcgaggagaagatcaacaagatcaagtggctcccccagcagaatgccgcccattctctccttagcaccaatgacaaaactatcaagctatggaagataacagaaagggataagagacccgaagggtacaacctcaaggatgaagaaggcaagctgaaggacctgtcaaccgtgactagtctgcaggtgcctgtgttgaagccaatggacctcatggtggaagtgtcccctcggcgcatcttcgcaaacgggcacacctaccacattaattccatttctgtcaactccgactgcgagacctacatgagtgctgatgacctccgaatcaacctgtggcatctggccattactgataggagctttaacattgtagacatcaagcccgccaacatggaggacctgactgaggtcatcactgccagcgaatttcacccacaccactgcaatcttttcgtctattcgagttcaaagggatctttgcgattgtgtgatatgagggccgcggctctttgcgacaaacactctaagcttttcgaggaacctgaagacccttctaatcgtagcttcttcagcgaaattatttcatcagtgtccgatgtgaagttttctcactccggtaggtacatgttgacacgggactatctgactgtgaaagtgtgggatttgaacatggaggccagacccattgagacttatcaggtgcacgactatctgcggagtaaactgtgcagtttatatgaaaatgattgcatctttgacaagttcgagtgcgcctggaacggctccgactctgtgattatgacaggcgcctacaacaacttcttccgaatgttcgatcggaacacgaagcgagatgtgacactggaagcatctagggagagttctaaaccacgcgccgtcctcaagccaaggcgcgtatgcgtgggcggaaagcggagaagggacgatatctcagtggactcactggatttcacgaagaagatccttcacaccgcttggcatcctgcagaaaatattatcgccattgctgctacgaacaatctgtatattttccaggacaaggtgaattccgatatgcattag

SEQ ID NO: 130769 - DNA, 1344 bp, synthetic construct
  misc_feature 1..1344: note = Description of Artificial Sequence: Synthetic coding sequence
  source 1..1344: mol_type = other DNA
atgggtgaggacacagatacaaggaaaattaaccattcttttctcagagaccattcctatgtcaccgaagccgacataataagcaccgtcgagtttaatcataccggcgaactcctggccactggtgataaaggaggaagggtagtgatctttcagcgggaacctgaatctaagaatgctcctcatagccagggggagtatgacgtgtattccacattccagtcacacgaacccgagttcgattacctgaaatcattggaaatcgaggagaaaataaataagatcaaatggctcccccaacagaacgccgctcactccttgttgtccactaacgataaaactatcaagctctggaaaattacggagcgtgacaagcgccctgaaggttacaacttaaaagacgaggagggcaaactgaaagatctgtctaccgtgacttccttgcaagtgccagtcttgaagcctatggatttaatggtagaggtgagccctaggcggatcttcgccaatggccacacctaccacattaactctatcagtgtcaactcagactgcgaaacctacatgagtgcggatgacctgcgtatcaacctgtggcacttggctattaccgacagatctttcaatatcgtcgacataaagcccgccaatatggaggacctcaccgaggtgatcaccgctagtgaattccaccctcatcattgcaacctgttcgtgtatagttcaagtaaaggcagcctccgactatgcgatatgagggccgccgcactgtgtgacaagcacagcaagcttttcgaggagcccgaggaccccagcaacagaagctttttcagtgagatcatttcctcagtgagtgatgtgaagtttagccacagcggacggtacatgttgacgagagattacctcactgtgaaagtctgggatctcaatatggaagcccggccgatcgagacctatcaggtccacgattaccttaggagcaaactctgctctctttacgaaaatgactgcatctttgacaagtttgagtgtgcatggaatgggtcggacagcgtaataatgactggagcctataataacttcttccggatgttcgatcggaatactaaaagagacgtgacgctcgaagcgagccgcgaatcatctaagcccagagctgtattaaagccaaggcgcgtgtgtgtcggggggaaacggcgccgcgacgatatcagcgtcgattcactcgattttaccaagaagattttgcacacagcatggcatccagccgagaacatcatagctatagccgccaccaataacctatacatcttccaggacaaggtgaattcagacatgcattag

SEQ ID NO: 130770 - DNA, 1323 bp, synthetic construct
  misc_feature 1..1323: note = Description of Artificial Sequence: Synthetic coding sequence
  source 1..1323: mol_type = other DNA
atgcgcgaggctgacacactcaggcctccccagctcatggaggtcagcgcagatattatctcgaccgtggagttcaaccacaccggggaactacttgcaacgggggataaaggcggacgagtggtgattttccagagagaacccgaatccaagaacgcacctcattctcagggagagtacgatgtatacagcacatttcagtcacacgaacccgagttcgattatctgaagtctcttgagattgaagagaaaataaacaaaatcaaatggctgcctcagcagaatgcagctcacagtctgctgtcgactaacgacaaaaccataaagctgtggaaaatcactgagagagataagcgtccagagggctataacctgaaggacgaagagggcaaactgaaggatctttccacagtcacaagtctgcaggtacccgttttgaagcccatggacctcatggttgaggtgtcaccgcggcggatttttgctaatggtcacacataccatataaactccatcagcgtgaactcagattgcgaaacttatatgtcagctgacgacctcaggattaatctatggcacttagccattacggacaggtcatttaatatcgttgacatcaaacctgccaacatggaagaccttactgaggtgattaccgcctctgaatttcatccacaccactgtaatctctttgtatattcttcatccaagggatccctccggctatgcgatatgcgcgcagccgcattgtgcgacaagcatagcaagctctttgaggagccagaagatccatccaatagatcctttttttccgagatcatctcttcagtgagcgacgtgaagttttcccacagtggaagatacatgctcactagagattacctaaccgtgaaggtctgggacctgaatatggaggcccgccctatcgagacgtatcaagtccacgattatttaagatctaagctctgcagtctgtacgaaaatgactgtatcttcgataagttcgagtgcgcttggaatggcagcgactctgtgattatgacgggggcatacaacaatttcttccgcatgtttgaccgaaatacaaaaagggatgtgaccctcgaagctagcagagaaagctccaaacctcgtgctgtgctaaaacctaggcgggtgtgcgtgggtgggaaacgcagacgggatgatatcagcgtcgactcacttgacttcactaagaaaatacttcacactgcctggcaccccgctgaaaatatcattgctattgctgccaccaacaacctctacatttttcaggacaaagtgaattccgacatgcattag

SEQ ID NO: 130771 - DNA, 1323 bp, synthetic construct
  misc_feature 1..1323: note = Description of Artificial Sequence: Synthetic coding sequence
  source 1..1323: mol_type = other DNA
atgcgagaggctgacactcttcgacctcctcagctaatggaggttagtgctgatatcatcagtactgtggaatttaatcatacgggagagctgctggccactggagacaaagggggacgggtggttatatttcaaagggaacccgagagtaagaatgcaccccattcccagggtgaatatgatgtgtactccacattccaaagtcacgaaccagagttcgattacttgaagagtctcgaaatcgaggagaagatcaacaaaattaaatggctgccgcagcagaatgctgcccactcgctgctgtccaccaacgataaaacaatcaaactgtggaaaatcaccgagcgagacaaacgcccggagggctacaacctcaaagacgaagagggcaagctgaaggatctgagtactgtgacttccctgcaagtccccgtcctcaaacccatggacctgatggttgaggtgtcacctaggagaattttcgctaacggtcacacctatcatatcaattctatttcggttaatagcgactgtgaaacttatatgtctgcagacgacttacggattaacctgtggcacctggccatcacagatcggtcctttaatatcgtggatatcaagcccgcaaacatggaagatctgactgaagtcataaccgcatctgaattccatccccaccactgtaacctgttcgtgtattcctctagcaagggctcactgaggctgtgcgacatgagggccgctgcactatgcgacaagcactcgaagctgttcgaggaacccgaggatccctccaatcgaagtttctttagcgagattatttctagcgtctcagacgtcaagttttcccattctgggagatatatgcttactcgcgactatcttactgtgaaggtgtgggaccttaacatggaagcaaggccaattgagacttatcaagtgcatgactatctgagatccaagttatgttctctgtacgaaaacgattgtattttcgataagttcgagtgcgcatggaacggtagcgattcggtcatcatgaccggcgcctacaacaacttcttccgaatgttcgatcgcaatacgaaaagggacgtgacattggaggctagcagggaaagttcgaaacctcgtgcagtgttgaagccaagacgagtatgtgtgggcgggaaacgcagaagagacgacatatcggttgacagccttgacttcaccaaaaaaatcctccacactgcttggcatcctgccgaaaacatcatagctatagcagccactaataacctctacattttccaggacaaagttaattcagatatgcattag

SEQ ID NO: 130772 - DNA, 1293 bp, synthetic construct
  misc_feature 1..1293: note = Description of Artificial Sequence: Synthetic coding sequence
  source 1..1293: mol_type = other DNA
atgggcaagagggatacagcagacattatcagcaccgtggagtttaaccacaccggcgaactgctggccaccggagataaagggggccgtgtagtaatatttcagagagagcccgaatccaagaatgcaccacattctcagggtgagtacgatgtgtatagtacatttcagtctcatgagcccgaattcgactacctgaaaagcttagaaattgaagagaagatcaacaagattaagtggctcccccagcagaatgcagcccacagcctcttgagtaccaacgacaaaaccatcaagctgtggaagatcaccgaacgggacaagagaccagaaggttacaatctcaaagatgaggaaggcaagctgaaagatttgtcaactgtcacctcactgcaggttcccgtactgaagcccatggatctaatggtagaggtgtccccaaggagaattttcgcaaacggccatacgtatcacatcaacagtatcagcgtgaacagtgactgtgagacctatatgtcagccgacgacctacgcataaacctctggcacctggccattaccgaccgcagtttcaacattgtggatataaaacctgccaacatggaggatttgactgaggtcattaccgctagtgagtttcatccccatcactgcaatctctttgtgtattcttccagcaagggctccctgaggctttgcgacatgcgggccgccgccttgtgcgacaaacacagcaagctgttcgaggagccagaagaccctagcaacagatcatttttctctgagatcatttcctcggtgtctgatgtcaaatttagccactcaggtcggtacatgctcactcgggattaccttactgtcaaagtttgggacctgaacatggaagccaggcccatcgaaacatatcaggtgcatgactacctcaggagcaaactctgttccctatacgaaaatgattgtattttcgacaaattcgagtgtgcatggaacggctcagactctgtgattatgaccggtgcctataataatttctttagaatgttcgaccgaaacacgaaacgcgacgtgaccttagaagcaagccgggagtctagcaagcccagggccgtgctaaagccacgtcgggtttgtgtaggagggaagcggcgcagagacgacattagcgtggatagcctcgatttcacaaagaaaatcctgcacaccgcctggcaccctgcagagaacattattgccattgcggccaccaacaatctttacatctttcaggataaagtgaattcagacatgcactag

SEQ ID NO: 130773 - DNA, 1623 bp, synthetic construct
  misc_feature 1..1623: note = Description of Artificial Sequence: Synthetic coding sequence
  source 1..1623: mol_type = other DNA
atgcctaacaaaaataagaaggaaaaagagtcgcccaaggcaggaaagtccggaaaaagctccaaagaagggcaggacacagtggagagcgagcaaatcagcgtgaggaaaaacagcctggtggccgtccccagtaccgtgagcgctaaaattaaagtgccggtgagccagcccattgttaagaaagataaaagacagaactccagcagattctcagcctccaataatagagaactgcagaaactgccctcactgaaggatgtccccccagctgatcaggagaagttattcatacagaagctgaggcagtgctgtgttctgtttgactttgtatctgaccctctgtcagatttgaaatggaaggaagtgaagagagccgctctatctgaaatggttgagtatatcacacataaccgaaacgtgattactgaacccatctacccagaggtggtccacatgttcgccgtaaatatgttccgcacacttccccccagcagcaatcctacaggagcagaattcgatccagaagaagacgagcccaccctggaggcagcctggcctcaccttcagctggtgtatgaattctttctcaggttcctggagagccccgattttcaaccgaatatcgcaaagaagtatattgaccagaaattcgtgctgcagcttttggagctgttcgactctgaggacccacgcgagagggattttctcaagactaccctccacagaatctacgggaaatttttgggccttagagcttacatcaggaaacagatcaataatatcttctaccgctttatatacgagactgagcatcacaacggaattgcagaattgctcgaaatactagggtcgatcattaatgggttcgcccttccactgaaggaggagcacaaaattttcctgctgaaggtgctcctgcccttgcacaaggtgaagtcgctgagtgtatatcacccccagctagcatactgcgtcgtccagtttttagagaaggacagcacactgaccgagccagtagtcatggctctgttgaaatactggcccaaaacacattctccgaaggaggttatgttcctgaatgaactcgaagagatacttgatgtgattgagccatctgagttcgtaaagattatggaacctctcttcaggcagttggctaagtgcgtctcttctccccatttccaagtggccgaaagggctctgtactactggaataatgagtatattatgtccctgatctccgataacgcggctaaaatccttcctattatgttcccgtccttatatagaaacagcaaaacgcactggaataaaactatccatggcctaatctacaatgcgttgaagttatttatggaaatgaatcagaagttattcgatgattgcacacagcagttcaaggcagagaaactgaaagagaagctcaaaatgaaagaaagggaggaagcctgggtgaagatcgagaatttagctaaggccaaccctcaggcccagaaagaccccaagaaggatcgaccattggcccgccgtaagtcggagttgccacaggacccacatacaaaaaaagccctggaggcccattgtagagcagacgaattggccagtcaggacggtcgttag

SEQ ID NO: 130774 - DNA, 1575 bp, synthetic construct
  misc_feature 1..1575: note = Description of Artificial Sequence: Synthetic coding sequence
  source 1..1575: mol_type = other DNA
atgctgacatgcaacaaggctggatcaaggatggtggtggatgctgcaaactctaacggccccttccaacccgtggttttgttacacatccgcgacgttcccccagcggatcaggaaaagttattcattcagaagcttcggcaatgctgtgtgttattcgactttgtcagcgatccgctcagcgatttaaagtggaaggaagtaaaacgggccgcgttaagcgaaatggtggagtacatcactcataataggaacgtgattaccgagccaatttaccctgaagtggtgcacatgttcgctgtcaacatgttcaggaccctgccacccagttccaatccgactggtgccgaatttgaccctgaggaagatgaacccaccctggaggcggcatggccacacctacagctggtctatgaattcttccttagattcctagagagcccagacttccagcccaatattgccaaaaaatacatcgaccagaaattcgtgcttcaacttttggaactgttcgactccgaagacccaagagagcgggactttctcaagaccacattacacaggatctacgggaagttccttggtctacgagcatacattcgcaaacagataaataacatcttctatagatttatctacgagaccgagcaccataatggcattgccgaattactcgagattctggggagcataataaatggctttgctttacccctcaaagaagagcacaagatctttctgcttaaagtcctcctgcccctgcataaggtcaaatcactctccgtctatcatccacagcttgcatactgtgttgtgcagtttcttgagaaagatagtacattaaccgagcctgtagtgatggctctgttgaagtattggcctaagacacactcgccgaaagaagtgatgttcctaaacgagctcgaagagattcttgacgtcattgaaccgtctgaatttgtgaaaattatggaacccttattcagacagctggcaaagtgcgtttcctcaccacactttcaggtcgctgagagggcactgtactactggaataacgaatacataatgagtttaatcagcgacaacgcagctaagatactccctatcatgttcccctccttgtataggaattccaagacccattggaataaaacaatccacggtctgatctacaacgcccttaagctgtttatggagatgaaccagaaattgttcgatgattgtactcagcagttcaaagccgaaaagctaaaggaaaagctaaaaatgaaagaaagagaggaggcatgggtgaaaattgagaacctggcgaaggccaaccctcaatacaccgtgtactcccaggcaagcaccatgagtatcccagttgctatggaaacggatgggcccctgttcgaagatgttcaaatgttgcggaaaacggtcaaagatgaggcccaccaggcgcagaaagaccccaagaaggatcgacccctggccaggcgtaagtccgagctgcctcaagaccctcacactaaaaaagcactcgaggcacattgtagggctgatgagttggcctcccaggatggtcgctag

SEQ ID NO: 130775 - DNA, 783 bp, synthetic construct
  misc_feature 1..783: note = Description of Artificial Sequence: Synthetic coding sequence
  source 1..783: mol_type = other DNA
atgtttcggacgctgcctccatcctccaatccaaccggcgccgagttcgacccagaggaggacgagccaaccctggaagccgcctggccgcacctgcagctcgtgtatgagttttttctgcgattcctcgagagtcctgactttcagccaaacatcgcaaaaaaatacattgatcaaaaattcgttctgcagctgctggaactgtttgactcagaggatcctcgggagagggactttcttaagacgactcttcacaggatatacggaaaattccttggcctccgcgcctacattagaaaacagattaataacattttttatagattcatatatgagaccgagcaccataacggaattgctgagctcctggaaatacttggtagcatcatcaacggtttcgctttgcccctcaaggaagagcataagatatttctgctgaaagtccttctgccgctacataaagtaaaatctctgagcgtttatcacccacagctggcttactgcgtggtgcagtttttggagaaggattccaccctcactgagcctgtagtgatggctctgctgaagtactggcccaagacccattcacctaaggaggttatgttcctcaacgaacttgaggagatcctcgatgtgatcgagccgtcagagtttgtaaaaatcatggaacctctattccggcagctggcaaagtgcgtgtcctctccacattttcaggacaatacctggctcgacattcaacgcccagaggctctgcacggggacgagcctaaggcaatctag

SEQ ID NO: 130776 - DNA, 1458 bp, synthetic construct
  misc_feature 1..1458: note = Description of Artificial Sequence: Synthetic coding sequence
  source 1..1458: mol_type = other DNA
atgttgacttgcaataaggctggctcacgaatggtagtagacgcagccaactccaatggcccgttccagccagtggttctattacatattcgggatgtgcccccagccgatcaggagaaattatttatccagaagttgcggcagtgttgtgttctgttcgactttgtcagcgacccgttgtcagacctgaagtggaaagaagtcaagcgggccgcacttagcgaaatggtggaatacattactcacaaccgtaacgtgatcaccgagcctatttatccagaggtcgtccatatgtttgctgtgaatatgtttagaacgctaccgccatcatcaaatcctacgggggctgaatttgacccagaggaggatgaacctaccctagaagcagcctggcctcatctccaactggtgtatgagtttttcttgcggttccttgagtctcctgacttccagccgaacatcgctaagaaatacatcgatcagaagtttgtattgcagctgctcgagttgtttgactctgaagatccccgggaaagggatttcctcaaaacaacgctgcacagaatctacggcaaattccttggtcttagagcttatatccggaagcaaatcaacaacatattttacaggttcatatacgagacagaacatcacaatggtatcgcggagctgctagaaattctcggttctataatcaatgggtttgccctaccattaaaagaggaacacaagattttcctgctgaaggtgctgttgccgctgcacaaggtgaaatccctctctgtgtaccacccccagctggcctactgtgtcgtacaattcctcgagaaggacagcaccttaaccgagccagtcgttatggccctcctcaagtactggcctaagacacattcgccaaaggaagtcatgttcctgaatgaactggaggaaatcctggatgttattgagcccagtgagtttgtgaaaattatggaacctcttttcaggcaactggcaaagtgcgtatcctccccgcacttccaggtcgccgagagggcactatactactggaataacgagtacattatgagcctgataagtgacaatgccgctaagatcctccccattatgtttccttccttgtaccggaattctaagacacactggaataagaccattcacggcttgatttacaatgccctgaagttgtttatggaaatgaaccagaagttattcgacgattgcacacaacagttcaaagcagagaagctgaaggagaagttgaagatgaaagaaagggaggaggcctgggtcaagatcgaaaatctggctaaggctaaccctcaagctcaaaaagaccctaaaaaggacagaccacttgctcgcaggaagagcgaactcccccaggaccctcacaccaagaaagcgctcgaagcccattgccgagctgacgagctggcttcacaggatggcaggtag

SEQ ID NO: 130777 - DNA, 1668 bp, synthetic construct
  misc_feature 1..1668: note = Description of Artificial Sequence: Synthetic coding sequence
  source 1..1668: mol_type = other DNA
atgcctaataagaacaagaaggaaaaagaatcacccaaggctggcaagtccggaaaatcctccaaggagggacaggatacggtggagagcgaggggacctcgccagaggaacccagcagcccaaaagtgccaccgcctctgctgcctgagctgttagtgttgattttcgggggtctgcagggccgtgatgtgcccccagccgaccaggaaaaactgttcatccagaagctgcgccaatgctgcgtgctgtttgacttcgtttcagacccgctgagtgatctgaagtggaaagaggttaaaagagcagctctctccgaaatggtggagtatatcacccacaatagaaacgtcatcactgagcccatttacccagaggtggtgcacatgtttgccgttaacatgtttcggactcttcctcctagcagcaaccccacaggcgctgagttcgaccccgaagaggatgaaccaaccttggaggccgcctggcctcacctgcagcttgtgtacgagttttttctgcgcttcctcgaatcacctgatttccagcctaacattgctaagaagtacatcgaccagaagttcgtgcttcagctcctcgagctcttcgacagcgaagatccacgcgagcgggatttcctgaaaacaaccctgcacagaatctacggaaaattcctgggcctgcgtgcttatattcggaaacagatcaacaacatcttttaccggttcatctatgaaaccgagcatcacaatgggattgccgagttgttggagatccttggctcaatcattaatggattcgctttgcccctcaaagaggagcataagatctttctcttgaaggtgctgctgcccttgcataaggttaagtcactgagcgtctaccacccacagttggcttattgcgtggtgcagttcttagagaaggactccaccctgactgaaccagtggtcatggcgttactgaaatactggcctaaaactcatagcccaaaggaagttatgtttctgaatgaactggaggagattcttgatgtaatagagccttcggagtttgtgaaaatcatggaacccctcttcagacagctcgctaagtgcgtgagttccccccattttcaggtcgcggaacgtgccctatattattggaataatgagtatatcatgagcctaatatccgataatgcggccaagattctgcccattatgtttccttctctgtatcgaaattccaagacccactggaataaaaccattcatggcctgatatacaacgccctaaagctttttatggagatgaatcaaaaactttttgatgattgcacccaacagtttaaggcggaaaaactaaaggagaaactgaagatgaaagaaagggaagaggcgtgggtcaagatcgagaacctggcaaaagcaaacccccagtataccgtgtactcccaggcaagcaccatgagcatccctgttgctatggagactgacggccccctctttgaagatgtccagatgctgagaaagaccgtgaaagatgaggcccaccaagcgcagaaggatcccaagaaagaccgcccccttgctcgcagaaagtccgaactgccgcaggacccacacaccaagaaggcattggaagcccactgcagagcagacgaactggccagccaggacggcaggtag

SEQ ID NO: 130778 - DNA, 1350 bp, synthetic construct
  misc_feature 1..1350: note = Description of Artificial Sequence: Synthetic coding sequence
  source 1..1350: mol_type = other DNA
atgctgacatgtaacaaagccggcagtcggatggttgtggatgccgcaaattctaatgggccattccagccagtggttctgcttcatatacgagatgtgccacctgccgaccaagaaaagctgttcatccaaaagctgagacagtgttgcgtgctgttcgatttcgtgtccgatcccctttccgaccttaagtggaaggaagtgaaacgggcggctctgtccgagatggtggaatacatcacccacaacagaaatgtgatcaccgagccaatttaccccgaagttgtgcacatgttcgctgttaatatgttcaggacactccccccctcctccaatcccacaggcgccgagttcgatcccgaagaggacgagcctacgctcgaagcagcatggccccacttgcagttagtgtacgagttttttctgagattcctggagtccccggattttcaaccaaacatcgctaagaagtacatcgaccagaaattcgtgttgcaactgctggagctctttgattctgaggatccaagagagagagatttccttaagaccacattgcaccggatttacgggaaatttttgggtctcagggcctacatcaggaaacagattaacaacattttttaccgatttatctatgagacagagcatcacaacgggatcgccgaactgcttgaaatcctgggttctattatcaacggctttgctctcccgctcaaagaggaacacaaaatcttcctgctgaaggtcctcttaccactacacaaggtcaaatcactaagcgtgtaccacccccaactggcctactgcgtggtccagttcttggaaaaagatagtaccctgacagaacctgtggtgatggcacttttgaagtattggccgaaaacgcactcccccaaagaggtgatgttcttgaacgagttggaagagattctcgacgttatcgaaccctcagagtttgtcaaaattatggagccactcttccggcagctcgcgaagtgtgtgagttctcctcactttcaagtggctgagcgggctctctactactggaataacgaatacatcatgagcctgatctcagacaatgctgccaagatcctgccgatcatgttcccatcactgtatcggaactctaagactcactggaataaaacgattcatggcttaatttacaatgcactgaaactctttatggagatgaaccaaaagctattcgatgactgcacgcagcaatttaaagccgaaaagttgaaggagaagctgaagatgaaagaacgtgaggaagcgtgggtgaaaatcgagaacctggccaaagctaatccccaggtgctcaagaaaagaattacatag

SEQ ID NO: 130779 - DNA, 1155 bp, synthetic construct
  misc_feature 1..1155: note = Description of Artificial Sequence: Synthetic coding sequence
  source 1..1155: mol_type = other DNA
atgctgacctgtaacaaagcagggagccgaatggtggtagatgcagcaaactcaaacggcccctttcagcccgtggtcctactgcatatccgtgacgtgcccccagcagaccaggagaagctgtttatccagaaactgcgccagtgttgcgtgctatttgactttgtttccgatcctctgagtgacctgaaatggaaagaggtaaagcgcgctgccctttctgagatggtcgagtacatcacgcacaaccgcaacgtgataaccgaacccatatatcctgaggtcgtgcacatgtttgcagtaaacatgttcagaacgctgcctccatcctcaaatccaacaggtgcagagtttgatcccgaagaggatgaaccaactttggaggctgcgtggccacacctacagcttgtgtatgagttttttttgagatttctggagagccccgatttccagcccaacatcgctaagaaatacattgaccaaaagtttgtcctgcagttgctagagctgttcgactctgaggacccgcgcgagcgggactttctcaaaacaactttgcatcgcatctatggcaaatttctgggcctgagagcctacatccgtaagcaaataaataatatattctatagatttatctatgagacagagcaccataatgggatcgcagagctcctggagatcctgggatcaatcataaacggttttgctctgcccctcaaagaagagcataagatcttcctcctgaaggttctcctgcctctccacaaagtgaaaagtctctctgtctatcatccccagttagcctactgtgtggtacagtttttggaaaaggactctacgctcactgagcccgtcgtgatggctctcttaaaatattggccgaagacacattcacccaaggaggttatgtttttgaacgagctggaagagattctggatgtgattgaacctagcgaattcgtgaaaataatggaaccactgttccgccagctggcaaaatgcgtcagttcaccccattttcaggtcgccgagagagcgttgtactattggaataacgagtacatcatgagtctcataagcgataacgcggcgaagatcttgccaatcatgttcccctctttataccgtaactctaagactcactggaataagtag

SEQ ID NO: 130780 - DNA, 1662 bp, synthetic construct
  misc_feature 1..1662: note = Description of Artificial Sequence: Synthetic coding sequence
  source 1..1662: mol_type = other DNA
aacaaaaataagaaagagaaagagagccccaaagctgggaagagcggcaagtctagtaaggaagggcaggacactgtagagtctgagggaacatctccagaggaaccatcgtctccgaaggtaccgccacctctgttgccagaactgcttgtgttgatctttggtggactgcagggaagagatgtccccccggcagaccaggagaagctgttcatacaaaaactccgtcagtgctgcgttctgtttgattttgtgtccgatccactcagcgatctcaaatggaaagaggtgaaacgggccgcactgagcgagatggtggagtacattacccacaaccgcaacgttattaccgaaccaatctaccccgaggtagtacacatgtttgcagtgaacatgttccgcactcttcccccctccagtaatcccacgggcgccgagttcgaccccgaagaagatgagcctacactagaagccgcatggccccatcttcagcttgtgtacgaatttttcctgcggttcctggagagtcctgattttcagcctaatatcgccaaaaagtacattgatcagaaattcgtgctgcagctcctcgagctgtttgacagcgaggatcctcgcgagcgcgactttctcaaaacaactctgcatcgaatctacggcaaattcctgggtttacgagcatacataagaaaacaaattaacaacatcttctaccggttcatctacgaaacagagcaccataacggcatcgcagagctgcttgaaatcctggggagcattatcaatggtttcgccttgcccttaaaagaggagcataagattttcctcctgaaggtcttactccctctgcacaaggtcaagagcctcagtgtgtaccacccacagttagcctactgtgtcgtccagtttctggaaaaagacagcactctcacagagcctgtcgtcatggcgctcctgaaatactggccaaaaacacactcgcccaaggaggtcatgttcctcaatgaactcgaagaaattctcgatgttatcgaacccagtgaattcgtaaaaatcatggagccactatttcgtcagttggccaagtgcgtgagtagtccccactttcaagtggccgagagggctctctattactggaacaacgagtacataatgtctctgattagtgacaacgcagctaaaatactcccaatcatgtttccatccctctaccgcaacagcaagactcattggaacaaaacaattcacggactaatctataacgcgctgaagctgttcatggagatgaatcagaagctgttcgatgattgtactcaacagttcaaggccgaaaaactcaaagagaagctgaagatgaaggaaagggaagaggcatgggtaaaaatagagaacctggcaaaagccaaccctcaatacactgtgtactcccaggctagtacaatgagcatcccggttgctatggagaccgacggtcctctgttcgaagacgtacaaatgctgagaaaaacagtcaaagatgaggcccatcaggcacaaaaagatcctaaaaaggaccgacctctggcgcgtagaaaatccgaactgccccaggatccccataccaagaaagcactcgaagcccactgtagagctgacgaactggcaagtcaggatggaagatag

SEQ ID NO: 130781 - DNA, 1077 bp, synthetic construct
  misc_feature 1..1077: note = Description of Artificial Sequence: Synthetic coding sequence
  source 1..1077: mol_type = other DNA
atggcagaaggggagcgtcagcctcctcccgatagttctgaggaagcacctcccgctacccaaaatttcatcatccccaagaaggagatccataccgttccagatatgggcaagtggaaacgatcccaagcgtacgcggattatatcgggtttatccttaccttaaacgagggcgtgaagggcaagaagcttacctttgaataccgagtctcagagatgtggaacgaggtgcacgaggagaaggagcaggctgctaagcagagcgtaagctgtgacgaatgcatacccctaccccgcgccggtcattgtgccccgagcgaggccattgaaaaactcgtagcgttgctgaatacgctagacagatggattgacgagacaccacctgtcgatcaaccatcccggttcggcaacaaagcctaccggacgtggtatgccaaattggacgaggaggcggagaatctcgtggcaacggtagtgccaacccatctggccgccgccgtccctgaggtggctgtctaccttaaagagagtgtggggaattccacacgcatagattacgggaccggtcatgaggccgcgttcgctgccttcctctgctgtctatgcaagataggcgtgttgagagttgatgaccagatcgccatcgtgtttaaggtcttcaaccgctatctcgaagtgatgcggaaactacaaaagacatataggatggaacccgctgggtctcagggcgtctggggtcttgacgatttccagttccttcccttcatttggggcagctcacagctcatcgatcatccttacctggaaccaagacactttgtggatgagaaagctgtcaatgagaatcataaagattatatgtttctggaatgtattttattcattaccgaaatgaagactggtccgttcgccgagcactctaatcagctgtggaatatctccgcagtgcctagctggtccaaagtcaatcaggggctcattcgcatgtataaggcggaatgcctcgagaaatttcctgttattcagcattttaagtttggctcattacttcctatacatcctgtaacatctggttag

SEQ ID NO: 130782 - DNA, 990 bp, synthetic construct
  misc_feature 1..990: note = Description of Artificial Sequence: Synthetic coding sequence
  source 1..990: mol_type = other DNA
atggccgaaggcgagcgccagcctccacccgacagttccgaggaagccccacccgcaacccagaatttcatcattcctaagaaggaaattcacacagttcccgatatggggaagtggaagcgttctcaggtgccattcgggaccgtggcttacgcggactacatcgggttcatcctcacccttaacgaaggtgttaagggaaaaaagctcacctttgaatatcgagtctccgaggccatcgaaaagctggtggccctgttgaataccctggatagatggattgatgaaacacccccggtggaccaaccgagcagatttgggaacaaggcgtaccggacatggtacgcgaagctcgacgaggaggctgagaacctagtcgctaccgtcgtgcctacacacttagcagcggccgttcctgaagttgcggtatatctcaaggagtctgtgggaaattcgacccgtattgattacgggacaggccacgaagctgcattcgccgctttcttgtgttgtctgtgcaaaatcggagttctcagagtagacgaccagatcgccatcgtctttaaagtgtttaaccgatacttagaggtgatgagaaagctgcagaaaacctatcggatggaacctgcaggcagccagggtgtctgggggctagacgacttccagtttctgccttttatctggggctcttcccagttgatcgaccacccttacctcgagccacggcacttcgtggatgagaaggccgtcaacgagaatcataaggactatatgtttctggaatgcatcttgtttataactgaaatgaagacaggacccttcgccgagcactccaatcaactgtggaatatctcagccgtgccctcttggtccaaggtgaatcaggggttgatcagaatgtataaagcagagtgtctggagaaattccccgtaatacaacacttcaaatttggctccttgctgcccatccatcctgtgacttcaggttag

SEQ ID NO: 130783 - DNA, 846 bp, synthetic construct
  misc_feature 1..846: note = Description of Artificial Sequence: Synthetic coding sequence
  source 1..846: mol_type = other DNA
atggccgagggggagcgtcagcccccaccagacagctcggaggaagcgccacctgctactcagaacttcatcatacctaaaaaagagatacacaccgttcctgacatgggcaagtggaagcgttctcaggcgtacgccgattacatcggattcatactgaccttgaatgagggggtgaaggggaaaaaactcacatttgagtatagagtttcggaagaggcggaaaatcttgtggcaacggtcgtccccactcatttggctgccgccgtgcccgaggtggccgtttaccttaaagagtctgtgggaaactccacccgcattgattacggcaccggccacgaggctgcttttgcggctttcctatgttgtctgtgtaagatcggcgtgctgcgagttgatgaccagatcgcaattgtgttcaaggtttttaaccggtacctcgaagtgatgcgcaagttacaaaagacataccgcatggaaccagctggatcgcagggggtgtgggggctggacgatttccagtttcttccttttatttggggctcttctcagctgatagatcacccatacctcgaaccaaggcactttgtcgatgaaaaggctgttaacgaaaaccataaggactatatgttcttggagtgcatcctgtttatcacagagatgaaaacaggtcccttcgccgaacactccaaccagctctggaatattagtgctgtgccttcatggtccaaggtgaaccagggtttgatacgaatgtacaaggcagagtgtctggaaaagttcccagtgatccagcattttaaattcggatccctgcttccgattcaccctgtaacgtccggttag

SEQ ID NO: 130784 - DNA, 885 bp, synthetic construct
  misc_feature 1..885: note = Description of Artificial Sequence: Synthetic coding sequence
  source 1..885: mol_type = other DNA
atggctgaaggcgagaggcaacctcctccagatagctcagaagaggctccaccagctacacaaaacttcataatcccaaaaaaggaaatacacacagtgcctgatatgggcaagtggaagagatcacaggcaattgaaaaactagttgcactcctgaacactttagaccggtggatcgacgagactccaccagtcgatcagccctcacgttttggcaacaaagcatatagaacgtggtatgccaaattagatgaggaggcagagaacctggttgctactgtagtccccacccatcttgccgcagccgtgccggaagtcgccgtatacctgaaagaaagtgttgggaactctacacgaatcgactacgggacagggcacgaagcagccttcgcggcttttctctgctgcctgtgcaagattggggtgcttcgcgtcgacgatcagatcgcaatagtctttaaagtgttcaatcgttatcttgaggtgatgcggaagcttcagaaaacttataggatggaacctgctggatctcagggcgtgtgggggctggacgattttcagttcttgccattcatttggggctctagccagcttatcgaccacccgtatctcgagccgcggcacttcgtcgacgaaaaagctgtgaatgagaaccacaaagattatatgtttctagaatgcatactgttcattaccgagatgaagaccggcccttttgcagaacacagcaatcagctttggaatataagtgccgtgccctcttggagtaaagttaaccagggactgatcagaatgtataaggccgagtgcctggagaagttcccagtcatccaacatttcaaatttggtagcctgctacctatccaccctgtgacttccggctag

SEQ ID NO: 130785 - DNA, 972 bp, synthetic construct
  misc_feature 1..972: note = Description of Artificial Sequence: Synthetic coding sequence
  source 1..972: mol_type = other DNA
atggccgaaggagaacggcagccacctcccgatagcagtgaggaagccccacccgctacacagaactttatcattccaaaaaaagagattcacactgtccctgacatgggcaaatggaaacgatctcaggcctacgccgactatattggctttattttgacccttaatgagggggttaaaggaaagaagcttacctttgaatacagggtgtctgaggctatcgaaaaacttgtggctctcttgaatacacttgataggtggattgatgagactccacccgtggatcagccctccaggttcggtaataaagcatacagaacatggtatgccaagttagatgaagaagccgaaaacctggtggcaacagttgtgccgactcacttagctgccgctgtgccagaagtcgccgtgtacttaaaagagtccgtcggaaattctacaaggatcgactacggcaccgggcatgaagctgcgtttgcggcttttctgtgctgcttgtgcaagattggggttctgcgggtcgacgatcagatagccatcgttttcaaggtgttcaatagatatctggaggtgatgcgcaagttgcagaaaacctacagaatggaacctgctggctcgcagggggtttggggactggacgacttccagttcctacctttcatctggggttcttcacaattaattgatcatccctacctcgagccgcgccactttgtggatgagaaggcagtaaatgaaaatcataaagattatatgttcctggagtgcatcttattcatcacagagatgaaaacaggaccatttgcggagcactctaaccaactctggaacattagcgccgtcccctcctggtcaaaggtgaatcagggcctgattcggatgtacaaggctgagtgtttggaaaagtttccagttattcaacacttcaagttcgggagcctcttacccatccaccctgtaaccagtggctag

SEQ ID NO: 130786 - DNA, 972 bp, synthetic construct
  misc_feature 1..972: note = Description of Artificial Sequence: Synthetic coding sequence
  source 1..972: mol_type = other DNA
atggctgagggcgaacggcagccgccccccgactcctctgaggaagctcctccagcgacccagaactttattattcccaaaaaggaaattcataccgtgcccgacatgggcaaatggaagcggtctcaagcctacgccgactatataggatttattttgaccctcaacgagggcgtgaagggtaagaaactgacatttgaataccgtgtaagtgaggccatcgaaaaactggtcgctttactgaacactttggataggtggattgacgaaaccccccccgttgaccagcccagcaggtttggtaataaagcttacaggacatggtatgccaaactggatgaggaggccgagaacctggtggcgacagtggtgcctactcacctggccgctgccgttcctgaggtcgctgtttacctcaaggagtccgttggcaattccaccaggatcgactacggaacagggcacgaagctgcctttgccgctttcctgtgctgcctctgcaagattggagttttgcgggttgacgaccaaatcgccatcgtgttcaaggtcttcaacagatatctggaagtgatgagaaaactgcagaagacttacagaatggaaccagctggcagccaaggcgtctggggccttgatgactttcaattccttccttttatttggggctcctcccagttgattgatcacccatacctggaaccacgccatttcgttgatgaaaaagcagtgaatgagaatcacaaggactacatgtttttagagtgtattctttttattacagaaatgaagaccgggccattcgcggaacacagtaatcaactgtggaacatctctgccgttccatcttggtcgaaggtgaaccaaggtcttattcgtatgtacaaagctgaatgtctggagaaattccctgtcattcaacacttcaaattcggctccctgctcccaatccatccagtcacctccggatag

SEQ ID NO: 130787 - DNA, 792 bp, synthetic construct
  misc_feature 1..792: note = Description of Artificial Sequence: Synthetic coding sequence
  source 1..792: mol_type = other DNA
atgggaaaatggaaaagaagccaggcatatgccgactatattgggttcattctcactctaaacgagggcgtgaaaggaaaaaagctgaccttcgaatatcgcgtgtccgaggccattgaaaagctagtcgctctgcttaatacacttgataggtggatcgatgagacgcctccagtcgaccagccaagcaggtttggaaataaggcctatagaacatggtacgctaagctggacgaggaagccgagaacctcgtagccaccgttgtgcctacccaccttgccgctgccgtaccagaggtcgccgtgtatctaaaagagagtgtgggcaacagtacccgcattgactatggaactggccacgaagcggcattcgcagcctttttgtgctgtctttgcaaaattggggttctgagagtggatgatcaaattgcaatcgtgttcaaggtcttcaataggtatctggaggtgatgaggaagctgcagaaaacatatcggatggaacccgctggatcccagggtgtgtgggggctcgacgatttccagttcctgccatttatctggggtagcagccagttgatcgaccacccctacctcgagcctcggcacttcgtagacgagaaagctgttaacgagaaccataaggattacatgttcctagagtgcatcctgttcattactgaaatgaaaacaggaccttttgccgaacacagcaatcagctgtggaacatctcagctgtaccatcttggtctaaagtgaatcagggcctgattagaatgtataaagccgaatag

SEQ ID NO: 130788 - DNA, 1125 bp, synthetic construct
  misc_feature 1..1125: note = Description of Artificial Sequence: Synthetic coding sequence
  source 1..1125: mol_type = other DNA
atggccgaaggggaacgtcagccgccccctgatagctccgaggaggccccccccgccacccagaactttatcatccctaaaaaagaaattcatacagtccccgacatggggaagtggaaaaggtcccaggcctacgccgattacattggcttcattctgacgttgaacgagggtgtgaaaggtaagaaactgaccttcgaataccgcgtgtccgaaatgtggaatgaagtccacgaggaaaaggagcaagcggctaagcagtcggtatcatgcgacgagtgcatcccactcccccgcgcaggtcactgtgctccttccgaagccattgaaaaattggtggcactcctgaacaccctggaccgatggatagatgagacaccacccgtggatcagccaagccggtttgggaataaagcctatcgaacttggtatgcgaagctggatgaggaggccgaaaatctggttgcgaccgtcgttcccacacatctggcagcagccgtgccggaggtggcggtgtacctaaaggagtcggtgggaaattccacaaggatcgattatggcaccgggcacgaggccgcttttgccgcctttttgtgctgcctgtgtaagatcggggtgctgcgcgtcgacgaccaaattgctatcgttttcaaggtctttaacagatacctagaggtgatgcggaaactgcaaaagacctaccgaatggagcctgcaggctctcagggggtctgggggcttgacgactttcaatttctaccatttatctggggttcctcccagctgatcgaccatccgtatcttgaaccacgacattttgtcgacgaaaaggctgtgaacgagaaccacaaggactatatgtttctcgagtgcattctttttatcaccgaaatgaaaaccgggccgtttgccgagcacagtaatcagttatggaatatttccgccgtgcccagctggtcgaaggtcaatcagggcttaatcaggatgtacaaagcggaggcttccccatctgatacctggggactggggatatcacacctggggcacgggcagtcggaaaagcatcaacccccccagcccaggaaggctgctgtgcagctttgtcctgacgagctgggtggctag

SEQ ID NO: 130789 - DNA, 456 bp, synthetic construct
  misc_feature 1..456: note = Description of Artificial Sequence: Synthetic coding sequence
  source 1..456: mol_type = other DNA
atgaagaccggcccatttgccgaacacagcaaccaattgtggaatatctcagccgtcccctcctggagcaaagtgaaccaggggttaatcagaatgtataaagctgaagtgagcggcggctggcccgtatgcccttctctactgccccacctggtgctgggttgggggcagtcgaaaagatgtggcacttggggctcctgctttttgctccctcactgctttgccttaaatcttcgacccgctcctctaaccctgggcgcatcagaatcgcccatttggggcatgggtagccaacgaagcactagccacccctcccctgaaaagttacagagctcaagcgtactgatgtcactggaggctgaagccaggacctgctgtatgggtagtgggggggacggagggctcccttctcctcttagctctggtcagagactcctgaaggcacgagcagtctag

SEQ ID NO: 130790 - DNA, 2802 bp, synthetic construct
  misc_feature 1..2802: note = Description of Artificial Sequence: Synthetic coding sequence
  source 1..2802: mol_type = other DNA
atggctgatctgtctctgctccaggaggacttacaggaagacgctgacggctcactcgactttgtctcacaggatgaaatgctcacccccctcgggagactggataaatacgctgcgtccgagaatattttcaatagacagatggtagcccgatccctgttggatacacttagagaggtgtgcgacgatgagagagactgcattgccgtactcgaacgcatttctagattagctgacgattccgaacctacagtgagggctgagctgatggaacaagtgccacacatcgctttattttgccaggaaaatagaccaagtatcccctatgccttcagcaaatttcttctcccgatcgtggttagatatctggccgatcagaacaatcaggtgagaaagacaagtcaggcagcattgttggccttgctggaacaggagctaattgaacgattcgacgtggagaccaaggtgtgccctgtgctcatcgagctaacagctccagatagtaacgacgacgtgaagacagaagcagtggccataatgtgcaagatggcccctatggtgggcaaagatataactgagagactaattcttccccgcttctgtgaaatgtgttgtgattgccgcatgttccacgtgaggaaggtttgcgccgctaactttggagacatctgttctgtcgtcgggcagcaggccaccgaggaaatgctgctgccgcgcttttttcagctgtgttccgataatgtatggggagttaggaaggcgtgtgctgagtgcttcatggctgtctcctgcgccacatgccaggagataagaaggaccaagctcagtgccctatttatcaacctgatatcggatcctagtcggtgggtgcgtcaagccgcctttcaaagtctgggcccatttattagtacttttgccaacccctcttcctctgggcaatacttcaaggaagagagtaaaagttcggaagagatgtccgttgagaataaaaatcgcacgcgggatcaagaagctcccgaagacgtgcaggtacggccagaagatactcctagcgatctctcagtgtctaattcctccgtgattctcgaaaataccatggaagatcacgctgctgaagcatctggaaaaccgctcggcgagatctctgtgcccttggatagcagcttgctgtgcactctgagcagtgagagccatcaagaggccgcttccaacgagaatgacaaaaaacccgggaactataaatctatgttaaggcccgaggtgggtacaactagccaggactctgcgctactggaccaggagctgtacaattcctttcacttctggcgaacacctttgcccgaaatcgatctggatatcgaactagaacagaattccggagggaaaccgtcgcctgaagggcccgaggaagagtcggagggtcccgtgccatcaagccccaatattactatggctacgcgcaaagagctagaggagatgatcgagaacctggagccccacatcgatgaccctgacgtaaaagcgcaggtggaagtcctgtcagctgctctcagagcctcgtctcttgacgctcatgaagaaacaattagcatcgagaaacgcagtgatctccaagacgagctcgatatcaacgagctcccaaactgtaagatcaatcaggaggatagcgtcccactgattagcgatgctgtcgagaacatggactccactctgcactacatacatagcgactccgacttgtccaacaattccagcttttctcccgatgaagagaggcggaccaaggtgcaggacgtagttccgcaggccctgctggatcagtacttatcaatgaccgatccatctcgtgcacagaccgtcgataccgagatcgccaagcactgtgcttattcgctccccggcgtggctctgacgctcgggcgtcagaattggcactgcttgagagagacctacgagacactggcttcagatatgcagtggaaggtcagacgtactctggccttttcaatacacgagttggctgtgatcctcggtgaccagttgactgccgccgacttagtccctatttttaatggctttctgaaagacctcgatgaagttcggattggagtgctgaaacacctgcacgatttccttaagctattgcacattgataaacggcgtgaatatctgtatcagctgcaggagtttttggtcaccgataattcccgcaactggaggttcagggccgaactggccgaacagcttattctcctgcttgagctgtactctcctcgcgatgtttacgattacctacggcccattgccctcaacttatgcgccgataaggtgagcagtgtgagatggatcagttacaaactggtttccgagatggtcaagaagctgcacgcggcgaccccacccacatttggtgtggacctcatcaacgagttggtggagaacttcggacgctgccccaaatggagcggcagacaagccttcgtgtttgtttgtcaaacggtcatcgaagacgattgcctccctatggaccagttcgcggtgcatctcatgccacacttactcacgctggccaacgaccgtgtgcccaacgtccgggtcctgctggctaagacccttcgtcagactttgctagaaaaggattactttctggcctctgcgtcctgtcatcaggaagccgtagagcagaccataatggctttacagatggatagagactcagacgtcaaatatttcgcatccatacatcctgcaagtacaaaaatcagcgaagatgccatgagcacagcgagctcgacctactag

SEQ ID NO: 130791 - DNA, 924 bp, synthetic construct
  misc_feature 1..924: note = Description of Artificial Sequence: Synthetic coding sequence
  source 1..924: mol_type = other DNA
atggccgagatctctgacctcgatcggcaaattgagcaactaagacgatgtgagctcattaaggaaagtgaggttaaggccctgtgtgccaaagcccgcgagatcctggtggaagaatcaaacgtgcagagggttgacagccccgttacggtctgcggggacatccatggacagttctatgatttgaaggaattgtttcgcgtgggtggagacgtccccgaaaccaactatctcttcatgggggacttcgtcgaccgaggattttacagcgtcgagacattcctactgctgcttgccctgaaggtgaggtaccctgataggatcactttgatcagggggaaccacgagagccgacagatcacccaggtttacggcttttatgacgagtgcctacgcaaatacggaagcgtgacggtctggcgatactgcacagaaatattcgactacctctctctctctgccattattgatgggaagattttttgtgtgcatggcggcctgtcgccttccatacaaactctggaccagatccggacaatcgaccgcaaacaggaggtgccccacgatggccctatgtgcgatctcctgtggtcggatccagaggatacaactggatggggagtaagtccaagaggcgctggctacctgttcgggtcggacgtggtggcccagttcaatgctgccaatgacatcgatatgatttgcagggcgcaccagctggtgatggagggttacaaatggcacttcaatgagactgtgttgacagtgtggagcgctccaaactactgttacagatgcggcaacgtcgctgcaatcctggagttggacgagcatctgcaaaaggattttatcattttcgaagccgctccccaggaaactagaggcattccctccaaaaagcccgtggccgactatttcctctag

SEQ ID NO: 130792 - DNA, 1413 bp, synthetic construct
  misc_feature 1..1413: note = Description of Artificial Sequence: Synthetic coding sequence
  source 1..1413: mol_type = other DNA
atgcttcaggtcaggacatacctaacagagccaacagtccgcgccgagctcatggaacaggtccctcacattgcgctgttttgccaggagaatcggccctccataccatacgccttcagcaaatttctgctgcctattgtggtgagatatctggcagaccagaataatcaggtgcgcaagacctctcaggccgccctgctcgccttgctggagcaggagctgattgaacgctttgacgtagagacaaaagtgtgtccggtgctgattgaattaacagcccccgatagtaacgatgacgtcaagactgaggcggtggccatcatgtgtaagatggcgccaatggtgggaaaagacatcactgaaagactgatcctgccacggttttgtgagatgtgttgcgactgccgaatgttccatgtgagaaaagtgtgcgctgcaaacttcggtgacatttgctccgttgtcggccagcaagcgacagaggaaatgctcctgccaaggttctttcagctttgctcagacaatgtttggggagttagaaaagcgtgcgcagaatgtttcatggccgtgagttgtgccacatgtcaggaaattcgtcgtaccaaactgagcgccctatttatcaacttgatcagtgacccttctaggtgggtacgccaggctgcgtttcagtcccttggtccgttcatctccacattcgcaaacccgtcttcctccgggcagtacttcaaggaagagtctaagtccagcgaagaaatgtcggtggagaataagaatcgtacacgggatcaggaggcgcctgaggacgtgcaggtccgtccagaagatacccctagcgacctttctgtgagcaattcaagcgttattcttgagaacacaatggaggaccacgcggctgaagcatccggcaaaccgcttggggaaattagcgtgcccctggactctagcctgctttgtacattgagctcggagtcacatcaggaagcagcgtcaaatgaaaatgacaagaaaccaggaaattacaaaagcatgctgcgccccgaggtaggaacgacgtctcaggatagcgccctcctggatcaagaactgtataattcattccatttctggaggaccccacttcctgagatagatcttgatattgaactggagcagaacagcggaggaaaacctagcccagagggaccagaagaagaaagcgaaggcccagttccttccagccctaacatcaccatggcaactcgcaaggagctcgaggagatgattgaaaacctggaaccacacatcgacgatcctgatgtgaaggcccaggtggaggtcctttcagctgctttgagagcctcctctctcgacgcccatgaagagaccatctctattaagcgtgaggttatctgcaagatgaattggatttag

SEQ ID NO: 130793 - DNA, 2853 bp, synthetic construct
  misc_feature 1..2853: note = Description of Artificial Sequence: Synthetic coding sequence
  source 1..2853: mol_type = other DNA
atggctgatttaagcctgttgcaagaagacctgcaggaagacgcagacggctttggagtagacgactactcctccgaatccgatgtgatcatcatccccagcgcgctggacttcgtgtctcaagatgagatgttgacacccttggggcgcctagacaaatatgcggcctccgaaaacatttttaatagacaaatggtggcacggtctctcctggacacactgcgcgaggtatgcgacgacgagcgcgattgcatcgccgttctagagaggatttctaggctggcagatgattccgaacctacagttagagcagaactgatggaacaggtcccccacatcgccctgttctgccaagagaatcgtccatctatcccctacgcgttcagcaaattcctcctccctatcgtcgtgagatacctggctgaccagaataaccaggtccggaagactagtcaagctgctctcctggccctgctggagcaggagctgatcgagagattcgacgtggaaacgaaggtctgtcctgtcttaattgaactcacagcaccagacagcaacgatgatgttaagacagaagccgtagcgatcatgtgcaaaatggcaccaatggtcgggaaggacatcaccgagcggctaattctccctaggttctgtgagatgtgctgcgactgtagaatgttccacgtacggaaggtttgcgcagctaatttcggggatatttgttcggtcgtcggccaacaggctacagaagaaatgcttttgccacgttttttccagttgtgttcggataacgtatggggagtacgcaaagcttgtgctgaatgcttcatggcggtatcttgtgctacatgtcaggagataaggcgcactaagctgtctgctttgtttatcaatctgataagcgaccctagcagatgggtccggcaggccgcttttcagtctctgggcccgtttatctctacgttcgcaaatccatcttcatcgggtcagtacttcaaggaggagtcgaagagctcagaagaaatgtcagttgagaataagaaccgcactcgagatcaagaggccccggaagatgttcaggtgcggcccgaagacactccttctgatctatctgttagtaactcctccgtcattctggagaatactatggaggatcacgccgccgaggcatccggcaagccgttgggcgaaattagcgtcccactcgactctagtctgctttgcaccttgagctctgaatcacatcaagaggccgcaagcaatgaaaacgataagaagccggggaattacaaaagcatgctcagaccagaagttgggactacttcacaggattctgctctgcttgatcaggaattatataactccttccacttctggaggacccctctccccgaaatcgacctagacatcgagctcgaacaaaactcaggcggaaaaccatcaccggaaggccctgaagaagaatcggaaggccctgtgcctagcagccctaacataacaatggccacgcgcaaagagttggaggagatgatagagaatctggaaccacatatagacgatccagatgtaaaagcacaggtggaagtccttagcgccgctctcagggctagttcactggacgcacacgaggaaacaatttccatcgaaaaacgcagcgatctgcaggacgaacttgatattaacgaactcccgaactgcaagattaaccaggaagatagtgtgcctctgatatccgacgccgtagaaaatatggattcaacgttacactacatccacagtgattctgatctgagtaataactccagcttcagcccagacgaggaacggcggactaaggtccaggacgtagtgccacaagcgctactggaccagtatctgtccatgaccgacccttccagagcacaaacagttgatactgagattgcaaagcattgcgcatattccctgcctggagtggctctgactctgggacgtcagaattggcactgcctcagggaaacttacgaaaccctggccagtgacatgcaatggaaagtgcgccgcacacttgcgttcagtatccatgaattggcagtgatcttgggcgaccagctcacagctgcggacctcgtacctatctttaacgggttcttaaaagacctggacgaggtgcgcattggggtgttaaagcatctccatgactttctgaagctgctccacattgataagcggcgggagtatctataccaactgcaggaatttctggtcaccgacaatagccggaattggaggttcagggcagagctggccgagcaactgatcctgttactggagctatacagtcccagagacgtatacgattatcttaggcctatcgcactaaacttgtgcgccgataaggtgtcctccgtgagatggatcagctacaagctggtttctgagatggtgaaaaagctgcacgcggcgacccctccaacttttggggtagatctaataaacgagctcgttgagaactttggccgctgccctaagtggtcggggaggcaggctttcgtcttcgtctgccagacagttattgaggacgactgtctcccgatggaccagtttgctgtacacctcatgccacatctccttacattggccaatgaccgagtgcccaacgttagagtgttgctggccaaaactctgaggcaaactctgctcgagaaggattatttcctggcaagcgccagctgtcaccaagaggccgttgaacagactatcatggcgcttcagatggatagagatagtgacgtgaaatactttgctagcatacatcccgccagtacgaagatctcagaggacgccatgagcacagcctcgtctacgtactag

SEQ ID NO: 130794 - DNA, 1086 bp, synthetic construct
  misc_feature 1..1086: note = Description of Artificial Sequence: Synthetic coding sequence
  source 1..1086: mol_type = other DNA
atggatgattttaggacttccgcacctgaaccaaggggccctcctaatccaaatgtcgaatatattccattcgatgagatgaaagagaggatcctgaagatagtgacagggtttaatggaataccctttactatccagcgcttatgtgagttgctcaccgatcctcgtcgaaattatacggggacggacaaattcctgcgaggggtggagaaaaatgtgatggttgtaagttgtgtgtatcccagttccgagaaaaacaatagtaactccctgaaccggatgaacggagtcatgttccccggtaatagcccatcttacaccgaaaggagtaatattaatgggcctggaaccccaagacccctgaataggcctaaagtcagtctttccgcaccaatgaccactaacgggctacctgagtctaccgacagcaaggaagcaaatcttcagcaaaatgaggagaagaatcacagcgacagttccaccagcgaatctgaagtgtctagcgtgagtcctctgaagaataaacaccccgacgaagatgctgtcgaagccgagggacatgaggtaaagcggctccgctttgacaaggagggggaggtgcgggaaacagccagccagacaaccagctcagagattagtagcgtgatggtgggggagacagaggcttcttcctcctcccaggacaaagacaaagactccagatgtacccgccaacattgcactgaggaggacgaggaggaggatgaagaagaggaagaggaatcatttatgacctctcgggagatgatccctgagagaaagaaccaggagaaagagtccgatgatgccctgacggtcaacgaagaaacatcagaagaaaataaccagatggaagagagcgatgtgagccaggccgagaaggatctgctgcatagcgaaggctcggagaatgaggggcctgtttcctcatcgtcttcagactgcagggagaccgaggagctggtgggctcgaattcttccaaaacaggtgagatcctgagcgagtcatccatggaaaacgatgatgaggccactgaagtgactgatgaaccaatggagcaggattag

SEQ ID NO: 130795 - DNA, 1254 bp, synthetic construct
  misc_feature 1..1254: note = Description of Artificial Sequence: Synthetic coding sequence
  source 1..1254: mol_type = other DNA
atggatgtagaaagactgcaggaggccctcaaagatttcgagaaaaggggaaaaaaggaagtatgtccagttctggaccagttcttgtgtcatgttgccaagaccggggaaacaatgatccagtggtctcaattcaagggctattttatcttcaaactggaaaaagtgatggatgatttcagaaccagcgctcccgagccgcggggaccacccaatcctaacgtagagtacattcccttcgacgaaatgaaggaaaggatccttaaaatcgtaacaggattcaacggaatacctttcacaatccagcgcctgtgcgagttattaaccgacccacggcggaactataccgggacagacaagtttctcaggggagttgagaagaatgtaatggtagtgtcctgcgtgtacccctcaagtgagaaaaataacagcaactccctgaacaggatgaacggcgtgatgttcccaggaaattctcccagctatacggaaaggagtaatatcaacggacccggtactcctcggcccctgaataggccaaaggtctccctgagtgccccaatgacaaccaacggactgcctgaaagcaccgatagcaaggaggccaatctgcaacagaacgaggagaaaaaccattctgattcttccacctctgaaagcgaagtctcctccgtatcgccgttgaaaaataagcacccagatgaggacgccgtggaggctgaaggacacgaggtgaaaagactgaggtttgacaaagagggcgaggtgagagagactgccagccagactacatcttccgaaattagctctgtgatggtaggcgaaacggaggcttctagttcatcccaggataaggataaggattcgcggtgcacaaggcagcactgcaccgaagaggacgaagaggaagacgaagaagaagaggaagagagctttatgacctcgcgggaaatgataccggagaggaagaaccaggagaaggaaagcgatgacgctttgactgtgaatgaagagacctccgaagagaataatcagatggaggaatccgacgttagccaagccgagaaggatcttcttcacagtgaaggatctgagaatgagggccctgtttctagcagctcatccgattgtcgggagacagaggagctcgtggggtcgaactctagcaagactggcgagatcctcagcgagtcaagcatggagaatgatgatgaggctacagaagtcactgacgaacccatggagcaagactag

SEQ ID NO: 130796 - DNA, 1083 bp, synthetic construct
  misc_feature 1..1083: note = Description of Artificial Sequence: Synthetic coding sequence
  source 1..1083: mol_type = other DNA
atggacgtcgaaaggctacaggaagcactgaaggattttgagaagaggggtaaaaaagaagtttgccccgtcctcgatcagtttctgtgccacgtggctaagacaggcgaaactataatccctttcacaatccaacggctctgtgagttattgaccgacccccgcagaaattacacagggactgataagttcctgaggggagtcgagaagaatgtgatggtggtgtcatgcgtttacccatcctccgaaaagaataattctaatagcctgaaccgtatgaacggcgtcatgttccccggaaactcaccctcgtacacagaaaggtcgaacattaacggacccggaactcctagaccactaaacagacccaaagttagcttatccgcgccaatgacgacaaacggccttcccgagagtacagatagcaaggaagcaaacctccaacagaatgaagagaaaaaccacagtgacagctctaccagtgaaagtgaagtgagctctgtgtcaccgttaaaaaataaacacccagatgaagacgccgtggaggctgagggccacgaggtgaagcgcctgagatttgataaggagggtgaagtcagggagacggcctcccaaacaacttcctcggaaatctcgagcgtcatggtgggagagacagaggcatccagttcaagtcaagataaggataaagactctcggtgcactagacagcattgcactgaggaagacgaagaggaagacgaggaggaagaggaggaaagctttatgacttccagagaaatgattcctgagagaaagaatcaggaaaaggaatccgatgacgcactcactgtgaatgaggaaacctctgaggaaaacaaccagatggaggagtcagacgtgagccaggccgagaaggacctgctgcacagcgaaggctcagagaacgaaggccctgtgtcttcatctagttccgactgtcgtgaaacagaggagttggtgggaagcaacagctccaagacaggagagatcctgagcgaaagctcaatggaaaacgacgacgaagctacagaggtgacagacgagccgatggagcaggattag

SEQ ID NO: 130797 - DNA, 1116 bp, synthetic construct
  misc_feature 1..1116: note = Description of Artificial Sequence: Synthetic coding sequence
  source 1..1116: mol_type = other DNA
atggcgttgggtaagtttagggccgctttgagggattacgaaactgtagtgaaagtgaagccacatgacaaggacgctaaaatgaagtatcaagaatgcaacaaaatcgtcaaacagaaagcgttcgagcgagctatcgctggggacgaacataagaggtccgtcgtcgacagtctcgatatcgaaagcatgaccatcgaggatgagtattcaggcccaaaacttgaggacggaaaggttaccatttccttcatgaaggaactgatgcaatggtacaaggatcaaaaaaaacttcatcgcaagtgcgcatatcagaccgaaaaaatcactgtatgtggcgacacacacggccagttctatgacctgttgaacatattcgaactgaacgggctgccgagcgaaactaatccctacatcttcaatggcgatttcgtcgacagaggatccttcagtgtggaggtaattctcacactgtttgggtttaagctcttgtatcctgatcacttccacctgttaaggggtaatcacgaaaccgacaatatgaatcagatctatggatttgaaggtgaggtcaaggccaagtatacagctcagatgtacgaactttttagcgaagtgtttgaatggctcccactggctcagtgcatcaatggaaaagtgctcatcatgcatggagggctgttttccgaagacggggtcactctggacgacattcggaagatagaaagaaatcgacagccccccgacagcggcccaatgtgcgatctactatggtccgatcctcagcctcaaaatggccggtccataagcaaaaggggagtgtcttgtcagttcgggcctgatgttaccaaggcattcctggaggagaataacctcgactatatcatacgaagccatgaggtcaaggccgagggttatgaggtggcgcatgggggccgctgtgtcacagttttcagcgccccgaactactgcgatcaaatgggaaataaggctagctatatccacctccaagggtctgatctgaggccccagttccatcagtttacagcagtaccacaccccaacgttaaaccaatggcctatgcgaataccctcctgcaactgggcatgatgtag

SEQ ID NO: 130798 - DNA, 1500 bp, synthetic construct
  misc_feature 1..1500: note = Description of Artificial Sequence: Synthetic coding sequence
  source 1..1500: mol_type = other DNA
atggcaatggctgagggggagcgcaccgaatgcgctgagcccccacgggatgaacctcccgctgacggcgcattgaaaagggccgaagagttgaagacccaggcaaatgactactttaaggctaaagactacgagaatgccatcaaattctactcgcaggcgattgaattgaatccttccaacgcaatatactatgggaatagatcacttgcttacctaagaaccgagtgctacggttatgccttgggcgacgctaccagggcaatagagctggacaaaaaatacataaaaggatactacagacgtgccgcttcaaatatggctctcggcaaattccgcgccgcgcttagggactacgagacagtagttaaagtgaagccgcacgataaagacgctaaaatgaaatatcaagaatgcaataagatcgttaagcagaaagcattcgagagagcgattgctggagacgagcacaaacggtctgtggtggacagcttggacattgagagcatgacaatcgaggatgagtattcagggccaaagttagaagatggaaaagtcactatcagcttcatgaaagagttaatgcagtggtacaaggaccagaagaaattgcacaggaaatgtgcctatcagattctcgtacaggtgaaggaagtattgagcaaactgtcaactctggtggagaccaccctgaaggagactgaaaagattacggtctgcggtgatacccacggccagttctatgatcttctgaatatcttcgagctcaacgggttaccctcagagactaatccttacatctttaacggcgattttgtagatcgggggagcttttcagttgaggtgatcttgaccctgtttggattcaaacttttatatcctgaccactttcacctactccggggcaatcatgaaactgacaatatgaatcaaatctatgggtttgaaggtgaagtgaaggccaagtacactgcccagatgtatgagctgttttcagaagtatttgaatggctgcccctggctcagtgtatcaacgggaaggttctgatcatgcatggaggattattctcagaggatggtgtaaccctggacgatattcgtaagatcgaaaggaatcgtcaaccgcctgattccgggccaatgtgcgacctattgtggagcgacccacagccgcagaacggacggtctatcagtaaaaggggtgtgagttgtcagttcgggcccgacgtgaccaaggccttcctagaggagaacaatctggactatattataaggagccatgaggtcaaggcagagggctatgaggtagctcacggtggccggtgcgtgacagtgtttagcgcaccgaattattgtgatcagatggggaataaggcttcctacatccatttgcaaggcagcgaccttagacctcaatttcaccagttcaccgctgtccctcaccccaacgtgaagcctatggcttatgctaatacactgctgcagctagggatgatgtag

SEQ ID NO: 130799 - DNA, 1461 bp, synthetic construct
  misc_feature 1..1461: note = Description of Artificial Sequence: Synthetic coding sequence
  source 1..1461: mol_type = other DNA
atggcgatggcagaaggagagagaaccgagtgcgctgaaccgccacgggacgaaccccctgccgatggggctctgaagcgggcagaggagcttaagacgcaggcgaacgactacttcaaggctaaagattatgagaacgcaattaaattttatagccaggccattgagctgaatccctctaacgcaatctactacggatacgctctcggcgacgcgacacgtgccatcgaactggataaaaagtacattaagggctattatagaagagctgcgtcgaacatggctcttggaaagttcagggcggcactccgtgactatgaaaccgtggtgaaggtgaagccccacgacaaagatgcaaaaatgaaatatcaagagtgcaacaagatcgtgaagcagaaagctttcgaaagagctattgcaggtgacgaacacaaaaggagcgttgtggactcccttgacatcgaatcgatgacaatcgaggatgaatattccggacctaagctggaggacggtaaagttacgatttcgttcatgaaagaacttatgcagtggtacaaggaccagaagaagctccaccgcaagtgcgcctaccagatcttggttcaggttaaagaggtgctctctaagctttcaactctggtcgaaactacacttaaagagacagaaaaaatcactgtgtgcggggacacacacgggcagttctacgatctgcttaatatctttgagctcaacggcttaccttctgaaacaaacccatacatcttcaatggggactttgtagaccggggttccttttccgtggaagttattctgactctcttcggatttaagcttctctacccagatcatttccaccttctcagaggcaatcatgaaaccgataatatgaaccagatctatggttttgagggtgaggttaaggcgaagtataccgctcagatgtatgagctcttttccgaagtttttgaatggctacccctagcacagtgtatcaatggaaaagttctgattatgcatggaggcctcttcagcgaggatggagttactctggacgacatccggaaaattgaaagaaaccgtcagccccctgattcgggaccaatgtgcgatctgctgtggtcggaccctcagccgcagaatggtaggagcatttctaaacgtggcgtgagctgccagtttgggcccgacgtgacaaaggcatttttagaggagaacaacctggactacataattcgcagccacgaggtgaaagccgagggttacgaggtggctcacggcggccgatgtgtgaccgtgttctcggccccaaattattgtgatcagatggggaataaggcaagttacatacatcttcaaggctcggatcttagacctcagtttcatcagtttacagctgtcccacatcctaacgtgaaacccatggcttacgccaacaccctgcttcagttgggcatgatgtag

SEQ ID NO: 130800 - DNA, 1458 bp, synthetic construct
  misc_feature 1..1458: note = Description of Artificial Sequence: Synthetic coding sequence
  source 1..1458: mol_type = other DNA
tgaatggcagagggagagcgcacagagtgtgccgagcccccgagagacgagccaccagccgacggagctcttaaacgcgccgaggaactgaagacccaggcaaatgactattttaaagccaaagactacgaaaacgccataaagttttattcgcaggccatcgaattgaatccatccaacgctatttactacgggaatcggtccctggcatacctgcgtactgagtgctacgggtatgcgcttggagacgctaccagagccattgagctggacaagaaatatattaaagggtattaccgacgggctgcttcaaacatggctctgggaaaatttcgggccgccttgagagactacgaaactgtagtgaaagtgaagccacacgacaaagacgcaaaaatgaaatatcaggagtgtaataaaatcgtgaagcaaaaggcgtttgagcgtgctatagctggcgatgagcataaaagaagtgtggttgatagcctggatatcgagtccatgactatcgaggacgaatacagcgggccgaagcttgaagatggcaaggtgaccatcagcttcatgaaggagctgatgcaatggtataaggatcagaagaagttgcaccgcaaatgtgcctaccaaatcctggttcaagtaaaggaggttttgtccaaactgagtacccttgtcgaaacaactctgaaggaaacggagaagatcacagtatgtggagatactcacgggcagttctacgacctgctgaacatctttgaacttaatggtctgccatcagagacgaacccttatatcttcaacggggactttgtagaccgtggctcttttagcgtcgaggtcattctcactttgtttggcttcaaattgctgtatcccgatcacttccatttgctgaggggtaaccacgagaccgacaatatgaaccaaatctacggcttcgagggagaagtgaaggccaagtataccgcccagatgtatgaactcttttcagaggttttcgagtggctccctctcgcgcagtgtattaatgggaaagtgctgattatgcacggggggctgtttagcgaagacggcgtgacattggatgatattcgcaagatagaacgcaatcgccagcccccagattccgggcccatgtgcgacctgctctggagtgatcctcaacctcaaaatggccggtccatctctaaaaggggggtctcctgtcagtttggcccagacgtgaccaaagcattcctggaagaaaataacctcgactatatcattaggtctcacgaggtaaaagcggaaggttacgaagtggcccacgggggtcgctgcgtgactgtcttttctgctccaaactattgcgatcagatggggaacaaggcatcttacatccatctgcagggatcagacctgagaccacaattccatcaattcacagcagttgggcggcctagctccggttcttag

SEQ ID NO: 130801 - DNA, 477 bp, synthetic construct
  misc_feature 1..477: note = Description of Artificial Sequence: Synthetic coding sequence
  source 1..477: mol_type = other DNA
atgcttacagtcgcagcactgattgatgagcagatactttgcgtgcacggaggtttgtcacctgacattaaaacgctcgaccagattaggaccatcgaaaggaatcaggagataccccataaaggagctttttgcgacttagtgtggtctgacccggaggacgtggacacttgggctatttcaccaagaggtgctggatggctgttcggtgctaaggtcacaaacgaatttgtgcacatcaataatcttaagctaatctgccgtgcccaccagctagtgcatgaggggtacaaattcatgtttgatgaaaagctcgttaccgtgtggtctgcccctaattactgctacaggtgtggaaacattgcttctattatggtgttcaaggatgtgaacacaagagagcctaagctctttagggccgtccctgattcggaacgcgtcataccaccgcgaaccactactccttattttttgtag

SEQ ID NO: 130802 - DNA, 918 bp, synthetic construct
  misc_feature 1..918: note = Description of Artificial Sequence: Synthetic coding sequence
  source 1..918: mol_type = other DNA
atggctcctctcgacttagataagtacgtggaaatcgctcggctgtgcaaataccttcccgagaacgacttgaagcgcctttgcgactacgtgtgcgacctgctcttggaagagagcaacgtacagcctgtgtccacacctgtcactgtgtgcggtgatatccatggccagttctacgacctgtgcgaactgttccgcaccggcggtcaggtacccgacaccaattatatatttatgggcgacttcgtcgacagaggatactactctcttgaaacatttacctacctgttggcactgaaagccaaatggcccgaccgcatcacactgcttaggggtaaccacgagtctagacagatcacacaagtctacggcttttatgatgagtgtcagacaaagtatgggaatgccaacgcctggaggtattgtacaaaggtattcgatatgctgactgtggctgctctgattgatgaacaaatattgtgtgtccatgggggactgagccctgatatcaagacactggatcagatacggaccatagagaggaaccaggagatcccccacaagggtgcattctgtgaccttgtgtggtctgaccccgaggatgtggacacctgggcgattagcccgagaggggcagggtggcttttcggcgcgaaggtgactaatgagttcgtgcatatcaataacctgaaattgatatgtagagctcaccagttggtgcatgaaggctacaaattcatgttcgatgagaagctggtgaccgtttggtctgctcctaactattgctaccgatgtggtaatatcgctagcattatggtattcaaagatgtgaataccagagaacccaagctgtttcgcgcagtacctgactcggagagagtgatccctccacgaaccaccacaccctattttctgtag

SEQ ID NO: 130803 - DNA, 852 bp, synthetic construct
  misc_feature 1..852: note = Description of Artificial Sequence: Synthetic coding sequence
  source 1..852: mol_type = other DNA
atggcacctctcgacctagataagtacgtggagattgcccggctctgcaagtaccttccggagaatgacctcaaacggctttgcgattatgtgtgcgatttactgttggaggaaagcaacgtgcagccagtgagcacccccgtgacggtatgcggagatatccacgggcagggcgattttgttgaccgtggctactactcactggagacctttacctacctcctcgctttaaaagccaaatggcccgacaggatcaccctactgcgggggaaccacgagtctcgccagattactcaggtctatggattttacgatgagtgtcagaccaagtatggaaatgcaaacgcctggagatattgcaccaaggtgttcgacatgttaactgtggcagccttaatagatgagcagattctgtgcgtgcacggtggattatcacctgacatcaagactctcgaccagattaggacaatcgagagaaatcaggagattccgcacaagggcgctttctgtgacctggtgtggtcagatccggaagatgtggacacctgggcaatatctccccgaggcgcaggctggctgttcggcgctaaggttacaaatgaattcgtacatatcaataatctcaagctgatttgcagagctcatcagctggtgcacgaaggctataaattcatgtttgatgagaagcttgtgactgtgtggagtgctcctaactactgttaccgctgtgggaacatcgcctccatcatggtctttaaggatgttaatacaagagagcctaagctgttccgggccgtccccgattctgaaagggtaatcccccccaggacaactaccccctacttcttgtag

SEQ ID NO: 130804 - DNA, 1029 bp, synthetic construct
  misc_feature 1..1029: note = Description of Artificial Sequence: Synthetic coding sequence
  source 1..1029: mol_type = other DNA
atggcccctctagacctcgacaaatacgtggaaatagcgcgactctgtaagtacctgcctgaaaatgacctgaaggtctcccctatttgcgggctcgctcccagcggctgcggagcgcctgccggccggcccttcctgtcaccaggcccaccacccgtgttccattttctccgatttttgaaggagagactctgtgactacgtctgtgacctgctcttagaggagtccaacgtgcaaccagttagcacacctgtgaccgtgtgcggggacatccatgggcagttttacgacctgtgcgagctgtttcgcacaggaggacaagtcccagacacgaattatatcttcatgggagacttcgtggatcgggggtattacagtctcgaaaccttcacttatttattggcactcaaggccaagtggcctgaccgcattactctgttgagagggaaccatgaatcgcgccagattactcaagtgtatggcttctacgatgaatgccagacaaagtatggtaatgctaatgcttggcggtattgtacaaaggttttcgacatgctgaccgtggccgctttgatagatgagcagatcttgtgtgtgcatgggggcttatccccggacataaaaactctcgatcagattagaactatagaaagaaatcaggaaattccacacaagggcgctttttgcgacctggtttggagtgacccagaagatgtggacacttgggccatatctccacggggcgccggatggctatttggagctaaagtcacgaacgaattcgtgcatatcaacaaccttaaactgatctgtcgggctcatcagctggttcacgaggggtacaagtttatgttcgacgagaaacttgtcactgtctggtcggcccccaactactgctatcgctgtgggaacatcgcatctataatggtctttaaagacgtgaacaccagagaacccaagctattcagggccgtaccagattcagaacgcgtcatcccccctcgcactactactccatactttctgtag

SEQ ID NO: 130805 - DNA, 378 bp, synthetic construct
  misc_feature 1..378: note = Description of Artificial Sequence: Synthetic coding sequence
  source 1..378: mol_type = other DNA
atgtttcttctgcctaggctccaactgcttggtcaaatgcggctctgtgattatgtatgtgacttgttgctagaggaatccaacgtgcagccagtgtctactccggtaactgtgtgtggcgacattcatggccaattctacgacctttgtgagctgtttaggactgggggccaggtgccagacaccaattacatctttatgggagattttgtggatagaggttattattccctggagaccttcacttatctcctggctcttaaggcaaagtggcctgatagaatcacgctgcttcgcggaaatcacgaatctcggcagatcacccaagtgtatggtttttacgatgaatgtcagactaagtatgggaatgccaactag

SEQ ID NO: 130806 - DNA, 1161 bp, synthetic construct
  misc_feature 1..1161: note = Description of Artificial Sequence: Synthetic coding sequence
  source 1..1161: mol_type = other DNA
atgagcgccctggagaagtccatgcacttgggccgcctaccatccaggccaccattaccgggatctggcgggagtcagagcggtgccaagatgcgaatggggccagggcggaaacgcgacttcagccctgtgccttggagtcagtactttgaaagcatggaagacgtggaggtggagaacgagaccgggaaagataccttcagagtttacaagtccgggtctgaagggcctgtacttcttctgctgcacggagggggccactcagctctgtcttgggcagtctttacagctgctatcatctctcgggtccagtgccgcatcgtcgccctagacctgaggagccacggggagaccaaggtgaaaaaccctgaagatctgtcagccgagacaatggcgaaagatgtcgggaatgtggtggaagcgatgtacggtgacctgccccccccaatcatgctcatcggccattccatgggcggcgctattgctgtacacactgcctccagcaatctcgtgccctctttgctagggctgtgcatgatagatgtggtagaaggtaccgcgatggacgccttaaattcaatgcagaatttcctccggggacggcccaagacctttaagtcattggaaaatgccattgagtggtctgttaaatcaggccagattcggaacctggagagtgcaagggttagcatggtgggtcaggtaaagcagtgtgagggaataacatctcccgagggatccaagagcatagtcgagggtataatcgaagaggaggaagaagacgaagaaggaagtgagtcaatcagcaaaagaaaaaaggaggatgatatggagacaaaaaaggatcacccgtatacttggagaatcgaactagctaagaccgagaaatactgggacgggtggtttagaggtctgtctaacttattcttgtcgtgtcctataccgaagctgcttctcctggctggagtggaccgcttggacaaggaccttaccattggacagatgcaggggaagttccagatgcaggtgttacctcagtgcgggcatgcggtgcatgaggatgctcccgataaggtcgccgaggcagtggccacatttctcattagacaccgctttgcagaaccgattggtggcttccagtgtgtttttcccggctgctag

SEQ ID NO: 130807 - DNA, 600 bp, synthetic construct
  misc_feature 1..600: note = Description of Artificial Sequence: Synthetic coding sequence
  source 1..600: mol_type = other DNA
atggatgctcttaattctatgcagaattttctgcgcggcagaccaaagacgtttaagtctctagaaaacgccatcgagtggagtgttaagtccgggcagatccgtaacctcgagtcagcaagggtttcaatggtggggcaggtaaaacaatgtgagggtattacttcacctgaagggagcaaatctatcgtggagggaatcattgaagaagaagaagaagatgaggaggggtccgagtctatttccaaacgcaagaaagaggacgacatggaaaccaagaaagaccatccatacacctggcgaattgaattggcaaagaccgaaaagtactgggatggatggttccggggcctgagcaacctatttctgagctgtccaatccccaaactactgctcctggccggcgtcgacagattggacaaggaccttacaattggtcaaatgcagggcaagttccagatgcaagtgctgcctcagtgcggacacgccgtgcatgaggatgcaccagacaaggtggccgaagccgtagccacctttctgattaggcacagattcgccgaacccatcggcggcttccagtgtgtttttcctggctgctag

SEQ ID NO: 130808 - DNA, 1203 bp, synthetic construct
  misc_feature 1..1203: note = Description of Artificial Sequence: Synthetic coding sequence
  source 1..1203: mol_type = other DNA
atgtctgcgctagaaaagtcaatgcacctgggacgtcttccttcccgcccccccctccctggtagcggaggctcccagagcggcgcaaaaatgcgcatgggcccgggccggaagcgggatttctcccctgtaccctggagtcagtatttcgaatccatggaagacgttgaagtggaaaacgagacagggaaggatacattcagagtctataagagtggtagcgaaggaccggtacttctcttgctgcacggcggtggtcattccgcactgagttgggcagtttttactgccgccattatatccagggttcagtgccggatcgtcgctctggatttgaggtctcacggcgagacaaaggtgaaaaatccggaggacctgagcgctgagacgatggcaaaggatgtgggtaacgtcgtggaggcaatgtatggtgacctgccaccacccatcatgctgataggtcactccatgggaggggccattgctgttcacacggctagcagtaatttagtcccctcactgctgggcctgtgcatgatcgacgtggtggagggaactgcaatggacgctttgaattcaatgcagaactttctgcgcggacggcccaaaacgttcaaatccctcgagaacgccatcgaatggagcgtgaaatctggtcagattcggaacctcgaatcagcccgggtcagcatggttggtcaagtaaagcagtgcgagggaataactagccctgaaggctctaaaagtatagtggagggtattatagaagaggaagaagaggatgaggagggctccgaatcgatcagtaagaggaaaaaagaagatgatatggaggggctgccttccgaaacccagaacctgttactcttcctccaaaccaaaaaagatcacccttacacctggcgcatcgaactagccaagactgagaagtactgggacggctggtttcgggggcttagcaacctgtttttgagttgtcccattcccaaactgctgctgttagcgggtgtcgataggttggataaagaccttactataggccagatgcaagggaagtttcagatgcaagtgctgccccaatgcggacacgccgtgcacgaggacgcaccagacaaagttgcggaggcggtggctacctttctgatcagacacagatttgctgagcctatcggcggcttccagtgtgtattcccaggctgctag

SEQ ID NO: 130809 - DNA, 1776 bp, synthetic construct
  misc_feature 1..1776: note = Description of Artificial Sequence: Synthetic coding sequence
  source 1..1776: mol_type = other DNA
atgggctgcagtagctctagcacgaaaactcgtcgctccgatacaagcttgcgcgccgcgcttattatccagaactggtaccgaggttacaaggctagactgaaagctaggcaacattacgcgctcaccatattccagagcattgagtatgccgatgaacaaggccagatgcagctgtcaacattcttttcctttatgttggagaattacactcacatccataaagaggagctcgagctgaggaaccaatcgctggaatctgaacaggacatgcgcgaccgctgggactacgtggacagtatcgacgtccccgactcttacaatgggccgcgactgcagttccctctgacctgcactgacattgatctgctcctcgaggcatttaaggagcaacaaatccttcatgctcattacgtcttggaggtgctttttgaaacaaagaaagtgctgaagcagatgcctaacttcacacacatccagactagcccctccaaagaggtaacaatctgcggagacctgcatgggaagttagatgatctgtttctgattttctacaagaatgggctccctagcgaacgcaatccctacgtgttcaatggcgatttcgtggaccggggaaaaaactccatcgagatcttgatgatcttatgcgtatcattccttgtgtatccaaacgatcttcacttgaataggggtaatcacgaagattttatgatgaacctccgatacggattcaccaaagaaatcctgcacaagtacaaacttcacggcaaacgcatacttcagatattggaagaattctacgcctggcttcccatcgggaccatagtggacaatgagatactcgtaatccatggcgggatctctgagacaacggacctgaatctactgcacagggtggaaagaaataaaatgaaatctgtgctgatcccccctacagagactaatcgagaccacgataccgattccaagcacaacaaagtaggcgtaacattcaatgcccatggaagaatcaaaactaatgggagccctaccgagcatctaactgaacatgagtgggagcaggtggttaccatcttctccgcctccaattactacgaggagggcagtaatcgcggggcctatattaaactgtgctcgggaacgacaccaagattctttcaataccaggtgaccaaggctacttgctttcagccgctgcgacagcgcgtcgatacgatggagaattcagcaatcaaaatcctgagagagcgtgtgattagccggaagtctgatctgactcgggcctttcagctccaggatcatagaaaatccggcaagctgtccgtgtctcagtgggctttctgtatggagaatattctgggccttaatctgccatggaggtccctgagcagcaatctggtgaatatagaccagaatgggaatgtggagtacatgtcatccttccagaatatcagaatagaaaaaccggtgcaggaggcgcattccaccctggttgagacattgtatcgatataggagtgatctcgagatcatcttcaacgctatcgatacggaccacagtggactcatttccgtggaagagtttagagccatgtggaaactgttctcaagccattacaacgtgcatattgacgatagccaggtgaacaagttggccaacatcatggatctgaacaaagacggctctatcgactttaacgaatttctgaaggctttctatgtggtgcacaggtacgaagatcttatgaaacccgacgtgaccaacctcggttag

SEQ ID NO: 130810 - DNA, 1803 bp, synthetic construct
  misc_feature 1..1803: note = Description of Artificial Sequence: Synthetic coding sequence
  source 1..1803: mol_type = other DNA
atgggctgttcatctagtagtaccaaaacaaggagatctgatacctcacttagggcggccctgattattcagaactggtaccggggatataaggctcggctgaaggctcgacagcattacgctctcacgatttttcaatctatcgagtatgccgacgaacagggtcagatgcaactgagtactttctttagtttcatgctggagaactacactcacattcataaagaggagctagaaattctccatgcgcactacgtacttgaagtcctgtttgagactaaaaaggtactcaaacagatgccgaatttcactcatatccagaccagcccctccaaggaggtgaccatatgcggagacctgcacgggaagctagatgatctgtttctgatattctataaaaatggacttccaagcgaacggaatccctacgtgttcaacggggactttgtagatcggggtaagaattctatcgagattcttatgatactctgcgtcagctttctggtctaccccaacgaccttcacctcaatcgtgggaatcatgaggatttcatgatgaatctccgctacggattcactaaggaaatcctgcataaatacaagcttcacggaaagagaatcttgcagattctggaagagttttacgcgtggctgcccataggcactatcgtagataatgaaatcctggtaatccacggcggcatctccgagacaaccgatttaaatctgttgcatcgagttgagagaaacaaaatgaagagtgtgctcattcctccaactgaaaccaatagagaccatgacacagactcaaagcataataaggtcggagtgacctttaatgcgcacggacggattaagacaaatggctcccctaccgaacacctcactgaacatgagtgggagcagattatagacatcctgtggtcggatcccaggggcaagaatggctgtttcccgaatacatgcagggggggaggctgttactttggacccgatgtgaccagtaaaatcctgaataagtatcaattgaaaatgctcattagatcacacgaatgtaagcccgaaggttatgaaatttgccacgacggcaaagtcgtaactatattcagtgccagtaactactacgaggaagggtcaaaccgcggggcctacattaaattgtgttctgggacaacccccaggtttttccaataccaggtgacgaaagcaacgtgtttccagcccctgcggcagcgcgtggacaccatggagaatagcgctataaagatactgagagaacgtgtgatctctcgaaaatcagacctcaccagggcgttccagctacaggatcaccggaagagtgggaaactctcagtgtctcaatgggccttttgcatggaaaatattcttggtctaaacttgccatggcgctcactgtcgtcaaatcttgtgaacatcgatcagaacggcaacgttgaatatatgagtagcttccaaaacatcaggattgaaaagcccgtacaggaggcacactccacacttgtggaaaccctttataggtacaggtcagacctggagatcatcttcaacgccatcgataccgaccactcgggactaatttcagttgaggagtttagggccatgtggaagttattcagcagccactacaacgtccacatcgatgactctcaggtcaacaaactggccaatattatggacttgaacaaagacggctccatcgattttaatgagttcttgaaggccttttacgtggttcacaggtatgaagatctgatgaagcccgacgtaactaacctcggttag

SEQ ID NO: 130811 - DNA, 1962 bp, synthetic construct
  misc_feature 1..1962: note = Description of Artificial Sequence: Synthetic coding sequence
  source 1..1962: mol_type = other DNA
atggggtgctccagctcatctacaaaaacacgcaggtccgatacatccctaagagcagctctcattatccagaactggtacaggggatataaggcacgtttaaaagcacgtcagcattatgccttgaccatttttcagtcaattgagtacgccgatgagcagggccagatgcagttgagcaccttttttagcttcatgctggagaactatactcacatacacaaggaggagttggagctgcgcaaccagtcactcgagtctgagcaggatatgcgcgaccgctgggattatgtggattctattgatgtccctgatagctataacggaccaagattgcagtttccccttacctgtaccgatattgacctcttactggaagcattcaaggagcagcagatactgcatgctcactacgttctagaggttttattcgagactaagaaggtgctgaagcagatgcccaacttcacacacattcagacttcccccagtaaggaggtcactatttgcggcgatctacatggtaagctggacgacctatttctgattttctacaaaaatggcctcccatctgagaggaacccctatgtcttcaacggggacttcgtcgatcgcggcaaaaattccatcgagattctgatgattttgtgcgtttcttttcttgtgtacccgaacgacctgcatctcaacaggggaaatcatgaggacttcatgatgaatctgcggtacggattcacaaaagaaattctgcataagtataaactacatgggaagagaattcttcagattctcgaagaattttacgcgtggttacccatcggaacgatcgtggacaacgagatcctcgtaattcatggggggatcagcgaaaccaccgatctgaatctgttacatagagtagagagaaacaagatgaagagtgtgcttatcccacccactgagacgaatcgtgaccatgacaccgattctaaacacaataaggtgggcgtgaccttcaatgcccatgggaggatcaagactaatggtagtcctacggaacacctaacagagcatgaatgggagcaaataatcgatattttgtggtcagatcctcggggcaagaatgggtgctttccgaatacctgtcggggcggcggatgttactttggacctgatgtcacgtcaaaaatattaaacaagtatcaactgaagatgcttatccggtcacacgaatgtaagccagagggctacgaaatctgccacgatgggaaagtggtgaccatctttagcgccagcaattattatgaagaagggtcgaatcgcggcgcctacatcaagctgtgcagtgggactacccccagattctttcaataccaggtgaccaaggctacctgcttccagccactaaggcagcgcgtcgataccatggagaattcggctattaagatcctgagagaacgcgtgattagccgtaagtcggacctgacccgggcgttccagctgcaagaccacaggaagagcgggaagctttcagtctctcagtgggccttctgcatggagaatatcctgggtttgaacctgccgtggcgtagcctgagctccaacctcgtcaatatcgaccagaatgggaatgttgagtacatgtcttccttccaaaacatccgaatcgagaagccagttcaagaggcccactctacactcgtggagactctgtacaggtatcgcagtgatctggaaataatcttcaatgccatcgataccgatcatagcggtcttatctcagtagaagagtttagagcaatgtggaaactgttttcgtcccactacaatgtgcatattgacgacagtcaggtcaacaagctggctaatatcatggatctgaataaggatgggtcaatcgacttcaatgagtttttaaaagctttctacgtggtgcaccgctacgaggatctgatgaagccagatgtgaccaatcttgggtag

SEQ ID NO: 130812 - DNA, 1131 bp, synthetic construct
  misc_feature 1..1131: note = Description of Artificial Sequence: Synthetic coding sequence
  source 1..1131: mol_type = other DNA
atggggtgtagctcgagttctacaaaaactagacgatctgatacgtcattacgtgctgcattgataatacagaactggtacaggggctacaaagcccgcctgaaggcgaggcagcattacgctctgacaatttttcaatccatagagtatgccgacgaacagggacagatgcagctcagcacgttcttctccttcatgttggagaactatactcacatccataaagaagagctggaactccggaatcaatcgctcgagagtgagcaggatatgagagaccggtgggactacgtggactctatagatgtacccgatagctataacggtccccgtctccagttcccactgacctgcaccgacattgatctgctcctcgaagcctttaaggagcaacaaatcctccatgcacactatgtcctcgaggtgctgtttgaaacaaagaaggttcttaaacagatgccgaattttacccacattcaaacttccccttcaaaggaggtcaccatctgtggtgacctccatggaaaactggacgacctgtttcttatcttctacaaaaacggcctgccttccgagaggaacccctacgttttcaacggtgactttgttgatagaggaaaaaacagcattgagattcttatgatcctgtgtgtgagcttcctggtctaccccaacgatttgcatctcaaccgaggaaatcacgaggactttatgatgaatcttagatacgggttcactaaagagattctccacaagtacaaactccacggcaagcggattttgcaaatcctggaggaattttacgcttggctgccgattggcaccatcgtcgataacgagattttggtgatacatggggggatttccgagactaccgatctgaatctcttacatagagttgaaagaaataaaatgaagtctgttttaattcctcctaccgagactaacagggaccacgacaccgattcaaaacacaacaaagtgggggtgaccttcaacgctcatggccgcataaaaacgaatggatcccctactgaacacctgacagagcatgaatgggaacaaagtgggtactatggcaagcagcgacaccaggacattaagcgcgaaagcgacttcacaaaaaagtag

SEQ ID NO: 130813 - DNA, 1767 bp, synthetic construct
  misc_feature 1..1767: note = Description of Artificial Sequence: Synthetic coding sequence
  source 1..1767: mol_type = other DNA
atgctcgagaactacacccatattcacaaagaggagctcgaactccgaaatcagtcattagaaagtgaacaagatatgcgagataggtgggactacgttgattcaatagatgtccctgattcgtacaacgggcctcgtttgcagtttccactgacatgtactgacattgatctgctcttagaggcttttaaggagcagcagatcctccacgcgcactatgtcctcgaggtcctttttgagacaaagaaggtcttgaaacagatgcctaattttactcatattcagacctctccaagcaaggaggtcacgatatgcggtgatttacacggtaaactcgacgacctgttcctgatcttctataaaaatggcctcccctccgagcgcaatccttatgtctttaatggagacttcgtggaccgtgggaaaaactctattgagattctgatgattttgtgtgttagttttcttgtctatcccaatgatctgcatttaaaccgcggcaaccacgaggacttcatgatgaatttgcgctacggcttcactaaggagatcctccataaatataaactccatggcaagagaatactccagatcttggaggaattttacgcctggttacctattgggacaatagtcgataacgaaattctcgtaattcatggtggcatttcagaaactacagacctgaatttgctccatcgggtcgagcgaaataaaatgaaatctgtcctaatcccaccgactgagaccaacagggatcacgacacagattctaaacacaataaggtgggcgtgacattcaatgcccacgggcgcattaaaacaaatggatcccctactgagcaccttactgagcacgagtgggagcagattatcgatatactctggagtgatcctcggggtaagaacgggtgtttcccaaacacatgcagaggtggcgggtgctatttcggacccgacgtcacctccaagatcctgaacaaataccagctgaagatgctgataagatcccacgagtgtaaaccagaggggtacgagatttgccatgatggcaaggtcgttacaatcttctctgccagtaactactatgaggaagggtctaatcgaggcgcctacatcaagttgtgtagcgggaccaccccacgcttcttccagtaccaggtcactaaggcaacttgctttcagcccctgagacagagagtcgacaccatggagaacagtgctatcaagatattgcgggagcgtgtcattagtcgaaagagcgatctgactcgggcctttcagctgcaggaccaccgcaaatccggaaaactgtctgtctctcaatgggcattctgcatggagaacatccttggactgaacctgccgtggaggtctctctcttctaatctggtgaatatagatcagaatgggaacgttgaatatatgtccagctttcaaaatattaggattgagaagcctgtccaagaagcccactctacattagttgaaacactctatcggtatagatctgatctcgagattattttcaatgccattgatacagaccactcaggtctgatctctgtggaagagtttcgggcaatgtggaagctcttttcgagtcactataatgtacatatagacgattcccaggtcaacaagctggccaatattatggacctgaacaaagatggctctatagacttcaacgagtttctgaaggcattttacgtagtccataggtatgaagacctgatgaagccagacgtgacaaacctgggatag

SEQ ID NO: 130814 - DNA, 2262 bp, synthetic construct
  misc_feature 1..2262: note = Description of Artificial Sequence: Synthetic coding sequence
  source 1..2262: mol_type = other DNA
atgggttctggaacttccactcagcaccatttcgccttccagaacgctgagagggccttcaaggctgcggccctgattcaacgctggtacagaaggtatgtagctagactagagatgcgtcggagatgtacctggagtatttttcagagtattgagtacgctggccagcaggatcaggtgaagctacacgacttcttttcttatcttatggatcatttcatccccagtagccataacgatcgagactttcttacaaggatcttcaccgaggataggttcgctcaagattccgaaatgaagaaatgttccgactacgaaagcatagaggtacctgactcctacactggccctcggttgtccttccccctcctccctgatcacgcaaccgccttagtggaagccttccgactgaaacagcagctgcatgctcgttatgtcttgaatttgctatacgaaacaaagaaacatctagtccaattacctaatatcaaccgcgtgtccacgtgctactcggaagagatcacagtgtgtggggaccttcacggccagctggacgatctgatatttattttctacaagaatggtctgcccagccccgagagatcatacgtgttcaacggcgatttcgtcgacaggggtaaggactcggttgagattctcatgatactgtttgctttcatgctggtgtatccaaaggagtttcaccttaacagaggaaatcacgaagatcacatggtaaacctacgatatggcttcacaaaagaagtgatgaacaagtataaggttcatgggaaagagattctgagaaccctgcaggacgtgttttgctggctgcccctggccactctcatcgatgagaaggtgctaatactccacggaggcgtttccgacattactgacctggagttgttagataaaatagagagaagtaaaatcgtctcgacgatgaggtgcaagacgcgacagaaaagtgagaagcagatggaggagaaacgccgggctaatcagaagagcagtgctcaggggcccattccctggttcctgcctgagtctaggagtctgccgagctctcccttacgactgggtagttacaaggcccagaagacatccaggagcagtagcatcccatgttctggctcacttgacggtagggagctgtccaggcaggtccgttcaagcgtggagcttgaactggagcgctgccgccagcaggctgggctgctggtgaccggggaaaaggaggagcctagccgtagtgcatctgaggccgactctgaagctggagaactgcggaagcctactcaggaggaatggcgacaagtcgtggacattctgtggagtgacccaatggcccaggagggatgtaaggccaacaccatacgaggtggtggctgctacttcggtcccgacgtgactcagcaactactgcaaaagtacaacatgcagttcctgataaggagccacgaatgtaaaccggaggggtatgagttttgccataatcgcaaagtcctgacgatcttctcagcttccaattattacgaggtgggctctaaccgaggcgcctacgtcaaactcggccccgctctaacacctcatatcgtacagtaccaggccaataaggtaacacacacattaactatgcgtcagagaatcagtcgggtggaggaatctgcactcagagcactaagagagaagctgtttgcacacagctcggatttgctatcggagtttaaaaagcatgatgccgacaaagtggggttaattactctgtctgactgggcagcggctgtcgagtcagttctccacctcggcctgccttggaggatgctgcgtccccagctggtgaattcctccgcagacaatatgcttgagtataaatcctggcttaagaacctcgccaaggagcaactgtcgcgggagaatatccagagttctctactggaaacactctatcgaaacaggagcaatttggagactatttttagaattatagacagcgatcacagtgggtttatatctcttgatgagtttaggcagacttggaaactatttagttcccacatgaatatagacatcactgacgactgcatttgtgatttggcccggtctatcgattttaataaagacgggcacattgatattaacgaattcctggaagccttccggctggtggagaaatcatgtcctgaaggggacgcctccgaatgcccccaggccacaaacgccaaagattccggatgcagctcaccaggcgcccattag

SEQ ID NO: 130815 - DNA, 1797 bp, synthetic construct
  misc_feature 1..1797: note = Description of Artificial Sequence: Synthetic coding sequence
  source 1..1797: mol_type = other DNA
atgggcagcggcacgtccactcagcaccactttgcgttccagaacgccgagcgtgcttttaaagctgccgcattgatccagcgctggtacaggcggtacgttgctcgtctggaaatgcgccgcaggtgtacatggagcatctttcagtcaatagagtacgctgggcaacaggaccaggtgaagctacacgacttcttttcctatctgatggaccatttcattccaagctcccataacgaccgggacttcttgacaaggatattcactgaggaccgttttgctcaggattcggaaatgaaaaagtgctcggactacgagtccatcgaggtgcccgacagctatactggccccagactgtcatttccactgttgcctgatcacgccaccgccctggtggaggccttcagactgaaacaacagctgcatgcacgatacgtgctcaacctcctgtacgagacaaaaaaacacctggttcaactgcctaatatcaacagggtcagtacctgttattcagaggaaattaccgtgtgcggcgaccttcatgggcagctggatgatctgatcttcattttctacaaaaatggactgccaagccctgaaagaagctacgtattcaatggagactttgtggaccgtggaaaagactctgtggagatcttaatgattctttttgccttcatgttggtgtacccaaaagagttccaccttaatcggggaaatcacgaggatcatatggtgaatctgagatatgggttcacgaaagaagtgatgaacaagtataaagtccacggtaaggagatcctccggacactccaggacgtgttttgctggttaccgttagcgaccttaatcgatgagaaggtgttaattttgcacgggggggtcagtgatataaccgatctggaactgctggataagatcgagcggtccaagatcgtgtccacaatgcggtgcaagacgaggcaaaagagtgagaagcagatggaggaaaagcgccgcgccaatcagaaaagctcggcacagggccccataccgtggtttctgcctgagagcagaagcctcccatcaagccccctgcgtctcgggagctacaaagcacaaaagacgagccggtcttctagtatcccttgttcgggatcactggatggtagagagctgtccaggcaggtgcgaagctctgtggagctggagctggagcggtgtcgccagcaagctggtctcttggtgactggcgagaaagaggaacccagcaggtctgcaagcgaagcagacagtgaagccggtgagctgcgcaagcccacccaggaggaatggagacaggtggtggacatcttgtggagtgaccctatggctcaggagggctgcaaggctaatacaatcaggggtggcggatgctactttgggcccgacgtgactcagcaactcttgcaaaaatacaatatgcaattcctgattaggtcccacgagtgcaaacctgaggggtatgagttctgccataaccgtaaggtcctcactattttctcagcgagtaattattatgaagttggctctaataggggggcttatgtgaaactgggcccagctttgactcctcacatcgtccagtaccaggcaaataaagtgacacatacactgaccatgcggcagaggatcagtcgggtggaagagtccgcactgcgggccctccgggaaaagctatttgcacattcttcagacctcctgtccgagtttaagaagcacgacgcagataaagtggggctggccagttctcagctgtgttactaccaacagaagtag

SEQ ID NO: 130816 - DNA, 1440 bp, synthetic construct
  misc_feature 1..1440: note = Description of Artificial Sequence: Synthetic coding sequence
  source 1..1440: mol_type = other DNA
atgggagcattcctggacaaaccaaaaacggagaaacataacgctcatggggccggaaacgggctgcggtacggacttagtagtatgcagggttggagagtcgagatggaggacgctcacactgccgtggttggtatcccacatggcctggaggattggtcatttttcgcagtgtacgacgggcacgctggctcacgagtcgccaattattgttcaactcacctccttgagcacatcactaccaacgaggattttcgtgccgccgggaagagcggctccgcattggaactgagtgtggagaatgttaaaaacggcatacgtactggtttcctgaagatcgacgagtatatgcgcaatttctccgatctacgaaacggcatggacaggtcggggagcacagctgtcggcgtaatgatcagccccaaacatatctactttatcaattgcggcgacagccgtgctgtactctacaggaatgggcaggtttgcttctcgacacaagatcacaaaccgtgcaatcctagggagaaggaacggatccaaaatgcagggggtagcgtgatgatacagcgcgtcaatggaagcttagcagtgtcccgggcactgggcgactacgactacaagtgtgtagatggaaaaggaccaacggagcaacttgtttccccggagcctgaagtatatgagatcctgcgcgctgaggaagatgagtttatcattctcgcctgtgacggaatatgggacgtcatgagcaatgaggagctatgcgaatatgtcaagagcagactcgaggtgtctgacgacctggaaaacgtgtgcaactgggtagtagatacatgtctgcacaagggcagccgcgacaatatgagcatcgtactcgtgtgtttcagcaatgcaccgaaggtctcagacgaggctgtaaaaaaggacagtgagctcgacaaacacctggagagtcgggtcgaggaaataatggagaagagcggtgaagagggaatgccagaccttgctcacgtgatgagaatcttatcggccgaaaatattccaaaccttccgcctgggggcgggctggccgggaagcgcaatgtcatagaggccgtgtactccaggctgaatccgcatcgcgagtctgatggcgcttccgatgaggccgaagaaagcggcagtcaaggcaagttagtcgaggcactccgacagatgcgtattaatcacagaggtaattatagacagttactggaagaaatgttaacatcctatcgactcgcaaaagttgagggggaagaatcaccagctgagcctgctgccacggcgacctctagcaacagcgacgctggcaatcctgtgaccatgcaggagtctcacacggagtctgagtccggattagccgagctggatagcagtaacgaggacgcagggacaaagatgtccggagagaaaatttag

SEQ ID NO: 130817 - DNA, 579 bp, synthetic construct
  misc_feature 1..579: note = Description of Artificial Sequence: Synthetic coding sequence
  source 1..579: mol_type = other DNA
atgagcattgtactggtgtgcttttccaatgcgcctaaagtttctgatgaagccgtgaagaaagattcagagctggataaacaccttgagagtcgagtggaggagataatggaaaaaagtggtgaagagggaatgccagatttggcccacgtaatgagaatactttctgccgagaatattcccaacttgccaccaggcggaggcctggctgggaaaagaaatgtgatcgaggcggtgtattcacgccttaacccacatagggagtccgacggagcgagtgatgaggctgaggagtccggctctcaaggaaaactcgtggaggctctccggcaaatgcggataaaccatagaggcaactaccggcagctgctggaagagatgctcacttcctacaggttggctaaggtcgagggggaagaaagccctgcagaacccgcagccacggcaacttcttccaattctgacgccgggaatcccgtaactatgcaggagtcccacaccgagtccgagtcagggcttgctgaattggatagcagcaacgaggacgcaggaacaaagatgtctggggaaaaaatctag

SEQ ID NO: 130818 - DNA, 1164 bp, synthetic construct
  misc_feature 1..1164: note = Description of Artificial Sequence: Synthetic coding sequence
  source 1..1164: mol_type = other DNA
atgggtgcttttttggataagcccaaaacagagaagcacaatgcccatggcgctggcaacgggctgcgctatggtctgagcagcatgcagggctggcgcgttgagatggaggacgcgcatacggctgtggtgggcattcctcacggcttagaggactggtcattctttgctgtttatgatggccatgcgggctcacgcgtcgccaattattgttccacccacctactggagcacatcaccactaacgaggactttcgcgcagcagggaaatcagggagcgcactcgagctgtctgtggagaacgtcaagaatggaattcgcaccggatttcttaaaattgatgagtatatgcgcaatttctctgacctgcggaatggcatggatcggagcggctccacagctgttggtgtcatgataagcccaaagcacatttacttcattaactgtggcgacagtcgcgccgtgctttaccgtaatggccaggtgtgctttagcactcaggaccacaagccctgcaaccctcgagaaaaagagcgaattcagaatgccgggggttccgtgatgatccagagggtcaacggttcacttgcagtgtccagggcactgggggattatgattataaatgcgtcgacggcaaaggacccactgaacagctagtgagtcccgagcctgaggtatatgagatactcagagcagaagaggacgagttcataatactggcatgcgacggtatctgggacgtgatgagtaacgaagaactatgcgaatatgtgaaaagccggctggaagttagcgatgatctggagaatgtctgtaactgggttgtcgatacctgcctgcacaagggctcccgggataacatgtcaattgtgctggtgtgctttagcaatgctccgaaggtaagtgacgaagcagtgaagaaggactcagaattggacaagcacctggagtctagggtcgaggagatcatggaaaaatctggggaagaaggcatgcccgatctcgctcatgttatgcggatcctgtccgcagagaatatccctaacctgcccccaggtgggggcctggctgggaaacggaacgtgatagaagccgtgtattctcggctgaacccacatagggagtcagacggtggcgccggggatctggaggatccttggtag

SEQ ID NO: 130819 - DNA, 1143 bp, synthetic construct
  misc_feature 1..1143: note = Description of Artificial Sequence: Synthetic coding sequence
  source 1..1143: mol_type = other DNA
atgggagccttccttgacaaacccaagacagaaaaacacaacgctcacggtgctggcaatggactgagatatggattgagctcaatgcagggctggagggtggagatggaagacgcccatacagctgtcgtggggattccccacggtctagaggactggtcctttttcgcagtttacgatggacatgccggtagccgtgttgcaaattactgctctacccacctgctggaacatattacgacaaatgaagattttagagctgccggaaaatcaggcagcgctctggagctcagcgttgagaatgtaaaaaacggtatcagaacaggttttctcaaaattgatgaatatatgagaaatttttcagatctgaggaatgggatggataggtctgggtcaaccgccgttggcgtgatgatcagccctaaacacatctactttattaactgcggagatagtagagccgtgctctaccgaaatggacaagtgtgcttttcaacacaagaccacaaaccatgtaaccctcgtgaaaaggaacggatccaaaacgcggggggctctgtgatgatccaaagggtgaatggaagcttagccgtgtcccgggccctcggggattacgattacaagtgcgtggacgggaagggcccaacagagcaacttgtgtctccagagcctgaagtgtacgaaatactgcgcgctgaggaggatgagttcattatcctcgcatgcgacggcatttgggacgtgatgtcaaacgaggagctttgcgaatacgtaaagagcagactggaagtgtccgatgatctggaaaatgtgtgtaactgggtcgtcgacacatgtttgcacaagggatcaagagataatatgtctattgttctcgtttgcttctcgaatgcccctaaggtgagtgacgaggccgtaaaaaaagattcggagctcgataagcacctggaatcccgggtagaggagataatggaaaagtcaggcgaagaaggaatgcccgacctagctcacgtaatgcggattctaagtgccgaaaacattcccaatctgcctccaggcggcggactggcaggcaaacgcaatgtgatcgaagccgtatatagtcgactcaacccccatagagagtctgatggccagaagtag

SEQ ID NO: 130820 - DNA, 984 bp, synthetic construct
  misc_feature 1..984: note = Description of Artificial Sequence: Synthetic coding sequence
  source 1..984: mol_type = other DNA
atgggcgctttcctggacaagcccaaaactgaaaaacataatgcccatggggctggaaatggcttgcggtatgggctgtcctcaatgcagggctggagagttgaaatggaggacgcacacactgctgtcgtgggaataccacacgggctcgaggattggtcattttttgccgtgtacgacggccatgcaggaagtcgggtggctaattactgctccacccacctgctagagcacatcacaactaacgaggatttccgggcagccgggaagtccggctcggccctggagctgagcgtcgaaaatgtgaagaacggcatcagaacgggctttctgaagattgatgagtacatgcggaatttcagcgatctgcgcaacggcatggatcgcagtggctcaactgccgtcggtgtcatgatctcgcccaaacacatttactttattaactgcggggatagtagggctgtgctgtaccggaacggccaggtgtgcttttctacacaagaccacaagccgtgcaacccccgagagaaagaacgtatccagaatgccggcggctcagttatgattcagcgagttaacggttctctcgccgtttccagagctctaggcgactacgactacaaatgcgtcgacggaaaggggcccactgagcagctggtgagtcctgagccagaagtgtatgaaatcctgagagctgaggaagacgaatttatcattttggcttgtgacggtatctgggacgtgatgagcaatgaagagctctgcgaatacgtcaagtcccggctggaagtctcagacgacctggaaaatgtgtgtaactgggtggtcgacacctgtttacataagggaagtcgggacaacatgtctatcgttctagtctgtttttccaacgctccaaaggtttccgatgaagcagtgaagaaagactcagagctggataagcatctggagtcccgcgtcgaagggaagactaacgccttttag

SEQ ID NO: 130821 - DNA, 1137 bp, synthetic construct
  misc_feature 1..1137: note = Description of Artificial Sequence: Synthetic coding sequence
  source 1..1137: mol_type = other DNA
atgggggcatttctggataaaccgaaaacagagaaacataacgcacacggagcagggaatggccttagatatggcctgtccagcatgcagggatggagagtggaaatggaagacgctcataccgctgttgtgggaatccctcatggactagaagattggagtttttttgccgtctatgatggacatgcaggttcccgagtcgctaattattgtagcacccatctattggaacatatcactacgaacgaggatttccgcgccgccggcaagagcggcagcgctctggagctgtctgtcgaaaatgtaaagaacgggatcaggaccggtttcctgaaaatagacgaatatatgcgaaactttagtgatctgaggaacggaatggataggagtggttctactgccgtgggcgtgatgattagccccaagcatatttacttcattaactgcggcgatagtagagccgtgctatataggaatggtcaggtgtgtttctccacgcaggaccataagccttgcaaccccagagaaaaggagaggattcagaacgctgggggctcagtcatgattcaaagagtgaatggatctctggcagttagccgagctctcggagactatgattacaaatgcgtcgatggcaaagggcccacagaacagctcgtctcgcccgagccagaagtttatgaaattctccgagccgaggaagatgagttcatcatcctggcctgtgacggcatctgggatgttatgagcaacgaagaactgtgcgagtatgttaaatcgagacttgaggtatctgacgatctcgaaaacgtgtgtaattgggtggtggatacttgtttgcacaaaggctcaagggacaatatgagtatcgtattggtttgcttcagcaacgctccaaaggtatctgacgaagctgtgaagaaggacagcgagctggacaagcatctggaaagccgtgtggaggagattatggagaaatcgggggaggagggcatgccagacctcgcacacgtcatgcgaatcctgagtgctgaaaacattccaaatttgcccccaggggggggcctcgctggtaagcgaaatgtcatcgaggccgtgtactctagactgaacccccaccgtgagagtgacggttag

SEQ ID NO: 130822 - DNA, 1518 bp, synthetic construct
  misc_feature 1..1518: note = Description of Artificial Sequence: Synthetic coding sequence
  source 1..1518: mol_type = other DNA
atgttaaaccgggtgagatctgcagtggcacacctcgtgtccagcgggggggcacccccgcccaggcccaagagtcctgatctgcccaacgccgcctctgcaccacctgccgctgcgcccgaagccccccgcagtccgcccgcgaaggccgggtcgggctccgcaacaccagctaaggcagttgaagcacgggcctccttttcacgccctactttccttcaattatccccaggaggactccggagagccgacgaccacgccggccgtgctgtgcagagtcctccagacacgggacgcaggctgccctggtccacaggctacgctgaagttatcaacgcagggaagtcccgccataatgaagatcaagcttgctgtgaggtggtttacgtggaaggcaggaggagcgtaacgggtgttccccgagaaccatctagaggacagggtctgtgtttttactactggggcctgtttgatggccacgcgggagggggggcagccgagatggcatctagattacttcacagacatataagggagcaattaaaagacctggtggagattttgcaagatccttccccacctccattgtgcctgcccacgacaccgggaacccccgactccagcgacccttcccatcttctgggccctcagtcttgctggtccagtcagaaggaggtcagccacgagagcctggtggtcggcgctgtagagaatgccttccaattgatggacgaacagatggccagagagagaaggggacaccaggtggaaggtggttgttgtgcactggtcgtaatttacctgcttgggaaggtctatgtggctaatgcaggggatagccgtgcgattatcgtccgaaatggcgagataattcctatgtcgcgcgaattcactcccgagacagaacgccagagattgcaacttcttggctttctgaagcccgagttgctgggatctgagtttacccacctggagtttccaaggcgcgtgctgcccaaggagctagggcagcgcatgctctaccgtgaccaaaacatgacagggtgggcctataagaaaatagaactagaagatctgagatttcccttagtttgcggagagggtaagaaggctcgcgtgatggccactatcggagttacgcgcggactaggcgaccactccctgaaagtctgttcaagcactttgccaataaagccttttctcagctgcttccccgaggtcagggtgtatgacctgacccagtacgagcactgcccggatgacgtacttgtgcttggcacagatggattatgggacgtcactacagattgcgaagtggctgccactgtcgacagggttctctcagcttacgagcccaacgatcattccaggtacactgcacttgcgcaggcactggttctcggggccagaggcacgccacgcgaccgtggctggaggctgcccaataacaaactcggatctggcgacgacatttccgtgttcgtgatcccactgggcggcccgggcagctacagctag

SEQ ID NO: 130823 - DNA, 900 bp, synthetic construct
  misc_feature 1..900: note = Description of Artificial Sequence: Synthetic coding sequence
  source 1..900: mol_type = other DNA
atggccagccgcctattacaccggcatatcagggagcaattgaaggaccttaaggaagtttcacacgaatcacttgtggtgggagccgtcgagaatgctttccagctcatggatgagcagatggctagagaacgccggggccatcaggtcgaagggggttgctgcgctcttgtggtaatctacctcttgggcaaggtgtacgtcgcaaatgcaggggactccagggcaatcattgtgagaaatggagagataatccctatgagccgggagttcacgcccgagacggaacgccagcgccttcaattgctgggctttctgaaaccagaactattaggttcagagtttactcatctcgagttcccacggagagtgctccccaaagagctcggccagagaatgctgtaccgtgaccagaatatgacgggatgggcgtacaagaagatcgaactggaggacctgcggttccctctcgtttgcggcgaaggaaaaaaggcccgggtcatggcaaccatcggcgtgacgcggggcttaggagatcacagcctcaaagtatgctccagcactctcccaatcaaaccattcctcagctgctttcccgaggtgagagtgtacgacttgacccaatacgagcactgtccagacgatgtgcttgtactgggaacggacggcctttgggatgtgacaaccgattgcgaagttgcagccactgtagatcgagtgctgtcggcatatgagcccaatgaccacagtaggtatactgcattagctcaggccctcgtcctgggggcccggggtacgccaagagatagggggtggcgactcccaaataacaaactcggatcaggcgacgacatcagtgtgtttgtcatcccgctgggggggcccggcagctactcgtag

SEQ ID NO: 130824 - DNA, 1119 bp, synthetic construct
  misc_feature 1..1119: note = Description of Artificial Sequence: Synthetic coding sequence
  source 1..1119: mol_type = other DNA
atgtctaccgctgcactgatcacactggtccgcagcggcggcaaccaggtgagacgtcgcgttcttctgagttcacggttgctccaggatgaccgaagagtgacgcctacgtgccactcaagtacatccgaaccacgctgctctagattcgatcccgatggcagtggcagcccagcgacctgggataatttcggcatatgggacaaccgaattgacgaaccaatactcctaccgccaagcataaaatacgggaaacccataccaaagatctcgttagaaaatgttggctgcgccagccaaatcggcaagcggaaggaaaacgaggatcggttcgactttgcccaacttaccgatgaggttctgtattttgcagtttacgacggccatggtggcccagccgctgctgacttttgtcatacccatatggagaaatgcattatggaccttcttcccaaagaaaaaaatctcgaaacactgctgaccttagcctttttggagattgataaggctttcagttcccatgcacgcctgtcagccgacgccaccctgctgacttcgggaacaacagcaacggtggccttgctgcgcgacggtatcgagctcgtggttgcttctgtaggcgatagcagggccatcctgtgtcgaaaggggaagcctatgaaactgaccatcgatcacacgccggaaagaaaggatgagaaggagcgaatcaagaagtgcgggggtttcgttgcatggaatagtctggggcagcctcatgtgaacggtcggctggcaatgacaaggtccattggagatctggacctcaagacctctggagtgatcgccgaacctgagaccaagcgcatcaagttacaccacgcagacgattcttttttagtgctcacaactgacggcattaacttcatggtaaactctcaagaaatttgcgacttcgtcaaccaatgtcacgacccaaacgaggcagcccacgcggtgactgaacaggcaatacagtacggaaccgaagataattcgaccgctgttgtcgtgccttttggagcctggggcaaatacaagaatagtgagattaatttctcattttcacgttcattcgcctcatctggacgctgggcatag

SEQ ID NO: 130825 - DNA, 702 bp, synthetic construct
  misc_feature 1..702: note = Description of Artificial Sequence: Synthetic coding sequence
  source 1..702: mol_type = other DNA
atgtccacagctgctctcatcactctagtaaggagcggcggcaaccaagtgcgccgcagggtgctactctcttctagacttctccaggacgaccgacgcgtgaccccaacatgccatagctcgacgagcgaaccacgctgctcacgcttcgatcccgacgggtccggctctcccgcaacctgggataacttcggaatctgggataatagaatagacgagccaattctgctcccaccctccattaaatatgggaaacccatccctaagatttctctggagaatgtggggtgcgcttctcagattggaaagcgcaaagagaatgaggacagattcgacttcgcccagttaaccgacgaagttctgtattttgctgtgtacgacgggcatggtggaccagctgccgctgacttctgccatacccacatggagaagtgtattatggacctgctgcccaaggaaaagaacctggaaaccttattaacactggcttttctcgaaattgacaaggccttttcatcccatgcgaggctctcagctgacgagaactgtgcatggtctgccgcccttgatctagagcccgtcgacactatctgcggggcttcagtggaacgcgagatctgcctgattctgtcgcaggtaaaggagtcttcaggatcttatccagggctgagggagggatcccatatttctctgagtcactag

SEQ ID NO: 130826 - DNA, 702 bp, synthetic construct
  misc_feature 1..702: note = Description of Artificial Sequence: Synthetic coding sequence
  source 1..702: mol_type = other DNA
atgagcaccgccgctttgattactctggtgaggagcgggggaaatcaagtgcgaagacgcgtactcctcagcagcaggctgctgcaagacgacagaagagttacacccacctgccactcttctaccagcgaacccagatgctcacgttttgacccagacgggagcggaagccccgctacatgggacaattttggcatctgggataatcgaattgacgagcctatactgctgcccccctccattaagtatggcaagcccatccctaagatctctctggaaaacgttgggtgtgcaagccagattggcaaacgcaaagagaatgaggatcggttcgatttcgcccaattgacggacgaggtcctgtattttgccgtctatgatggacatggcggccctgccgccgcggacttttgccacactcatatggagaaatgtattatggatctccttcccaaggagaagaatctggaaacactgctaacgctggcctttcttgaaattgataaagctttttccagccatgctaggctctccgccgatgagaattgtgcttggtctgccgcgctcgatctggaaccagtcgatacaatttgtggagccagtgttgagagggaaatatgtctgattctttcccaagtaaaagagtctagcgggtcctacccaggcctgcgtgagggctcacatatttccctttcccattag

SEQ ID NO: 130827 - DNA, 585 bp, synthetic construct
  misc_feature 1..585: note = Description of Artificial Sequence: Synthetic coding sequence
  source 1..585: mol_type = other DNA
atgatagaggatactatgacgcttctttcgctcctgggcaggatcatgagatattttttgttacgaccggagacactatttctgctgtgcatctcccttgcattgtggagttactttttccacaccgatgaggtgaagacaatcgttaagtcctccagggacgcggttaagatggttaagggcaaggtggccgagatcatgcagaatgatcgcctgggcggcctcgatgtgcttgaggctgagttctccaaaacgtgggagttcaaaaaccacaatgttgcagtgtactccattcaggggaggagagaccacatggaggatcgattcgaagtgcttaccgatctggctaataaaacccatcccagcatttttggcatatttgacggccatggaggcgagacggcggccgagtacgtcaagtcgcgtctccctgaggcccttaaacagcatctgcaggattacgaaaaggacaaggagaattcagttctgtcctaccagactatcctggagcagcagattcttagcatagaccgggagatgttggaaaagttgacggtgtcttacgacgaggcagtcaccttctag

SEQ ID NO: 130828 - DNA, 1083 bp, synthetic construct
  misc_feature 1..1083: note = Description of Artificial Sequence: Synthetic coding sequence
  source 1..1083: mol_type = other DNA
atgatagaggacaccatgaccctgttgtcactgctggggaggatcatgcggtacttcctgctccgcccggaaaccttgttcctcctgtgtatcagcctcgctttgtggtcatatttcttccacacggatgaggttaagaccatagtgaaatctagccgggacgccgttaagatggtgaagggcaaggtagccgagatcatgcagaacgacaggctgggcggactggacgttctggaagccgagttcagcaagacatgggagtttaagaatcataatgtggccgtgtactccatccaaggaagacgggaccacatggaggaccgcttcgaagtgctgaccgatctggccaacaaaacccacccttcaatcttcgggatttttgacggtcacggcggcgagactgcggccgaatacgttaaaagcaggctgcctgaagccctgaaacaacacctgcaggattatgagaaggataaagaaaactctgtgctcagctaccaaaccatcctggagcagcagatcctatccattgacagagaaatgctggaaaagctcacggtctcttatgatgaagcagggactacatgcttgatcgccctattgagtgataaagacctgaccgttgctaatgtgggcgacagcagaggggtgctgtgtgataaagatgggaatgctattcccctgtcccatgaccataaaccctaccaactcaaggagagaaagcgcataaagcgcgcaggcggtttcatctcatttaacggcagttggcgtgttcaagggattctcgccatgtctagatccctgggcgactatccgctaaagaatcttaacgtcgtgatccctgatccagatattctcacatttgatttggacaaattgcagcccgaattcatgatcctggcaagtgacggactttgggacgccttctcaaacgaagaagcagtccggttcataaaggaaaggctggacgagccgcactttggggcaaaaagtattgtgttacaatctttctacagagggtgccccgataacatcacagtgatggtggtgaaattccgaaactcctccaagacggaagagcagtag

SEQ ID NO: 130829 - DNA, 813 bp, synthetic construct
  misc_feature 1..813: note = Description of Artificial Sequence: Synthetic coding sequence
  source 1..813: mol_type = other DNA
atgcacctgaatggaaggtgcatctgccctagtgatcctcagtttgtcgaagaaaagggaatccgcgcagaggatctcgtcatcggtgcacttgagtccgctttccaggaatgcgatgaagtgattggaagggagttagaagcctctggtcagatgggcgggtgcaccgcactggtggccgtcagcctccaggggaaactgtacatggctaatgccggggactcccgggctattctggtgagaagggatgagattaggcccctgtcctttgagttcacccccgaaactgagcgtcaaagaatccagcagctggcattcgtttatcccgagctcctggccggcgagttcactaggttggagtttcccagacggttaaaaggcgacgacctggggcagaaagtgctgtttcgtgatcatcacatgagcggttggagttacaaacgggtggagaagagtgacttaaagtatcccctaatacacggtcagggaagacaagccagactgctgggcacgctggctgtgtcaagaggcttgggagatcaccaactacgtgtgctcgataccaacattcagctgaagccatttctgctgtctgtgccccaggttactgtgttggacgtcgatcagctggaactgcaagaggatgatgtcgtcgtgatggctacggacgggctttgggacgtcctgtccaacgagcaagtagcctggctcgtgagatccttccttcctggcaaccaggaggacccccacaggtattgttcatgctggggccccgcctgggcatgggtgggtgcctctagcaaacccaagtag

SEQ ID NO: 130830 - DNA, 897 bp, synthetic construct
  misc_feature 1..897: note = Description of Artificial Sequence: Synthetic coding sequence
  source 1..897: mol_type = other DNA
atgcatcttaacgggcggtgcatctgccctagcgatccgcaatttgtcgaggagaagggtatacgggccgaagacctggtcataggggcgctggaatccgcattccaggagtgtgacgaagtgatcggccgggagctggaggcctccgggcagatgggcgggtgcaccgcgctcgtagccgtgtcgttacagggtaaactctacatggccaacgcaggcgactcccgggccattctcgttcggagagacgaaattaggcctctgagctttgagttcactccagaaactgaaaggcagaggatccagcaactcgcatttgtgtacccagagctgctagccggtgaatttaccaggttggagttcccccgcaggctcaaaggcgatgatctggggcagaaggtgttgtttcgagaccatcacatgtcgggatggagctacaagagggttgaaaagagtgacttaaagtatcctctaatccatggccaagggcgacaagctaggctcttggggaccttggcagtatcaagggggctcggggaccatcagctgcgggtgctggatacaaacatacagcttaagcccttcttgttgtcggtcccccaagtgaccgttctggatgtagaccagctggagcttcaggaggacgacgtcgtggtaatggcaacagatggactgtgggacgtcctgagcaatgagcaggtggcttggcttgtgcgatcttttttaccaggtaatcaggaagatccacatagatttagtaaattggcgcagatgcttatccactccactcaggggaaggaggatagtctgacagaggagggtcaggttagctacgatgacgtctctgtgtttgtcatccctctgcattcacaggggcaggagtctagtgatcattag

SEQ ID NO: 130831 - DNA, 744 bp, synthetic construct
  misc_feature 1..744: note = Description of Artificial Sequence: Synthetic coding sequence
  source 1..744: mol_type = other DNA
atgggcggatgtacagcccttgtggcagtgagcctgcaggggaagctgtacatggccaacgcaggcgactcccgcgctatactcgtaaggcgcgacgaaatcaggcctctgtctttcgagtttactcctgagaccgaaaggcaaaggatccagcagctggccttcgtgtaccccgaactgctggctggcgagttcacgcggttggagttccctcgtagattgaaaggcgacgacctcgggcagaaggtgttgtttcgtgaccaccacatgtctgggtggtcttacaaacgtgtggaaaaatccgatctaaagtatcccctgatccacggccaaggaaggcaggctcggctcctgggcaccctcgccgtttcacggggactgggcgatcatcaattaagagttctcgataccaatatacagctgaaacctttcctgctgagcgtgccccaggtgacagtccttgacgtagatcagcttgagctccaggaggatgatgtggtggttatggcgaccgacggtctttgggatgtgctttctaatgagcaggtggcgtggctcgtccggagcttcctcccaggcaatcaggaggatccacatcggttttcaaaactagcgcagatgctaattcacagcactcagggcaaagaggatagccttaccgaggagggtcaggtgtcttacgatgacgtgtctgttttcgtcatcccattacatagtcagggccaagagagctcggaccactag

SEQ ID NO: 130832 - DNA, 1380 bp, synthetic construct
  misc_feature 1..1380: note = Description of Artificial Sequence: Synthetic coding sequence
  source 1..1380: mol_type = other DNA
atgtccgcaggatggttcagaagacggttcctcccaggagagccacttcctgctcctcggcccccagggccacatgcttcccccgtaccatacagacgcccgagatttctacgaggcagctcatcaagccctggtgccgctgacgcaagccgacggcccgacagcaggccagtcagaagccccgctcggggcagaactcttccctggaatgctggatacgcagagattatcaacgccgaaaaatccgagtttaatgaggaccaagctgcctgtggcaagttgtgcataaggagatgcgagttcggcgcagaggaagagtggcttaccctttgcccagaggagttcttgacaggacattattgggcactattcgacgggcacggtggccctgccgccgcaatattagcagccaacacactgcattcctgcctgaggagacagctcgaagcagttgtggagggcctggtcgctacccagccaccgatgcacctgaatggtagatgcatctgtccatctgatccccagttcgtagaggagaagggaatccgtgccgaggatctggtgattggcgcacttgagtctgcctttcaggaatgtgacgaggttatcggtcgcgagctggaggcatctggccagatgggggggtgcacagcactggtcgccgttagccttcagggcaaactctatatggccaacgccggggactcccgggcgattctcgtgagaagggacgagatccggcctctttcattcgagttcactcccgagacggaaaggcagaggatccagcagctggcatttgtctaccctgaactgttggccggagagttcacaagactggaatttccccggcggctcaagggggatgatctgggacagaaggtgttgttccgggaccatcatatgtctggttggtcctacaagagggtcgaaaagagcgatctgaagtaccctctgatccatggtcaggggaggcaggccagattgctggggaccttagccgttagcaggggattgggggaccaccaacttcgggttttggatactaacattcagttgaagccattcttactgtccgttcctcaagtcacagtcttggatgtcgaccagttggaacttcaagaggatgacgttgtggtgatggcaacggacggtctctgggacgtcctgagtaacgagcaagtggcttggttggttagatcatttctgcccgggaaccaggaggatccccatcggttctccaagttagcccagatgcttatccattccacccagggcaaggaggatagccttactgaggagggacaggtgagttacgatgacgttagcgtcttcgtgatccccctacactcccagggacaggaaagttctgaccattag

SEQ ID NO: 130833 - DNA, 1821 bp, synthetic construct
  misc_feature 1..1821: note = Description of Artificial Sequence: Synthetic coding sequence
  source 1..1821: mol_type = other DNA
atgcggcgaagcgaggtgctcgcggaggagtccatcgtctgcttgcagaaggccttgaatcatttgcgggagatttgggagcttattgggattcccgaagaccagaggctgcagagaacagaagtggtgaagaaacacatcaaagaactcttggatatgatgatagccgaggaagaaagcctgaaggaacgtctgataaagtccatttcagtgtgccagaaagaactcaatacgctttgcagcgagctgcatgtggaaccttttcaagaggaaggggagacaactatcctccagctggagaaagatttgaggacccaagttgagctcatgcggaaacaaaaaaaagagaggaagcaggagctcaagctcttgcaggagcaggatcaggagctctgtgagatcctatgcatgccccattacgatatcgattctgcctccgttccaagcctggaagaattgaatcagttcaggcagcatgtgaccacgctgcgggaaacaaaggctagccgtagggaagagttcgtgagcattaaacggcaaatcatattgtgcatggaggccttagatcacactccagatacaagcttcgagagagacgtggtgtgcgaagacgaggacgcattttgcctgtctcttgaaaacatcgcaaccctgcagaagctcctgcggcagttagaaatgcagaaatctcaaaacgaagccgtgtgcgagggcctgcgcactcagataagagagctctgggaccgactccagataccagaagaggaacgtgaggcagtcgccacaatcatgagcggctcgaaagccaaagtccggaaggcactgcaactcgaggtcgacaggctggaagagctgaaaatgcagaatatgaaaaaagtgatagaggcgatcagagtagagctcgtccaatactgggaccagtgtttttattcacaagaacagcggcaggcatttgcacctttctgtgccgaagattacactgaatccctgctgcagttgcacgatgctgaaatcgtgcgcctgaaaaactactatgaggtccacaaggagctctttgaaggcgtgcagaaatgggaagagacatggagattattcctcgaatttgagcggaaagccagcgatcccaatcggtttacgaaccgcggggggaatctcctgaaggaagagaaacaaagggcaaagctgcaaaagatgctacccaaactcgaggaagagctgaaggccagaattgaactttgggaacaggaacactcaaaagcctttatggtgaatggacaaaagttcatggaatatgtggccgagcaatgggaaatgcaccgactagaaaaggagcgggcgaagcaggagcggcagcttaaaaataaaaaacagacagaaacagagatgctgtacggatccgccccccgaaccccgagcaagaggcgcggccttgcccctaacacgccagggaaggccaggaaattgaatactacaacgatgagcaacgcgaccgccaattccagcatcaggccaatctttgggggtaccgtgtatcactctccggtgtcacgtttgcccccatctggttctaagccagtggcagctagcacgtgcagcggcaagaagacgccgagaacaggacggcacggcgcaaacaaagaaaacctggagctaaacggcagtattctttccggcggatacccaggatccgcacctctgcagcgtaatttctcgataaactctgtcgcctccacatacagtgagtttgctcgcgaactttcaaaggctagcaaaagcgacgcgaccagcggaatcctgaattccacgaacattcaatcctag

SEQ ID NO: 130834 - DNA, 1701 bp, synthetic construct
  misc_feature 1..1701: note = Description of Artificial Sequence: Synthetic coding sequence
  source 1..1701: mol_type = other DNA
atgcggcggtctgaagtcctggccgaagaaagcattgtgtgtcttcagaaggcactgaaccacctgagagagatctgggaactcatagggatccctgaggaccaaaggctccaacgtactgaagttgttaaaaaacacatcaaggaactgctggacatgatgattgccgaagaggaatccctgaaagagcgcctcatcaagtccattagcgtatgccagaaggaacttaacacactttgttctgagctccacgttgaaccatttcaagaagaaggtgagacaacaatattgcagctggagaaggatctgcgcacccaggtcgaactcatgcggaaacaaaagaaggaacgaaagcaggagctcaaactgcttcaggagcaagatcaggagctttgtgaaatcttatgcatgcctcactatgacattgatagcgcatctgtaccctccctggaggaactcaaccagtttcggcagcacgtcaccacactgagggagaccaaggctagtcggagagaggagttcgtctcaattaagaggcaaatcatcctttgcatggaggcactggaccatacacccgacacgtcctttgaacgagacgtcgtttgcgaggatgaggatgctttttgcctctcgctcgagaatattgcgacactccagaaattactacggcagctggagatgcagaagtctcagaacgaggcggtgtgtgagggtttaaggacccagattcgggagctttgggacagattgcaaattcccgaggaagaacgcgaggcagtcgctacaatcatgtctggctcaaaagcaaaagtccgaaaggccctgcagctcgaagtcgatcgcctagaggagctcaaaatgcaaaatatgaaaaaagtgatcgaggctatccgggtggagttggtgcagtactgggaccagtgcttttatagtcaagaacagcgccaggccttcgctccattttgtgctgaggactacacagagagtttgttacagctccacgatgcagagattgttcggttaaagaactattacgaagtgcataaggagctattcgagggcgttcaaaaatgggaggaaacctggagactgtttctagagttcgagcgtaaagcttcagaccccaatcgtttcacgaatagaggaggaaacctgctgaaggaagagaaacagagggctaaactccaaaaaatgttgcccaagctggaggaagagctgaaagccaggatcgagctatgggagcaggagcactctaaggccttcatggtgaacgggcagaaatttatggaatatgtagctgagcagtgggagatgcaccggctggagaaggagcgagctaaacaagagagacagctcaaaaacaaaaaacagaccgagacagagatgctttacgggtctgcgccacggactccgagcaagaggcgagggctggccccaaacaccccaggtaaggcaaggaaactgaacactaccacaatgtccaatgcgacagccaactcctccatcaggccaattttcggaggaaccgtctatcactctcctgtgtcccggctgccgcctagtgggtccaagcctgtggccgccagcacatgttcaggcaagaaaactcccagaaccggaaggcatggagccaataaggaaaaccttgagctgaatggcagtatactctctgcgcgcaccttcaaaggattccaaatttag

SEQ ID NO: 130835 - DNA, 1863 bp, synthetic construct
  misc_feature 1..1863: note = Description of Artificial Sequence: Synthetic coding sequence
  source 1..1863: mol_type = other DNA
atgcgccgatccgaggtccttgcagaagaatctatcgtgtgtctgcaaaaggcccttaaccaccttagagagatttgggagcttatcggcatccctgaggaccagcgtctgcaaagaactgaagtcgtcaagaaacatataaaagagctcctcgacatgatgattgctgaagaagagagcctgaaggaacgccttataaaaagtatctcagtatgccagaaagagctgaacaccttgtgttctgaactgcacgtagaacctttccaggaggagggcgagaccacaattctgcaactggagaaggacttaagaacccaagtggagctgatgagaaaacagaagaaggagcgcaaacaggagctaaagttactgcaagaacaggaccaggaactctgtgagatcctttgcatgccccactacgacattgacagcgcatccgtgccttccttggaggagctgaaccagttccggcagcatgtgactaccttgcgtgagacgaaagcatcccgaagggaggagttcgtctctatcaagcgacaaatcattctctgtatggaggccctcgaccacacaccagatacaagctttgagagagacgtggtctgcgaggacgaggacgcattctgcttaagtctggaaaacatcgcaacactacagaagctgcttcggcagctggaaatgcagaaatcacagaacgaggccgtgtgcgagggacttagaacccaaatccgtgaactatgggatagactgcagattccagaggaggaacgggaagccgtggcaactattatgtctggctccaaagccaaagtcagaaaggcactgcaactggaggtggaccgcctcgaagaactaaaaatgcagaacatgaagaaagtcatagaagccattcgggtcgaactggtgcagtattgggatcagtgtttttactcccaggaacagaggcaagccttcgcccctttttgtgctgaggactacacagagagtcttctccagctccacgatgcagagatagtgaggttgaagaattattacgaggtacacaaagagttgtttgagggcgtgcagaagtgggaggaaacgtggcgcctcttcctggagtttgaacggaaggcttcagaccctaaccggttcacgaatagaggagggaatttgctgaaagaggagaagcaaagggccaagcttcaaaaaatgctacccaagctggaagaagagctgaaagccagaattgagctctgggagcaagagcatagtaaagcctttatggtgaacggtcaaaagttcatggagtacgtggccgagcagtgggaaatgcacaggcttgaaaaagagcgagcaaaacaggaaagacagttgaaaaacaagaaacagaccgagaccgaaatgctctatgggtctgccccccggactccaagcaaaaggaggggtctggcccccaatacaccaggaaaggccaggaagctcaataccacaaccatgtctaatgccactgctaactccagcatccgacccatcttcggaggcacagtgtaccatagccccgtttctcgattgcccccttccggatcaaaaccagtagccgcctcaacctgttccggaaagaagactccaaggaccggccgccatggcgccaataaagagaacctcgagttgaacggtagcatcctgagcggcgggtaccctgggagtgcaccccttcagcgcaacttctctatcaactctgtggcttccacatactccgaatttgccaaggacccatccctgagtgactcgtctacggtggggcttcaaagggagctcagtaaggcatcgaagtccgatgcaacctcaggtatcctaaattcaacgaacatacaaagctag

SEQ ID NO: 130836 - DNA, 1578 bp, synthetic construct
  misc_feature 1..1578: note = Description of Artificial Sequence: Synthetic coding sequence
  source 1..1578: mol_type = other DNA
atgcgaagatccgaagtgctggcggaggagagtatcgtatgcctgcaaaaagccttaaatcacctgagggagatctgggaactgatcggaattccagaagatcagcgtctccagaggactgaggtggtgaagaagcatattaaagaggagggcgagaccaccatactccaactggagaaagacttgcggactcaggtggagcttatgcggaaacaaaagaaggagcgcaaacaggaacttaaactcttgcaggaacaggaccaggagttatgcgagatcttgtgtatgccccattatgacattgattctgcttcggtcccatccctggaggaactgaaccagtttagacaacacgtgaccacactccgcgaaacaaaagcctcccggcgggaggagtttgtatccattaagaggcagatcattctgtgcatggaggctttggaccatacacctgatacgagctttgagcgggacgtggtctgcgaagacgaggatgcattttgtttatccctcgagaatattgccaccctgcagaaactactgaggcaacttgaaatgcagaagtctcagaacgaagcggtgtgtgaaggtctgcgcacacagatcagggaactttgggatagactgcagataccagaggaagagagggaagctgtcgctactataatgtcaggaagtaaggcgaaggtgaggaaagccctacagttggaggtcgatcgcctggaggaacttaaaatgcagaatatgaagaaagtgatcgaggcgatcagggtagagttggttcagtactgggatcagtgcttctattcccaggagcagcggcaggcgtttgccccattttgcgcagaggattacaccgagagcctcctgcagcttcatgatgctgagatcgtgcgcctgaaaaactattacgaggtccataaggaactgttcgagggtgtgcagaaatgggaggagacgtggagactgtttctggaatttgaacgaaaggccagtgatccgaatagattcacaaaccgagggggcaacctgctgaaggaggagaagcagagagcgaagctgcagaaaatgctgcctaaactggaggaagaactaaaggcccgaattgaattatgggagcaggaacatagcaaggcctttatggtgaatggacagaagtttatggagtatgtggctgagcagtgggagatgcatcgcttggaaaaagaacgcgccaagcaggagcgtcagctgaaaaataaaaaacaaaccgagactgagatgctctacgggtcggcaccccggacacctagcaaaaggcggggcctggcacccaatactcctggtaaggcaagaaagctgaatacaactacaatgtcaaacgctaccgccaactcctcgatacgtcccattttcggcggcacggtctatcacagcccagtgtcccggctcccaccttctgggtccaagcccgttgcagccagcacctgtagtggcaaaaagaccccccgcacaggtcggcatggtgctaacaaggaaaatctagagctgaacggcagtattttgagcgcccgaacatttaaaggcttccagatctag

SEQ ID NO: 130837 - DNA, 696 bp, synthetic construct
  misc_feature 1..696: note = Description of Artificial Sequence: Synthetic coding sequence
  source 1..696: mol_type = other DNA
atgagggtgctcggtggccgctgtggagcactcttggcctgcctcctgctcgtcctcccggtgagtgaggctaacttctgcctgtatttccgcaatgattttatttataaccgggcatgtatttccgtcctcgtgggcctgagtgggtgcaatttcttctacagtatttgtttcctctccaagcaacaggccagccaggtcctcgtccgcaaacgccgggccaactcactcctggaggagacaaaacaagggaacttggagcgcgagtgcatcgaagagttgtgcaataaagaagaagctcgcgaggtgtttgaaaacgatcccgagactgactacttttaccccaagtacttggtctgccttcggtccttccaaactgggctgttcacagcggcccggcagtcgaccaatgcctacccagaccttaggtcctgcgtaaacgcgattcctgaccagtgcagtccactgccctgtaacgaagacgggtacatgtcctgtaaggacggaaaagcctcttttacatgtacatgcaaacctggctggcagggcgaaaagtgtgagtttgacatcaacgaatgtaaagacccaagtaatatcaatggaggttgctctcagatctgtgataacacaccggggagttatcattgctcatgcaaaaacggctttgttatgctgtcaaataaaaaagactgctag

SEQ ID NO: 130838 - DNA, 2031 bp, synthetic construct
  misc_feature 1..2031: note = Description of Artificial Sequence: Synthetic coding sequence
  source 1..2031: mol_type = other DNA
atgagagtcttgggcggtcgttgtggtgctctgctggcatgtctgctgctggttttacctgtaagcgaggcgaatttccttagtaaacagcaggcatctcaggtcctcgtgaggaagcgacgggctaattcattgctggaggagaccaagcagggaaatctggaacgggagtgtatcgaggagttgtgtaataaggaggaggctagagaagttttcgagaacgaccctgagaccgactatttctatccaaaatatttagtttgtctgaggagctttcaaactggactctttacagccgcaaggcaaagtactaacgcttatccagatcttcggtcttgtgtcaacgccattcccgatcaatgctccccccttccttgcaatgaagacggctacatgtcttgcaaagacggtaaggcatcattcacgtgtacgtgcaaaccaggctggcagggggagaaatgcgagttcgatatcaacgagtgcaaggatccaagcaacatcaatggaggttgttcccagatctgtgacaacacaccaggctcatatcattgttcctgtaaaaatggatttgtaatgctgagtaacaagaaggactgcaaagacgtcgatgaatgtagcttaaagcctagcatctgcggcacagccgtgtgtaagaacattccaggggatttcgaatgcgaatgccctgagggctacaggtataaccttaaaagcaaatcatgcgaagacatcgatgaatgctccgaaaatatgtgcgcacagttgtgtgttaattacccaggtggttacacctgctactgcgatggtaaaaaaggcttcaaactagcccaggaccagaagtcctgcgaggtcgtttccgtttgcctgccacttaacctcgacaccaagtatgagctcctgtatttggctgagcagtttgccggcgtggtgctgtatctcaaatttaggctgccagagatatccagattcagtgccgagtttgattttcgcacttatgactccgaaggcgttatcctgtacgcagagtcgatcgaccatagcgcatggctgctcattgctttacggggtggaaagatcgaggtgcagttaaagaacgagcacacgtcaaagataaccacagggggggatgtcattaacaacggactctggaatatggtgtccgtggaggaacttgaacattctatcagtatcaaaattgccaaagaagctgtgatggacatcaataagcccggccccttgttcaagcctgagaatgggctcctggagactaaggtgtatttcgcaggattccctcgaaaggtcgagagtgagttgattaagcctattaatccacgactggatgggtgcatccgatcctggaatcttatgaaacagggcgcctctggaataaaggagattatccaggagaagcagaataagcactgtctagtgacggtagaaaagggcagctactatccagggtctggcatcgctcaattccacatcgactataataacgtgtcctccgctgagggatggcacgttaatgtgacacttaacattcggccaagcactggaactggagtgatgctcgctctggtctctgggaataacacagtgcccttcgcagttagcctagtagactccacttcggaaaagtcccaagacattctcctttctgtagaaaacactgtgatttaccgcatacaggcgctctcgctgtgttctgaccagcagtctcacctggagttccgggtgaaccgcaataacctggagctgagcactcctcttaaaatcgagaccatttctcacgaagacctgcagcggcaactggccgtcctcgataaggcaatgaaggccaaagtggccacctacctgggaggcctgcctgatgtcccgttctcggcaactcccgtcaatgccttctacaacggctgcatggaggtgaacataaatggtgtccagctggacttagatgaggccatctcaaaacacaatgatattcgagcacattcttgtccatcagtgtggaaaaagacaaagaactcatag

SEQ ID NO: 130839 - DNA, 1275 bp, synthetic construct
  misc_feature 1..1275: note = Description of Artificial Sequence: Synthetic coding sequence
  source 1..1275: mol_type = other DNA
atggggtgcggcacatcaaaggtgttgcccgaaccacccaaggatgtgcagctcgacttggtaaaaaaggtggaaccattctctggcaccaagtctgatgtgtacaaacacttcatcacagaggtcgatagtgtggggccagtcaaggccggcttcccagcagcttcccaatatgcacacccttgcccagggccccccacggcgggccataccgagccaccatctgaaccccctagacgagcccgtgtcgctaaatacagagccaaattcgaccctcgagtcactgcaaagtacgatataaaggctttgatcgggaggggtagttttagccgagttgtccgggtggagcatagagctaccaggcagccatacgctatcaaaatgatagaaactaagtatcgagagggccgcgaagtgtgcgagagcgaactgcgagtgctgaggcgtgtccggcacgctaatattatacagctcgttgaggtgtttgagacacaggagcgggtgtacatggtcatggaactggctacgggaggcgaactattcgaccggataattgccaaggggtcattcaccgaacgggatgctacccgggtacttcagatggtcctggatggcgtaagatacctgcacgccctgggtatcactcacagggaccttaagcctgaaaatttgttgtattaccatccaggcactgattcaaagatcattatcactgattttggactggcatccgctcggaagaagggtgatgattgtctcatgaagacaacatgtgggacccccgagtacatagcaccagaggtgctcgtacgtaagccttatactaactctgtcgacatgtgggccctgggtgtgatagcctatatactcctctctggcacaatgccctttgaggacgataatcgcacccgtctctacagacagatcctcaggggcaaatacagctatagtggggaaccttggccctctgtcagtaacttggccaaggactttatcgatcgattgttaacggtggacccaggggcccgaatgaccgcacttcaggcactgaggcacccttgggtggtgagtatggccgcgtcctcctccatgaaaaatcttcatcggtctattagtcagaacctacttaaaagagctagttccagatgccaatccacaaagagcgcccagagcacaaggtcatcgcggtctacacgctcaaacaaaagtcgaagggtaagagaaagagaactgcgcgaattgaatctgagataccagcagcagtataatggctag

SEQ ID NO: 130840 - DNA, 1953 bp, synthetic construct
  misc_feature 1..1953: note = Description of Artificial Sequence: Synthetic coding sequence
  source 1..1953: mol_type = other DNA
atggcgtgccgagaattcgaaatgggtcgaaaaaaatgcgagcgctattggcctctctacggagaagacccgatcacattcgcaccatttaagatcagctgtgaagacgagcaggcccgaacagattacttcatcagaactctcctgctggaatttcaaaatgaatcccgccgattataccagttccactacgtgaattggccagaccatgacgtcccatcatcattcgattctattttggacatgataagcctcatgcgcaaatatcaggagcatgaggatgtccccatctgtatccattgttccgctggctgcggaaggaccggggctatctgtgcaatagattacacatggaacttgttgaaggcaggtaagatcccagaagagttcaacgtcttcaatttgattcaagagatgcgaacacagaggcattccgcggtgcagactaaggagcagtatgagctggtccatagagctatagctcagctgtttgaaaaacagctacagttatacgagatccatggagcccagaagatagctgacggcgttaacgagatcaacacggagaacatggtgagctcgatcgagcctgaaaagcaggactccccaccccccaagcctccacgcacccgcagttgccttgtggaaggtgacgctaaggaggagatactccaaccacccgagccccatccggtccctcccattctgacaccatcaccgccttcagcctttccaacggtgaccaccgtgtggcaggataacgatcgctatcacccgaaacctgtgctccacatggtcagttctgagcaacattccgccgatctcaatcgcaattatagcaagtccactgagctgcccggaaagaacgagagcaccattgaacaaatcgataaaaagttggagagaaacctgtccttcgagataaagaaggtgccacttcaggagggacctaagtcgttcgacggaaacaccctccttaatagaggccacgcaattaaaataaaatccgcttctccttgtatagctgataaaatctccaaaccacaggagttgtcaagtgacctgaacgtgggcgatacctcgcagaattcgtgcgtcgactgctccgtcacacaatcaaacaaggttagcgtcacgcccccagaggaaagccaaaactcagacacaccccccagaccggacagactccctctggatgagaagggtcatgtgacgtggagcttccacgggccagaaaacgctatccccataccggacttatcagagggcaactcttctgatatcaattaccagacgaggaaaaccgtctctctgaccccttcgccgacaacccaggttgaaacccccgatctagtggaccacgataatacttcccccctgttcagaacccccctgagctttaccaaccctctgcacagcgatgacagtgactctgatgagaggaacagtgatggcgctgtcacccagaacaaaacaaatatctctacagccagcgccaccgtgagcgctgctacctctacagaaagtattagtacacgaaaggtcctccccatgtcaatcgcaagacataacatcgctgggaccacgcacagcggtgctgagaaggatgttgacgtttccgaagacagtcccccaccattaccagaaaggacacctgagtctttcgtgcttgcctcagagcacaacacccccgtgcggtccgagtggtccgagcttcaatcgcaagagcggtctgaacagaaaaaatccgagggcttaatcactagcgaaaatgaaaagtgtgaccaccctgctggggggattcactatgaaatgtgtatcgagtgtccacccacattctcagataagcgagagcaaatttccgagaatccaaccgaggcgactgacattggatttggcaatcgttgcggcaagccgaaggggccacgggaccctccctctgagtggacttag

SEQ ID NO: 130841 - DNA, 1062 bp, synthetic construct
  misc_feature 1..1062: note = Description of Artificial Sequence: Synthetic coding sequence
  source 1..1062: mol_type = other DNA
atgagtcgctcacttgattctgcgcgcagctttctggaaagactggaggctcgcggcggcagagaaggggccgtactagcaggtgagtttagtaaaaggtgcgaaaggtattgggcccaggaacaggagcctctgcagactggtcttttctgtatcactctgattaaggagaaatggctgaacgaagatattatgctgagaacgcttaaggttaccttccagaaagagagccgttccgtctatcagttgcagtatatgtcttggcctgatcggggcgtgccatcttcacctgaccatatgctcgcaatggtggaggaagctcgcaggttacaggggagtggtcctgagcccctttgtgtccactgcagcgctgggtgcgggcggactggtgttttatgcacggttgattacgtcagacaactgctgctgacacagatgattccgcctgacttcagcctgttcgatgtagttctcaagatgcgaaaacaaaggccagcagccgttcagaccgaagagcagtacaggttcctgtatcataccgtggcccagatgttctgttccacgcttcagaacgcgagcccacattaccaaaacatcaaagagaactgcgcacctctgtacgacgatgctctgttcctccgtaccccccaagctctgctagccatacccagaccacctggaggggtcctgcggagcatcagtgtccccggcagtccaggccatgcaatggccgatacatatgctgtggtgcaaaagcgaggcgcgccggcgggtgctggctccggcacccagacgggaaccggcactggcactggggcaaggtcagccgaagaagcccctctgtacagtaaggtgacaccacgggcccagcggcccggggcccacgccgaagacgctagaggcactctccccggaagggttcctgccgaccaaagcccagctggctccggcgcctacgaggatgtagcgggcggagctcaaactggtggcctcggatttaatctgaggatcggccgtccaaagggaccaagagacccacccgccgaatggacacgcgtatag

SEQ ID NO: 130842 - DNA, 1233 bp, synthetic construct
  misc_feature 1..1233: note = Description of Artificial Sequence: Synthetic coding sequence
  source 1..1233: mol_type = other DNA
atgccaacaaccatcgaaagagagttcgaggagcttgatacacagaggagatggcagcccctatatctggagatcagaaacgagtcccacgactatccccaccgcgtcgccaaatttcccgaaaatagaaatagaaaccgctaccgggatgtctctccttacgaccattctagagttaaactgcagaacgccgaaaatgactacataaatgcgtcattggtagatatcgaagaggcacagagaagctatatcttgactcaaggccccctccctaatacttgctgtcatttctggttgatggtctggcagcagaaaacaaaagcagtcgtgatgctgaaccgtatcgtcgagaaagaaagtgtaaaatgtgctcaatactggcctacagacgatcaggaaatgctgtttaaagaaacaggcttctccgtcaaactcctctcagaggacgtgaagagctattatacagttcacttgctccaacttgagaacataaactacatcgaaaatctatggatcactctgtacctgaagctcttgatgctggacgtaaaacgctctttaaagagcggcgaaacaaggaccatctctcattttcactatacgacctggccggacttcggagtgcctgagagcccagctagcttcctgaacttccttttcaaggtgcgtgaatccgggtctctaaaccctgaccacgggcccgccgtgattcattgttcagcaggcataggtagatcgggcacattctctcttgttgacacctgcttggtgctgatggagaaaggcgacgacatcaacattaaacaagtattgctgaacatgcgcaagtaccggatgggcttaatccagacccctgatcagttgcggtttagctacatggccattatcgagggtgccaaatgtattaagggcgatagcagtatccagaaaaggtggaaggagctaagcaaagaagaccttagccctgccttcgatcactcccccaacaagatcatgactgaaaaatataacggtaacaggataggcctggaggaagaaaagttgacgggggatcgatgtacgggcctgtcgtccaaaatgcaggacaccatggaagaaaattccgagtctgctctcaggaagagaatccgtgaggaccgaaaggctaccaccgctcagaaagtacaacagatgaagcaacgccttaatgagaatgagaggaaacgaaaacgccctcgactcactgacacgtag

SEQ ID NO: 130843 - DNA, 2259 bp, synthetic construct
  misc_feature 1..2259: note = Description of Artificial Sequence: Synthetic coding sequence
  source 1..2259: mol_type = other DNA
atggaccagcgggagatcctccagaagttcctagatgaagcccagagcaaaaaaataacaaaggaagaattcgcaaatgaatttctgaagctcaagaggcagtccaccaaatataaggccgacaagacgtatcctacgactgtagctgagaagcctaagaatatcaaaaaaaatagatacaaagatattttgccatacgattattcacgcgtcgaactgtcgctgatcacatctgacgaagactcctcctacattaacgccaactttatcaagggcgtctacggacctaaagcttacattgccacacagggcccgctctctaccaccctgctcgacttttggagaatgatctgggaatattctgtcctgatcatcgtgatggcctgcatggagtacgaaatgggaaaaaaaaagtgcgagagatactgggccgagccgggcgaaatgcagttagaatttggtcctttctcagtatcctgcgaggctgaaaagcgaaaatctgattatatcatccgaacactcaaggttaagtttaacagtgagactcgcacgatttaccagtttcactacaagaactggccggatcatgacgtacccagctccattgatcccattcttgaactcatatgggatgtgaggtgttatcaagaagacgatagcgttccaatctgcattcactgctccgcaggctgcggaaggacgggcgtcatctgcgcaatagactatacctggatgctcttgaaggacgggagccaagcaaaacactgtattcctgagaagaatcacacccttcaggcagattcttactcccccaacctccccaaaagcactacaaaagctgcgaagatgatgaaccagcagagaacgaagatggagatcaaggagagctcatcttttgacttccgcacttcagagatcagtgctaaggaggaactcgtgttgcacccagcaaagagctctacttcatttgactttctggagctgaactactcttttgacaagaacgccgataccactatgaagtggcagaccaaggctttccccattgtcggcgagcctcttcagaaacaccagtccctcgacttaggttctctactctttgaaggttgttcaaattctaaaccggtgaatgccgccggtaggtatttcaacagtaaagtcccgatcacccgcaccaaaagtaccccttttgaattaattcagcagcgggagaccaaggaggtggactctaaggaaaacttctcctatctagagagtcaaccccatgattcctgtttcgtggagatgcaggctcagaaggtgatgcatgtctctagcgctgaattaaattattcgttgccctacgatagcaaacaccagatccggaatgccagcaatgtcaaacatcacgatagcagtgcattgggcgtttactcttacatcccgctggtggaaaacccctacttttcttcatggcccccgtctggcacatcaagtaaaatgtcactcgatctgcccgaaaaacaagatggaaccgtatttccctccagccttctgcctacttcttccaccagtcttttcagctactacaattcacacgactcgttgtccctcaattctcctacgaacatttcctccctcctgaaccaggagagcgcagtgctggcaacggccccaaggattgatgatgaaatcccccccccactgccagtgtggacacccgagagttttattgtggtggaagaagccggtgaattttcgccaaatgtacctaaatcgcttagctccgctgtcaaggtgaagatcggaaccagcttggagtggggcggtactagcgagcccaaaaaatttgacgactcagttattctcaggccatcaaagagcgtgaaattgcgatcccccaaaagtgaacttcatcaggatcgcagctcaccccctccccctctccccgagcggacattagagtcttttttccttgccgacgaggactgtatgcaggctcagagcattgagacgtactcaactagttatcccgacacaatggaaaactctacaagctctaaacagactctaaagaccccaggcaagtcgttcactcggtcaaagagcttaaaaatcttgcgcaatatgaaaaaatcgatttgtaattcctgtcccccgaacaagcctgcagaatcagttcaatcaaacaactccagctcttttctcaatttcgggttcgccaatcgtttcagcaaaccaaaaggccctcggaaccctcctcctacctggaacatttag

SEQ ID NO: 130844 - DNA, 5724 bp, synthetic construct
  misc_feature 1..5724: note = Description of Artificial Sequence: Synthetic coding sequence
  source 1..5724: mol_type = other DNA
atgttgtcacatggtgcggggctggctttatggatcactctgtccctgctgcaaacgggcctcgccgaaccggagcgctgcaactttactctggccgagtctaaggcttcttctcattccgtttcaattcaatggagaatcctcggatccccctgcaatttcagcctgatatattcctctgataccctgggggctgccttgtgccctacctttcgtatcgacaataccacctatggatgcaatctgcaagatctccaggctggaacgatctacaattttcgcatcatcagtttggacgaagagcggactgttgtgcttcagactgatcctctgccccccgccaggtttggcgtgtccaaggagaagacgacctccacctccctccatgtgtggtggacaccttccagcggcaaggtgacgtcttacgaggttcagttattcgacgaaaacaaccagaaaattcaaggcgtgcagatacaagaatccacaagttggaatgagtacactttctttaacctgactgcagggagtaaatataacatcgcaataacagctgtcagcggaggcaaacggtccttcagtgtttacaccaacgggagtactgtgcccagccccgtgaaagatatcggaatttccacaaaagcaaatagcttgctcattagctggagtcacgggtccggaaacgtcgaaaggtataggttgatgctgatggataaaggtatccttgttcacggaggggtagtcgacaagcatgctacatcctacgccttccacggcctgacccccggttacctgtacaacctgaccgtcatgactgaggcagcggggcttcaaaactacaggtggaaacttgtgcgaacagcccctatggaggttagcaacctaaaggtcacaaatgatggcagcctcactagtctgaaggtcaaatggcagcgcccaccgggaaatgttgattcatacaatataacgctgagtcacaaggggactattaaagaatctcgcgttctcgctccatggattacagagactcatttcaaggagttggtgcctggtcggctgtatcaggtgacagtcagctgtgtgtccggggaattgagtgcccagaaaatggctgtgggccggaccttccctgataaggtggccaacctggaagccaacaacaacggccggatgcgcagtctggtggtgagttggtccccccccgccggtgattgggagcagtacaggatccttttgtttaacgactcagtcgtcctcctcaatataacagttggaaaagaagagacccagtacgttatggatgacacagggctggttcctggtaggcagtacgaagtagaagttatagtggaaagtggaaatctcaaaaacagcgagagatgtcagggcaggaccgtgcctttggccgtgctgcagctccgggttaaacacgcaaacgaaacttcactcagcatcatgtggcaaacacctgtggctgagtgggagaagtatatcatcagcctggctgaccgggatctgctcttgattcataaaagcctgtccaaagacgctaaggaatttacatttactgatctggtacccgggagaaagtacatggccacggttacaagcatcagtggagaccttaaaaatagttcctcagtaaagggaaggaccgtgccggcacaggtgacagatctccacgtggccaaccaagggatgacatcatcactcttcacaaactggacacaggctcaaggcgatgtcgagttctatcaggtgctgcttatccatgaaaacgttgttataaagaatgaaagcatcagcagcgaaacctcaaggtacagctttcacagtttgaagagcgggagcctgtacagcgtagtcgtcacgacagtaagcggcggcatctctagtcggcaagtagttgtagaaggccgcacagtaccatcatctgtgtccggggttacggttaataacagcggacgtaacgattacttaagcgtgagctggcttctcgcccctggagacgtcgacaattatgaagtcaccctgtcgcacgatggcaaggttgtacaatccctggtaatagccaagagtgtgcgggagtgctctttctcctcactgacacctgggcgtctgtatactgttactatcactacccgcagcgggaaatacgagaatcacagcttctcacaggagaggaccgttcctgacaaagttcagggagtgtctgttagcaactccgctcgaagtgactatctgcgggtgagctgggtgcatgcaacaggcgacttcgatcattacgaggtgaccatcaagaacaagaacaactttatccagactaagtcgatccccaagtccgagaacgaatgcgtcttcgtacagctagtgcctggcaggctctactccgtgactgtgacgaccaagagcggtcagtatgaagcgaatgaacaagggaatggacgtactattccagaaccagtgaaagatcttacactaaggaaccggagcaccgaagacctccacgtgacttggtcaggggcaaacggggatgtcgaccagtatgaaatacagctcctgttcaacgatatgaaggtcttccccccgttccaccttgtgaataccgctaccgaatatagatttacctccctcactcctgggcgtcagtataagatccttgttctaacaatttccggggacgttcagcagtctgcttttattgaaggctttacagtacctagcgcagtgaagaatatccatataagccctaacggtgcaacagactctcttactgtgaactggactcctggaggaggcgacgtcgattcctataccgtgagcgcctttagacacagccagaaagttgattctcagaccattcccaaacacgtgtttgagcacacatttcataggttagaagcaggcgaacagtatcagattatgattgcctctgtctccggatccctcaagaatcagataaatgtcgtgggacgtacagtccctgctgccgtcaccgacctgcggatcaccgagaattctacgcggcacctgtcttttcggtggactgcaagtgaaggggagctgtcctggtataacatctttttatacaatccagatggtaacttgcaggagcgggcgcaggtggatccactggtgcaaagtttcagttttcagaacttgttacaaggaaggatgtacaagatggtgatcgtgacacatagtggcgaacttagcaatgagtccttcatattcgggcgcacggtgcccgctagcgtatcacaccttaggggcagtaatcgaaacactactgactccttgtggttcaactggagcccggcatcaggcgactttgatttctatgaactgattctctacaatcccaatggcactaagaaggaaaactggaaggataaggatctgacggaatggaggtttcaaggactggttcctggacggaagtacgtcctctgggtcgtcactcactccggggatctgagcaataaggttacagccgagtcacgaaccgcacctagtcctccatctttgatgtcatttgctgacatcgccaacacctctttggctatcacctggaaaggccccccagattggacagactacaacgatttcgaactccagtggctgcctcgtgacgctctcaccgttttcaacccctacaacaaccggaaatcggagggccgtattgtttatggtctgagaccgggccgtagttaccagttcaacgtgaagacggtgagcggggactcatggaaaacctattctaaacccatcttcggcagcgtccgcactaaaccggataagatccagaacctgcactgcagacctcaaaatagtacggctattgcctgctcatggatccctcctgactccgactttgacggctactcgattgaatgtcggaagatggacacccaggaggtggaattcagtagaaaattagagaaagagaagagtctgctgaatataatgatgctggtcccccataagcgttacctcgtgtccatcaaagtgcagtcggctggaatgacctctgaagtggtggaggattcaacaatcactatgatcgatcgaccacccccgccaccaccgcacatacgcgtgaatgagaaggacgttctcatttcaaaaagttctatcaatttcacggttaattgtagttggttctctgatacaaacggcgctgtcaagtactttaccgtggtggtgagggaggctgatggatcagacgaactcaaacctgagcagcagcatccactcccgagttatttggagtatcgacacaacgcgtcgatcagggtttaccaaaccaactactttgcctcaaagtgcgccgagaatccaaactccaattccaaatccttcaatataaagcttggagccgaaatggagtccctggggggaaaatgtgatcctactcaacagaagttctgcgatggacccctgaaaccccacaccgcctacaggatctcaattcgagccttcacacaactttttgatgaggacctgaaggagttcaccaagcccctgtattcagacaccttctttagtctgcctatcacaacagagtccgagccactttttggggccattgagggcgtatccgccggactctttttaatcggcatgttagtagctgtggttgccctactcatatgccgccaaaaagtgtcccacggccgagagaggccaagcgccagactgagcatccggagagacaggccgctaagtgtgcacttgaacctggggcaaaagggtaaccgaaaaaccagctgccccattaaaattaatcagtttgagggtcacttcatgaaactgcaggctgacagtaactatctattgtccaaggagtatgaagaactgaaggacgtcggccgaaaccagtcatgcgacatcgctctgctcccggagaaccgcggcaagaataggtataacaacattctgccctatgacgccaccagagtgaagttgtcgaacgtcgatgacgatccatgcagcgactatattaatgcttcttacattccgggcaacaattttcgccgggaatatatcgtcacacagggacccctccctggcaccaaagacgatttttggaagatggtttgggaacagaacgtccacaatatcgtcatggttacccagtgcgtcgagaagggacgagtgaagtgcgaccactattggcccgcagatcaggacagtctctactacggcgacctgatcttacagatgctcagcgaatccgtactacccgaatggactatcagggagttcaagatctgtggagaagaacaattagacgcgcaccgtttgatccggcacttccattacaccgtctggccggatcacggcgtgcccgaaaccacacagagcctgatccagttcgtgcgcactgtgagggactacattaatcgctcccccggggctgggccaaccgtcgttcactgttccgcaggggtcggcagaacagggacttttattgctctcgacagaatcttacagcagttggacagcaaagatagcgttgatatttatggcgccgtacacgatttaaggttgcatcgagtgcacatggtccagacagagtgccagtatgtttatttacatcagtgcgttcgcgacgtactgcgcgcacggaaactgcggtctgaacaagagaatccactctttccaatctacgagaatgtcaaccccgagtaccaccgggaccccgtgtacagtcggcattag

SEQ ID NO: 130845 - DNA, 4518 bp, synthetic construct
  misc_feature 1..4518: note = Description of Artificial Sequence: Synthetic coding sequence
  source 1..4518: mol_type = other DNA
atggtgcatgtggccaggctcctgctcttattgctgaccttttttctgcgcaccgacgccgaaacgccacccagattcacgcgcactcctgtggatcagaccggcgttagtgggggtgtagcgtcattcatatgccaggccacaggcgacccacggccaaaaatcgtttggaataaaaaagggaagaaggtcagtaaccagcgttttgaggtcatagaatttgacgacgggtcgggttcagtgcttcgcattcagccgctccgaactccccgagatgaggccatctatgaatgcgtagcatcaaataatgtcggcgaaattagcgtttcaacaagactgactgtgttacgtgaagaccagatcccacgcggatttccaacaattgacatgggcccccagctcaaggttgtagagcggacccgcacggcaacgatgctctgtgccgcgagtggcaacccagaccctgagattacctggttcaaggatttcctccccgtcgacaccagcaataacaatggcagaataaagcaactgaggagcgagtccattggagctttacaaattgaacagagcgaggagtccgaccagggaaaatacgagtgtgtcgccaccaatagtgctggcacgcgatatagcgccccggctaacctgtatgtccgtgtccgcagagtcccccctcgcttttctatcccccccacaaaccacgaaataatgcctggaggttctgtgaacatcacctgcgtggctgttggctccccgatgccgtacgttaagtggatgcttggggctgaagacctgaccccggaagatgacatgccaataggccgtaatgtactcgaactgaacgacgtgcggcaatccgcaaattatacctgtgtggctatgtccacactcggtgtgatagaagctatagcccaaatcaccgttaaagcactgcctaagccccccgggacccccgtagtgactgaaagcactgcgaccagtataactctgacctgggacagcggcaaccccgagccagtgagttactacataatccagcacaagcctaagaatagtgaagagttgtataaagagatagacggagtggcaaccacccgctattctgtggcggggttaagtccctatagcgactatgagttccgcgtcgtcgcagtaaacaacatcggccgaggtcccccttctgaaccagtgctgactcagacttccgaacaagctccaagctcggcaccgagagacgtacaggcacggatgttatccagtacaaccattcttgtgcaatggaaggaacctgaggagcctaacggccaaatacagggctaccgagtatattatacaatggatccaactcagcatgtgaataattggatgaaacataatgttgccgattcgcagataaccaccataggaaatctggtaccccaaaaaacctacagtgtgaaggtgctagctttcacctccattggggacggcccactatctagcgacatccaggtcatcacacagacaggcgtgccagggcagcctctgaacttcaaagctgaaccagaaagtgaaacatccatactgcttagttggactccaccccggtcagatactattgccaactatgagctcgtttataaggatggtgaacacggggaagagcagcgcatcactatcgaaccaggcactagttatcgacttcagggtctcaaaccaaatagtttgtactactttcgactggccgctcgttcacctcagggacttggcgcgtcaacggctgaaatcagtgctcggaccatgcagagtatgttcgccaagaatttccacgtgaaagccgtgatgaagacatcggtacttctcagctgggagattcctgagaattataactcggccatgccctttaagatcctctacgacgatggtaaaatggtcgaggaagtcgacggaagggccacacagaagttgatagttaacttgaagcctgagaagtcctacagtttcgtattgacaaatagagggaactctgctgggggcctgcagcatcgggttaccgcgaagaccgcccccgacgtgttgcggaccaagcccgcattcatcgggaagactaaccttgatggcatgattactgtgcagctgcctgaagttccggcaaacgagaatataaaaggttattacatcatcatagtgccgttgaaaaaaagccgcggaaagtttattaagccctgggaatcccccgacgagatggagctcgatgagctgttgaaggagatatctaggaaaagaaggtcaataaggtacgggcgcgaagtagagctgaagccatacatagcagctcatttcgatgtgctccctaccgagtttaccctgggggacgataagcattatggagggttcaccaacaagcagctgcaaagcgggcaggagtatgtgttcttcgtactagctgtgatggagcacgccgagtcaaaaatgtatgcaacttccccctactcggaccccgtggtatccatggatttagatccccagccaatcaccgacgaagaggagggactaatttgggtcgtgggacctgtgctggcagtggtgttcattatttgcattgtgatcgcaattttgctctacaagaggaaacgagccgaatctgactccagaaaaagcagtattccgaacaacaaagagatcccatcacaccacccaacagaccccgttgaactgagacgtctcaattttcagacccccggttctgatgacagcggatatcctggcaatttgcactctagctcaatggcctcacatccccctattcccattttggagcttgccgaccatattgagagattaaaggcaaacgataatctgaaattctcccaagaatacgagtccattgatccagggcaacagttcacctgggagcattccaacctggaagtcaacaagcccaaaaaccgctatgccaacgtgatcgcgtacgatcactcacgagtgcttctgtccgccattgaaggcattcccggaagcgattatgtcaatgccaactacattgatgggtacagaaagcagaacgcttacattgcaacacagggtagtctacctgaaacgttcggagatttttggaggatgatatgggagcagaggtccgcaacagttgtaatgatgacgaaactcgaggagagatccagggttaagtgcgatcagtattggccttcccgaggtactgaaacccatggactggttcaggtgaccctgcttgacaccgtggagttggccacctactgcgtgagaacgttcgcgttgtataagaatgggagctccgagaagagggaagtaaggcagttccagtttactgcctggcccgatcatggagtcccggagcacccgacaccttttctggcctttctccggagggtcaagacttgtaatcctcctgatgcaggtcccatggttgtgcactgctcggccggtgttggcaggactggttgtttcatcgtaatcgacgctatgcttgagcgtattaaacatgaaaaaacagtggacatctacggccatgtcactttgatgcgggctcaacgcaattatatggtgcagaccgaagaccagtatatctttatccacgatgccctgttggaggcagtaacctgtggtaacacagaagtgccagcccggaacctatacgcctacattcagaagctgacccaaatcgagaccggcgagaacgtgaccggcatggagttagaatttaaacggctagcctcttcaaaagctcatacttctcgattcatttctgcaaacctcccttgcaataaattcaagaatcgtctcgtaaatatcatgccatatgaatccacgagggtatgtttacagccaattaggggggtggaggggtctgactacatcaacgcatcatttattgatggatacagacagcagaaggcatatatcgcaacccaggggccattggcagagactaccgaagacttttggcgaatgctttgggagcataactcgaccattgtggtgatgctgaccaaactcagggagatgggtagggagaaatgccaccagtactggcctgccgaacggtctgcccggtaccagtatttcgttgtggatccaatggctgagtacaatatgccccagtacatcctcagagagttcaaagtaaccgacgcacgcgacgggcagtcccgtacagtgcgccagttccagtttactgattggcccgaacaaggggtccctaagagcggcgagggcttcatcgatttcatcggtcaggtgcacaagactaaggagcagttcgggcaagacggtccaattagtgttcactgttccgccggagtagggagaactggagttttcatcaccctgtcaatagtcctagaaaggatgcgctacgagggggtggttgacattttccagacagtcaaaatgctgcggacccagagacccgcaatggtacagacagaagatcagtaccagttctcttatcgcgcagctctcgaatatttggggagcttcgaccattatgctacttag

SEQ ID NO: 130846 - DNA, 4398 bp, synthetic construct
  misc_feature 1..4398: note = Description of Artificial Sequence: Synthetic coding sequence
  source 1..4398: mol_type = other DNA
atgaggggattaggcacatgtttggccacgctggcaggactcctgctgaccgcagcaggagagaccttctcaggtggctgcctgttcgatgaaccttattcaacctgcggatattcccagagtgagggggacgattttaattgggagcaggtgaatactctgaccaagccgacatcagacccctggatgccctcgggatccttcatgctggtgaatgcctctggcagacccgaggggcaacgcgcccaccttctcctccctcagcttaaggaaaatgatacccactgtatcgatttccactacttcgtctcatctaaaagcaatagcccgcctggcctgctgaacgtttatgttaaggttaataacggacctcttggaaaccccatctggaatatctcgggggaccccacaagaacttggaacagagctgagcttgctatcagcacgttctggccaaacttttaccaggtgatttttgaggtgatcacctctggccaccagggctacctggccatagacgaggtgaaggtcttaggtcacccatgcacacgaacgccccatttcctgcgtattcaaaacgtggaagttaatgccgggcaatttgcaacttttcaatgttccgctattggccgcacagttgccggcgatagattgtggctgcagggtatagacgtgcgtgacgccccactaaaggagattaaggtcacctcttcaagaaggtttatcgcttcattcaatgtggtgaataccacaaaacgagatgcgggtaagtataggtgtatgattcgtaccgagggaggagtgggcatttccaattatgcagaactggtcgttaaggagccacccgtccctattgcaccaccccagctcgctagcgtcggcgccacgtatctgtggattcagttaaatgctaattcaatcaacggcgacggtcccattgtcgccagagaggtggaatactgtacagcgtccggctcgtggaatgatcggcagcctgttgactccactagttacaagatcggtcatctggaccctgataccgaatatgagatatcagtactattgactcggccgggcgagggggggacgggaagcccaggccccgccctaagaaccagaactaaatgcgctgaccctatgagagggcctcgcaaactggaggtggtggaagtcaagagcaggcagattaccataagatgggagccgtttggctataacgtcacccggtgtcatagctacaatctcaccgttcactactgctaccaagtaggcggtcaggagcaggtgagggaggaagtgtcttgggacacagagaactcccatcctcagcataccattaccaacttatccccgtacaccaacgtctccgtcaagctgatcctgatgaatcccgaaggtcggaaagaatctcaggaactgattgtgcagaccgacgaggacctcccgggagctgttccaacagaatccatacaggggagtacttttgaagagaagatcttcctgcaatggcgggagccaactcagacatacggtgtcattaccctgtatgaaatcacctacaaagctgtatcgagtttcgacccagagattgatttatccaaccaaagcggccgcgtaagtaagctgggtaacgagacccactttctgttcttcgggttgtaccccggaaccacctacagcttcaccattagagccagtaccgcgaaaggtttcgggccaccggcaacaaatcagtttacaacaaagatttctgcccccagcatgccagcctacgagctggaaacaccgctcaatcagaccgacaacacggttacagtgatgctgaagcctgcacattccaggggtgcacctgtgtctgtgtatcaaatagtcgtcgaggaagagagaccccgtcggactaagaagactacggagattttgaaatgctaccctgtaccaattcacttccagaacgcatctctgttgaattcccagtattatttcgctgcagaattcccagcggactctctccaggcggcgcaacccttcaccatcggcgataataagacatataatggctattggaacacccctctgctcccttataagagctatcggatttacttccaggccgccagcagagctaacggtgagaccaaaatagactgcgtgcaagtggcaaccaagggcgctgctactcccaaacccgttcccgagccagagaagcaaactgatcatactgtaaaaatcgcgggggttatcgccgggattcttctgttcgtcatcatcttcttaggcgtggttctggtcatgaaaaagcggaagcttgctaaaaagagaaaagaaaccatgtcttcaacaagacaggaaatgacagtgatggtcaattctatggataaaagttacgccgaacagggaacaaattgtgatgaagcctttagttttatggacacacacaatctcaacgggcgatccgtgtcatccccctcctcgttcaccatgaagacaaacacgctgtccacctctgtgcccaactcctattaccccgatccatttgtccccactgcaattctggttcctatcaatgacgagacccacacgatggcatcagacactagttccctggtccaatcacatacctacaaaaaaagggaacccgctgatgtgccataccaaacaggccagctgcaccccgccattagagttgccgatctcttacagcacatcactcagatgaaatgcgcagagggttatggctttaaggaagagtatgaatctttttttgaaggacagtcagcgccttgggatagtgccaagaaagacgagaatcgcatgaaaaacaggtatggcaacatcatcgcgtacgaccatagtagagttcggctgcagaccatcgagggcgatacaaacagcgactacatcaatggtaattatattgacggatatcatcggccaaaccactacattgctacacaaggtcccatgcaggagaccatttatgacttttggaggatggtgtggcatgaaaataccgcctccatcatcatggtaaccaacctggtggaggtgggtagggtaaaatgttgcaaatattggcctgacgacactgagatctataaggatatcaaagtgacgcttatcgagactgagctgctggcagagtacgtgatccggaccttcgccgtggagaagcgcggggtacacgaaatccgcgaaatccgccagtttcacttcacagggtggcctgaccatggagtgccctatcatgcaacagggctcttgggcttcgtgcgtcaggttaagtctaagtccccaccgagtgcaggacctcttgtggtgcattgttcagcgggagctggacggactggttgcttcatcgtgattgacatcatgcttgatatggccgagagagaaggtgtagtggacatctataattgcgtaagggagctgcgctccaggcgggtaaatatggtccagactgaagagcagtacgtgttcattcacgacgcaatccttgaggcctgtctctgcggggacacaagcgtcccagcctcccaggtgcggtccctgtactacgacatgaataaactcgatcctcaaaccaactctagtcagatcaaagaggagtttcggacactcaacatggtgactcctactctccgagtggaagactgctcgatagcactgctaccccgcaatcatgagaaaaatcggtgtatggacatcctgcccccagatcggtgcctgcctttccttatcaccatcgatggcgaaagctctaactacatcaatgccgccctcatggactcctataaacagccatcagctttcattgtcactcagcatcctttgcctaacactgtgaaggatttctggcgcttggttctggattaccattgcacctcggtcgtgatgttgaatgatgttgacccggcacagctgtgtccacagtactggcctgagaacggggtccatcggcatggacccattcaagtggagtttgtgagtgccgatttagaggaagatattatatcccggatttttcgtatttataacgctgctcggccgcaagacgggtacaggatggtgcagcagtttcagtttctaggctggccgatgtacagggacacacctgtttctaagaggagctttctcaaactaatcaggcaagtggacaaatggcaagaagaatataatggtggtgaaggcaggaccgttgtgcactgtctcaacgggggcgggagaagtggtacattttgcgcaataagcattgtttgtgagatgctgcgtcaccagcgcaccgtggacgtgtttcacgctgtgaagacactgcgaaataataagcccaacatggtggaccttctcgaccaatacaagttttgctatgaggtagccctcgaatacctcaatagtgggtag

SEQ ID NO: 130847 - DNA, 4323 bp, synthetic construct
  misc_feature 1..4323: note = Description of Artificial Sequence: Synthetic coding sequence
  source 1..4323: mol_type = other DNA
atggcacgagctcaggctctggtgctcgcccttacttttcagctctgcgccccagagactgaaacccctgccgccggctgtacattcgaggaagcttccgatccagccgtcccatgtgagtactcccaggctcagtacgatgattttcaatgggagcaggtacgaatccatccagggacacgtgctccagccgatctcccgcacggcagttatcttatggtgaacacatctcagcatgctccaggccagagggcacatgtcattttccagagtctgtccgagaacgatacccattgtgtgcagttcagctacttcctgtacagcagagatggtcatagcccaggtacacttggtgtgtacgttagagttaatggaggacctctgggctcggctgtgtggaacatgactggctcccacggcagacagtggcatcaggcagaacttgcagtgtcaaccttctggcccaatgagtatcaagtactcttcgaagccctgattagccccgatcggcgcggctacatggggctggacgacattcttcttctttcatatccctgcgccaaggctccacatttttcccggttgggcgacgtggaagttaacgctggccagaatgccagctttcaatgtatggccgcagggagagcagcagaggcagagaggttcttgttgcagaggcaatctggcgctcttgtcccggctgccggggttcggcatatcagtcaccgacggttcctcgcaaccttcccgctcgccgcagtctcaagagcagagcaagacctttaccggtgtgtatcacaggcaccaaggggcgccggagtatccaactttgcagaactcatcgtaaaagagccgccaacacctattgctccaccccagctgcttagggcaggacctacctatttgattatccagctcaatacgaactctattatcggcgacggccccatcgttcgaaaagagatcgagtaccgcatggcgcgaggaccttgggccgaagtgcacgctgtttcactccagacctacaagttatggcacttggatcctgacactgaatatgagataagtgtgttgctgaccaggcccggtgacggcgggactggtcgaccgggccccccccttatctcccggaccaagtgtgctgagccaatgcgggcacccaagggcctggcctttgccgaaatacaggcccgacagctcacactgcagtgggagccgctcggctataatgttacacgctgtcacacatacaccgtgtcactgtgctaccactacactctcgggtcttctcacaaccaaactattcgtgagtgcgtaaagaccgagcagggcgtgagccgatatactataaagaacctactgccatatcgcaatgtgcacgtgcgtctagttctcacaaaccccgaggggcgaaaagaggggaaggaggttacatttcagacagacgaggacgtcccttccgggatcgccgcggaaagcctcacatttacccccttggaggatatgatattcctaaaatgggaagagccacaggagccgaacgggttaattacacaatacgaaatcagttatcagtctatagagagttctgacccggctgtgaacgtgcctggcccaagacggacaatctctaaacttcgaaatgagacctatcatgtcttctccaacctgcatccaggaacaacttacctcttttctgtacgcgccagaaccggaaagggcttcggtcaggctgcgcttacagaaattactaccaacatttctgccccctccttcgactatgccgatatgccgtcccctctgggtgaaagcgagaacactattacggtactgcttaggccagctcagggtcgcggagcgcccatcagcgtgtaccaggtcattgtggaggaagagagggctcgcaggctgcggcgggagccgggtggccaggactgttttccagtgcccttgacgtttgaggctgcgctggctagaggcctcgtccactatttcggggccgagctcgccgcctcctctctgcccgaggctatgcctttcaccgtcggggacaatcagacctaccgaggcttctggaacccaccgctagagccaagaaaggcttacctgatctacttccaggccgcctcccatctgaaaggagagactagactgaactgcattagaattgcaaggaaagccgcttgtaaggagtccaaaaggcctctggaagtatctcagagaagtgaagaaatgggtttgatcctggggatttgcgccggggggttagctgtgttaatcttgttgctaggtgccatcattgtaattatcagaaaagggaagcccgtgaacatgacaaaggcaacggtgaattataggcaggaaaagacacacatgatgagcgccgtggaccgcagctttaccgatcagagcacactacaggaagacgagcgcctgggcctgagcttcatggacacgcatggatatagcactaggggagaccagcggtccggaggggtgactgaggctagttcattgctgggtggaagccctcgccggccatgtggacgcaaggggagcccgtatcacacagggcaattacaccccgccgtcagggtcgctgacctgttgcagcatattaatcagatgaaaactgccgaaggctatgggtttaagcaagaatacgagtccttcttcgagggatgggacgccactaagaagaaggataaggtaaagggaagtcgacaggaacccatgcctgcgtacgaccgacacagagttaaacttcatcccatgctcggcgacccgaacgccgactacataaacgccaattacatagacatccgtatcaatcgagaggggtaccacagatccaaccactttattgctacacagggtccaaagccagagatggtttacgatttttggagaatggtttggcaagagcattgtagctccattgttatgatcaccaagctggtggaagtaggtcgggtcaagtgcagccgatattggccagaagattccgatacctacggagatatcaagatcatgttagttaaaactgaaacactggctgagtacgtggtgcgcactttcgccttggaacgacggggatactccgccagacacgaagttaggcagttccatttcaccgcttggccggaacacggcgttccttaccacgccaccggcctgctcgcctttatcaggcgagtcaaagcctctaccccacccgacgctgggccaatcgtcattcactgttctgcgggtaccggtagaaccgggtgctatatcgtactcgatgtgatgcttgacatggcagagtgcgaaggggtagtggacatttacaactgcgttaagacattgtgtagtaggcgagtgaatatgattcagacagaagagcagtatatctttatccatgacgcgatcctcgaagcttgtctttgcggagagaccacgatccctgttagtgagtttaaagccacttacaaagagatgatcagaatcgatccacaaagtaattcttcacagctgagagaagaattccagaccttgaacagtgtgaccccaccccttgacgttgaggaatgctctattgccctcttgccccgaaaccgggataagaaccgctcaatggatgtgctcccccccgatcgttgcctcccgttcctgatctccaccgatggcgactctaacaattatattaatgcggccctgactgattcctatacgagaagcgccgcttttatcgtgaccctgcatccacttcagtcaacgactccagatttctggcggctggtgtatgattacggttgtactagcatcgtgatgctgaatcaattgaatcagtccaatagtgcctggccttgtttgcagtattggccagagcccggtagacagcagtatggcctaatggaggtggaatttatgagcgggacagccgacgaagatctcgtcgctcgcgttttcagagttcagaacatttccagggagggccatctcctcgtccgccattttcagtttctccgctggagtgcttaccgggacactcctgattccaagaaagctttccttcatttgcttgcagaggttgacaaatggcaggcagagtccggtgacggccgaaccatcgtgcattgtctcaacggtggcgggaggtccggcacattttgcgcctgtgctactgtgctggagatgatccgctgccacaatctcgtcgacgtgttcttcgctgccaagaccctcagaaactacaagcccaatatggtggaaacaatggatcagtaccacttctgctacgacgtggctcttgagtacctggagggtttggagtctcgttag

SEQ ID NO: 130848 - DNA, 4347 bp, synthetic construct
  misc_feature 1..4347: note = Description of Artificial Sequence: Synthetic coding sequence
  source 1..4347: mol_type = other DNA
atgcgaatcctgaaacgctttttagcttgtatccagctgctgtgtgtttgcaggctcgattgggcgaatggctactacagacaacagcggaaactcgttgaggaaatcggatggagctataccggtgccctgaaccaaaagaattggggaaagaaatacccaacctgcaattcaccaaagcagtctcccataaatattgacgaagacctgacgcaggtgaacgtcaacctcaagaaattgaaatttcagggctgggacaagacctctctggagaatactttcatccacaatactggaaaaacagtcgagatcaatctcacaaatgattatagagtaagtggaggcgtgtcagaaatggtgtttaaggcaagtaaaataacttttcactggggaaagtgcaatatgtcatcggacggctctgagcatagtctagaggggcaaaagttccccttggagatgcaaatctactgcttcgatgctgatagattcagcagctttgaagaagcggtgaaggggaaggggaaactgagagccttgagtatcttgtttgaagtcggaaccgaggagaaccttgacttcaaggccatcattgatggcgtagaatccgtgagcagattcgggaagcaagccgccctggaccccttcattctgctgaatctcctgccaaactccaccgataaatactatatttataatggaagcctcacatcaccgccctgtaccgacaccgttgactggattgtgttcaaagacacagtgtccatctccgagtctcagctggcagtattctgcgaggtcctcacaatgcagcagtctggatacgtgatgctaatggattatttacaaaataactttagggaacagcagtataagttttcaaggcaagtctttagcagctataccggaaaggaagagatccacgaagccgtgtgctccagtgagccagaaaatgtacaggccgatccggagaactacacttctttgctcgtgacatgggagcgccctcgcgtggtctatgatactatgattgaaaagtttgctgtgctataccaacagctggacggcgaggaccagacaaagcatgaattcctgaccgacgggtatcaggatctaggggctattcttaataacctcctgcccaacatgtcctacgtattgcaaatcgttgctatctgtaccaatggcctgtacggaaaatacagtgaccagctaatagtggacatgcctactgacaacccagaacttgatctgtttcccgaattgatcggaacggaggagatcatcaaagaagaagaggagggcaaggatattgaggagggtgctatagtcaatcctggccgtgactcagccactaaccaaattaggaagaaggaaccccaaattagtaccacaacacactacaaccgaattgggactaaatataacgaggccaagacaaacagatcaccaacaagaggaagcgaattcagtgggaaaggggacgtgccgaatacttccctgaactcaacctcacagcccgttacaaaactcgcaaccgagaaagacatcagtctcacttctcaaaccgtcactgagctgcctccgcatacagtagagggcacctccgctagtctgaacgacggcagcaaaactgtacttagaagtccccatatgaacttgagtgggactgccgagagcctcaacacagtgtcaatcactgagtatgaagaagaatctcttctcacttcgtttaagcttgacacgggggcagaagattcatcaggcagtagtcccgcgacttccgccattcccttcatctccgagaacatctcacaggggtacattttctcctctgaaaatccggaaaccatcacatatgatgtactcatccccgagtctgcgcgcaacgctagtgaggatagcacatcttcagggtccgaggagtccctgaaggatccttctatggagggtaacgtatggttcccaagctctacagatatcactgctcaacccgatgtgggaagcggtcgggaatctttcctccagaccaactacacagagatcagagtcgatgagtcagagaaaacaaccaagagcttcagcgcgggtcccgtgatgagccaagggccaagtgttaccgatctcgagatgccgcactatagtactttcgcctacttccctacagaggtgacaccccacgctttcactcccagctcacgacagcaggacctcgtgtcgaccgtaaatgtggtctatagtcaaactacacagcctgtgtataacgaagcctctaattcttctcacgagtcaaggattggcctggctgagggcctggaatccgaaaagaaggccgtgattccactcgtaatagtctccgctcttactttcatatgtctggtagtcctggtcggaattctgatctactggagaaagtgctttcaaaccgctcatttctatcttgaggacagcaccagcccgcgcgtcatctccaccccaccaaccccaattttccccatctcagatgatgtaggtgccatacccataaaacatttcccgaaacacgtggctgacttacacgcaagttccgggtttactgaagaattcgaagaggtccagtcatgtactgtcgacttaggcatcactgcagactcatccaatcatcccgataataaacacaaaaaccgttatatcaatatcgtcgcttacgaccacagtagggtcaagctagcccagctagccgagaaggatggtaaattaacagattacatcaatgcaaactacgtggatggatacaataggcccaaagcctacatcgctgcccagggacctctcaagtccaccgctgaggatttctggagaatgatctgggaacataacgtagaagtcattgtgatgatcacgaatttagtggaaaaaggcagacgcaagtgtgaccagtattggcccgctgatggcagcgaggagtatggcaacttcctggtcacacaaaaaagtgtccaggtgcttgcctattatacggtccggaattttaccctgcgtaatacaaagattaagaagggttcacaaaaagggcgcccatctggccgggtggtaacacagtatcactatacacagtggccagatatgggggttcccgaatatagcttgccggtgttaacttttgttcgcaaagcagcgtatgcaaagagacatgcagtgggccctgtggtggtccactgttccgcgggggttggcagaaccgggacgtatatagtgttggactctatgttgcaacagattcagcacgaggggactgttaacatctttgggttcctcaagcacattcggagccagagaaattacctggtccagaccgaggaacaatacgtatttatacatgacaccctagttgaggctatcctgtcaaaagaaaccgaggttttggacagtcatatacacgcttatgtgaatgcgttgctgataccagggcccgcaggtaaaacaaaacttgagaaacagttccaactgttgtcacagagcaatatccaacaatctgactactctgccgccctgaagcaatgtaaccgggaaaaaaacaggaccagtagcatcatcccagtcgagaggagtcgagtcggcatttcgtcactatccggggaaggcactgattacatcaatgcctcatacatcatggggtattaccaaagtaatgaattcatcatcactcaacaccctctgttacacactattaaggatttttggaggatgatctgggaccataatgcccaactggtcgtgatgatccccgacgggcagaacatggctgaggatgaattcgtctactggccaaataaggatgaacccatcaactgcgagtcattcaaggtaactcttatggccgaggagcataagtgtctgtctaacgaagaaaaactgattatccaggactttatactggaggccacacaggatgattatgtgctggaagtgcggcactttcagtgcccgaagtggcccaatcccgactccccaatctccaagacattcgagcttatctctgtaattaaagaggaggctgccaatcgggacggccctatgattgtgcatgacgagcatggcggtgttaccgcagggaccttttgtgcactcaccacactcatgcaccagctggagaaggagaatagtgtggatgtttatcaggtcgcaaaaatgattaacctgatgcggcccggcgtctttgcagatattgagcaatatcagttcttatacaaagtcatcctgtctctcgtcagtacgcggcaggaagagaacccttctacaagcctggactccaatggcgccgcattgcctgacggtaacatcgccgaatctctggaatccttagtgtag

SEQ ID NO: 130849 - DNA, 504 bp, synthetic construct
  misc_feature 1..504: note = Description of Artificial Sequence: Synthetic coding sequence
  source 1..504: mol_type = other DNA
atgaaccggccagctcctgttgagatctcatatgagaacatgcgctttctgattacgcacaatcctaccaacgcgactctgaacaagtttacagaagagcttaagaagtacggcgtgaccacgcttgtgcgagtgtgcgatgcaacctacgataaagcacctgtagagaaggaaggtatccatgtgctcgattggcctttcgatgatggtgcaccgcctccaaatcagattgtggacgattggctcaatctgcttaagaccaagtttcgggaggaacctggatgttgcgtagcagtccactgtgtcgcgggccttggacgagcacccgtgctggtcgccctggccctcattgagtgtggaatgaagtacgaggatgccgtgcagtttatacgccaaaagcggcgaggagcctttaattccaagcaactcctttacctcgaaaaatatcgacccaagatgagactcagattcagggacaccaatggacactgttgcgttcaatag

SEQ ID NO: 130850 - DNA, 249 bp, synthetic construct
  misc_feature 1..249: note = Description of Artificial Sequence: Synthetic coding sequence
  source 1..249: mol_type = other DNA
atgaatcgcccagcaccagtggaaatctcttatgagaacatgagatttcttatcacacacaaccctactaacgctaccctcaataaatttactgaggaactcaaaaagtatggcgtcaccaccttggtacgcgtatgcgacgccacctacgacaaagcgccagtggagaaagagggaatccacgtcctaaagaagaagggtagtgtgcagttccaaacagcagcgctgtttggcgagatcccgacatag

SEQ ID NO: 130851 - DNA, 411 bp, synthetic construct
  misc_feature 1..411: note = Description of Artificial Sequence: Synthetic coding sequence
  source 1..411: mol_type = other DNA
atgaatcgtccagctcccgtggaaattagttacgagaacatgaggtttctcatcactcataatcctactaacgcaactcttaacaagttcacagaagattggccctttgatgatggtgcacctcccccaaaccaaattgtggatgattggttgaacctgttaaagacaaagttccgggaggagcctggatgttgtgtggcggtgcattgtgttgccggtctgggacgcgccccggtgctggtcgctctggccctcattgaatgcggcatgaaatacgaggatgccgtgcagttcatccgccagaaacggcggggggccttcaattcaaagcagttgctgtatctcgagaagtaccgccccaagatgcggctccggtttcgggataccaacggtcactgttgcgtgcagtag

SEQ ID NO: 130852 - DNA, 192 bp, synthetic construct
  misc_feature 1..192: note = Description of Artificial Sequence: Synthetic coding sequence
  source 1..192: mol_type = other DNA
atgaatcggccggcgccagttgaaatatcatacgagaatatgcgttttcttattacccacaacccgacaaatgctacgctgaataagtttaccgaagagctgaaaaagtacggagtaaccaccttagtgagggtgtgcgatgctacctacgataaagctcctgtagagaaagaagggatccacgttctgtag

SEQ ID NO: 130853 - DNA, 69 bp, synthetic construct
  misc_feature 1..69: note = Description of Artificial Sequence: Synthetic coding sequence
  source 1..69: mol_type = other DNA
atgaataggccagctcccgtggaaatttcttacgagaatatgcgcttcctgatcactcataacccttag

SEQ ID NO: 130854 - DNA, 522 bp, synthetic construct
  misc_feature 1..522: note = Description of Artificial Sequence: Synthetic coding sequence
  source 1..522: mol_type = other DNA
atggcacgcatgaatagaccagctcctgttgaagtgagctacaaacatatgagatttctgattacacataatcctactaatgccacactttcaaccttcatcgaagaccttaagaagtacggagcaaccacggtggtgcgcgtgtgcgaggtcacctacgataagacacctcttgagaaagacggaatcacagtagtggactggcccttcgacgacggggcccccccccctggaaaagtcgtggaagattggctatcgttggtgaaagcgaaattttgcgaggcgccaggatcatgcgtagccgtgcactgtgttgccggattggggcgcgcgcccgttttggtagccttagccttaatcgagagcggcatgaagtatgaggacgccatccaattcattagacaaaaacgaagaggcgccattaactctaagcagttaacttatctcgaaaagtacagaccaaaacagagattaaggtttaaggaccctcacacacacaaaacaaggtgctgcgtgatgtag

SEQ ID NO: 130855 - DNA, 447 bp, synthetic construct
  misc_feature 1..447: note = Description of Artificial Sequence: Synthetic coding sequence
  source 1..447: mol_type = other DNA
atggcaaggatgaacaggcctgctcccgtggaggtgtcctataagcacatgcgcttcctgattacacacaatcctaccaacgcgactctgtcaactttcatcgaggacctgaagaaatacggcgccaccaccgttgtacgagtatgtgaggttacctacgacaagacgcctctcgagaaggacggtataaccgtggtggactggccgtttgacgatggcgcacccccccctggtaaagtggtggaggactggcttagcctggttaaagccaaattctgcgaggctcccgggtcctgcgttgccgttcattgtgttgctggcttgggacggaagcggcgtggcgcaatcaactcaaaacagttgacatatttagaaaagtatcgccctaaacagcggctgcggttcaaggatcctcacacccacaaaactcggtgttgcgtgatgtag

SEQ ID NO: 130856 - DNA, 447 bp, synthetic construct
  misc_feature 1..447: note = Description of Artificial Sequence: Synthetic coding sequence
  source 1..447: mol_type = other DNA
atggcccgcatgaaccgtccagctcctgtggaggtctcctacaagcacatgaggtttctgattactcacaatcccacaaatgccaccctcagcacctttatcgaggatcttaagaaatatggggcaaccaccgttgtccgggtctgcgaagtgacctacgataaaaccccccttgagaaagacggcatcaccgttgtggactggcccttcgacgacggggccccgccacccgggaaagtagtggaggattggctgagtctggtaaaggcaaaattctgtgaggcaccgggctcctgcgtggcagttcactgcgttgcggggcttggacggaagcgtcggggggccatcaatagcaagcagttgacttacttagaaaagtaccgacctaagcagcgcctccggtttaaggatccgcatacccacaagacccgctgctgtgtgatgtag

SEQ ID NO: 130857 - DNA, 522 bp, synthetic construct
  misc_feature 1..522: note = Description of Artificial Sequence: Synthetic coding sequence
  source 1..522: mol_type = other DNA
atggcccggatgaatcgacccgctccagtggaggtgagttacaagcacatgcgctttttgattacacacaatcccactaacgccactctgtctacctttatagaagacctgaagaagtatggggctacaacagtggtgcgggtgtgtgaggtgacctacgacaagaccccattagagaaggatggcataacagttgtggactggccgttcgacgacggagcccccccgcccggcaaagtcgtcgaggattggttgtctctcgttaaagccaaattttgcgaagctcctggttcttgcgtagcggtccattgcgttgctgggctgggtagagcccccgttctcgtggctctggccctgatagaatcaggcatgaaatacgaggatgctatacagtttatccgacagaagcgacgaggggccattaactccaaacagctaacttatctggagaagtacagacctaaacaaaggctccggttcaaggaccctcacacacataagaccaggtgttgtgtgatgtag

SEQ ID NO: 130858 - DNA, 213 bp, synthetic construct
  misc_feature 1..213: note = Description of Artificial Sequence: Synthetic coding sequence
  source 1..213: mol_type = other DNA
atggcccgcatgaatcgacctgctccagtcgaggtgtcttataagcacatgaggtttttgatcactcataatccaactaacgccactttgtccaccttcatcgaggacctgaagaaatatggtgccaccactgtcgtgagagtgtgcgaggtcacatacgacaaaactcctcttgagaaggatgggataactgtagtggactggcccttctag

SEQ ID NO: 130859 - DNA, 2343 bp, synthetic construct
  misc_feature 1..2343: note = Description of Artificial Sequence: Synthetic coding sequence
  source 1..2343: mol_type = other DNA
atggaacaggtggagatccttcgtaaattcattcagcgtgtgcaggcgatgaagtccccggatcataatggtgaggataactttgcacgggattttatgcgactgagacgactcagcacaaaatataggactgagaagatttacccaacggctacgggcgaaaaagaggagaacgtgaagaaaaaccgctataaagacatcttgccgtttgaccactccagggtcaaacttactctcaagacccccagtcaggactccgactatattaacgcaaatttcatcaaaggcgtctacggccctaaagcttacgtggcaacacaaggccctctcgctaatacagtgatcgacttctggcgtatgatttgggagtataacgtcgtgataatcgtgatggcatgtagggagttcgagatgggacgaaagaaatgtgagagatactggccgctttacggggaggacccgataacctttgccccattcaagatttcttgtgaagacgagcaggcccggaccgactattttatccgaactctgctgctcgagtttcaaaacgaaagccgaaggctgtatcagtttcattatgtgaactggccggatcacgacgtgccttcctcatttgactccattctggacatgatctctctgatgcgaaaatatcaggagcacgaggatgtgccgatctgcatacactgttcagccgggtgtggccggaccggtgccatatgcgctatagactacacatggaatctcctgaaagctgggaagattcctgaagagtttaacgtatttaatctgatccaggaaatgaggacccagcggcactctgcggtgcagaccaaggagcagtatgagctcgttcatagggcaatcgcccagttgtttgaaaaacagctccagttatacgaaatccacggagcacagaagatagccgacggagttaatgagatcaataccgagaatatggtctctagcattgagcctgagaaacaagactctcctccccccaaaccgcctaggacaagatcatgtctcgtcgagggcgatgcgaaggaagagatcctgcagccccctgagccacaccctgtccctcctatcctgacccctagcccaccaagtgcattccccaccgtgacaaccgtgtggcaagataacgatagatatcatcccaagcccgtgcttcatatggtgtcttcggagcagcactccgctgacctaaacaggaattacagcaagagtacagaactgccagggaaaaatgagtctacaattgagcagatagacaagaagctcgagaggaatctgagcttcgaaatcaagaaagtcccacttcaggagggcccgaagagcttcgatgggaacaccctattgaatagaggccatgcgattaagattaagtccgccagtccatgcatcgccgacaagatatcaaaaccccaggaactttcatcggatcttaatgttggtgatacaagtcaaaactcatgcgtcgactgctccgtgactcagtctaacaaggtatccgtgacacctcccgaggagagccagaacagcgatactccaccccgcccagacaggcttcccctcgatgagaaggggcatgttacttggagctttcacggccccgaaaatgccattccgattcccgacctgtccgagggaaacagcagcgatattaactaccagactcgcaaaaccgtatccctgacgccatccccaaccacccaggtggaaacgcccgatctagtggatcatgacaacacgagccccctgttccgtactcctctctcctttaccaatcccttgcattcagatgacagcgattcagacgaacgtaattccgacggcgccgtgactcagaacaagactaacatctccaccgcctccgccaccgtgtctgcagccacaagcaccgagtctatctctaccagaaaggtgctgccaatgtctatagcacgtcacaacatagccgggaccacacacagtggggccgagaaggacgtggacgttagtgaagactccccacctccactgccagagcgcaccccagagagcttcgtcttggcttccgaacataacacccccgtgcgcagcgagtggagcgagctgcaaagccaggagcggagcgagcagaaaaaatccgagggactgatcacgagcgagaacgaaaagtgtgaccaccctgcggggggtatccattacgagatgtgcattgagtgtccacctacgttttctgataaaagagaacaaattagtgaaaatcctacagaagcgacggatattggcttcgggaatcgctgcgggaagcctaagggaccaagggatccgcctagtgagtggacatag

SEQ ID NO: 130860 - DNA, 1986 bp, synthetic construct
  misc_feature 1..1986: note = Description of Artificial Sequence: Synthetic coding sequence
  source 1..1986: mol_type = other DNA
atgatctgggagtataacgtggtcattatcgtaatggcgtgtagagagtttgagatgggcagaaaaaaatgcgagcgatactggcccctgtatggtgaggatccaatcactttcgctcctttcaaaatttcctgtgaggacgagcaggccaggaccgattacttcatccgcacccttttgcttgagtttcagaacgagagccgcaggttgtatcaattccattatgtgaactggccagatcacgatgttcctagtagctttgactcgatcctcgacatgattagcctcatgagaaaataccaggagcacgaggatgttcccatctgcatacactgctctgcgggctgtggccgcacgggagcaatctgtgccatcgattacacatggaatttgctgaaagctggcaaaatccccgaggaattcaatgtttttaatctgattcaggagatgagaacgcagaggcattccgctgtccagacaaaagagcagtacgagctagtgcatcgggccattgctcagttgttcgagaagcagctccagctgtatgagatccacggcgctcagaagattgccgatggcgtgaatgagataaataccgaaaatatggtgtccagcattgagcctgaaaagcaggactctcctccaccaaagcccccacgcacccgcagttgcctagtggaaggtgacgccaaggaggaaatcctccagcctccagaaccacacccggtccctccaatcttgactccgtcccctccttccgcctttccgactgtgaccactgtttggcaggacaatgacagataccaccccaagcccgtcctgcacatggtttcatccgagcagcacagcgctgacctgaaccgaaattactcaaagtcgaccgaactccctggtaaaaatgagtcaacaattgaacaaatcgataaaaagctggaaagaaacctgtctttcgaaatcaagaaggtcccgttacaggaaggccccaaatccttcgacggcaacaccctcctcaaccgcggtcatgcgattaagatcaaatcagccagcccatgtatcgctgacaagataagtaagccgcaggagctgtcctctgatttgaacgtgggggacacgtcacagaattcttgcgttgattgctcagtgacgcagagcaacaaagtcagcgtcacaccaccagaggaatcccagaacagtgacacccccccacggcccgatagacttcctcttgatgaaaaaggacacgtgacatggtcatttcacggccccgaaaacgcaattcccatacccgacctcagcgaggggaactcctcagacatcaattaccagacgagaaagacagtctctctgacaccatccccaaccactcaagtggaaacgccggaccttgttgaccacgacaatacatctccattgttccgcaccccactgagctttactaacccactccattccgatgattcagactcagatgaacgaaactcggacggcgccgtgacccaaaataagacaaatatttcaaccgccagtgccacggtgtctgcggcaacttcaaccgagtcaatcagcacccgcaaagttttaccaatgtccatagcccgccacaacattgccggcaccactcactcgggagccgagaaagatgtagatgtgagcgaggattccccccccccactgcctgagagaacacctgagagtttcgttctcgcgtcagaacataatacacccgtgaggtcagaatggagcgaactgcagtcccaagaacgttcggaacagaaaaagtctgagggactcatcacgtctgagaatgaaaagtgtgatcatcccgccgggggaatacattatgagatgtgcattgagtgcccacctaccttctcagacaaaagagaacagatctcggaaaacccgactgaggctactgatatcggatttggaaatcgttgcgggaagcctaagggcccacgcgaccccccgtctgaatggacatag

SEQ ID NO: 130861 - DNA, 1632 bp, synthetic construct
  misc_feature 1..1632: note = Description of Artificial Sequence: Synthetic coding sequence
  source 1..1632: mol_type = other DNA
atgatctgggagtataacgtcgttatcatcgtcatggcgtgccgagagttcgaaatgggacggaagaagtgcgagcgatactggcccctttatggcgaagatccaataacttttgctccctttaaaatctcttgtgaagatgaacaggcacggaccgattatttcatacggactctcctgttagaattccagaatgaaagtagacgcctgtaccagttccactatgttaattggccagatcatgacgtaccctcctcttttgactctatcctggacatgatctctctcatgcggaaataccaggagcatgaggatgtcccaatctgtattcattgttccgccggctgtgggcgtaccggggcaatctgcgcaatcgactatacatggaacctgctgaaggccggtaaaataccagaagaattcaacgtgtttaatctgatccaggagatgcgaacccagagacactccgctgtccaaaccaaagaacaatacgaactggtccaccgagccattgcacagctcttcgaaaaacagttgcaattgtatgagatccatggagcgcagaagatcgccgatggcgtaaatgaaatcaatacagaaaatatggtgagctccatagaaccggagaagcaggattctcctccgccaaaaccaccacgtacacgctcttgtttagtggaaggggatgctaaggaagaaatactgcagcctccggagcctcaccccgtgccgcccattctgaccccaagccctccttccgcctttcctacggtaaccactgtgtggcaggataacgacagatatcacccgaagcccgtgctacatatggtcagctccgagcagcattcagctgatcttaatcgaaattattcaaaaagcaccgaactgccaggaaaaaacgaatccaccattgagcagatcgataaaaagctcgaaaggaatctctcttttgagattaagaaggtacccctgcaagaaggcccaaagtcctttgatgggaacacgttgctgaatcggggccatgcgataaagataaaaagtgcaagcccatgcatcgctgataaaatatccaagcctcaggagctcagcagtgacctgaatgtcggggacacaagccaaaattcctgcgtagattgtagcgtgacacagagtaacaaagtgagcgttacaccgcctgaggagtctcagaactcggatacaccaccccgtcccgaccgtctgcccttggacgaaaagggccacgtgacatggtcatttcacggtccggagaacgccatcccaatcccagacctctccgaaggcaattcgagtgatatcaattatcaaacacggaaaacagtgagcctgactcctagccctactacccaggtagagacaccagacctagtggatcacgataacacgtctcctctgttccggacaccattgtctttcacgaacccgctgcactcagatgatagtgacagcgatgaacgcaattccgatggcgcagttactcagaataaaaccaacatctctaccgcctcggctactgtgagcgccgcaaccagtacagagtccatttcaacgagaaaggtgctgccaatgagtattgcccgccacaacagcagaaataacacttttcgatgttag

SEQ ID NO: 130862 - DNA, 6885 bp, synthetic construct
  misc_feature 1..6885: note = Description of Artificial Sequence: Synthetic coding sequence
  source 1..6885: mol_type = other DNA
atgcacgtctccctcgcagaggccctggaagtaagaggcgggccgcttcaggaggaagaaatttgggccgtgctgaaccagtcggcagagagcctacaggagctgttccgtaaggtgtcactggccgacccagccgcactgggcttcatcatatccccatggtctctgctgctgctgcctagtggctcagtgtcctttacagatgagaatataagtaaccaggatctgcgagcttttaccgccccagaagttctgcagaaccaatcccttacgagcctctccgacgttgagaagatacatatttactcactggggatgacactatactggggggccgactatgaggtaccacagagtcaacctatcaaactcggcgaccacctgaatagtatccttctgggcatgtgtgaggatgttatttacgcccgggtgtccgttcggactgtcttggacgcttgctccgcccatatcaggaattccaattgtgccccttccttcagctatgtcaagcatctggtgaaactcgtgctggggaatctgtcgggaactgaccagctgtcctgtaacagcgaacagaagcctgatcggagccaggccattcgcgatagactcaggggtaaggggcttccaactggaagaagttctacgtccgatgtgttagatattcagaaaccacctctcagccaccagacctttctgaacaaaggactgagcaagagcatgggtttcctaagtattaaagatacccaggatgaaaattattttaaagacatcttatcagataacagtggtcgggaggacagcgaaaatacgttcagcccttaccagtttaagaccagtggacccgagaaaaagccaattcctggtatcgatgtgttgtctaaaaagaagatctgggccagtagcatggacctgttgtgcactgccgatcgagacttttcatctggagaaacagctacctatagacgctgtcatccagaagccgtaacagtgagaaccagtaccactccccgcaagaaggaagcgaggtacagcgatggctcaatcgcactcgatatcttcggccctcagaaaatggaccccatctaccatacaagagagctgccaaccagctcagcaataagtagtgcactcgatagaataagggaacgccaaaaaaagctgcaggtgctacgtgaggcgatgaatgtcgaggagcctgtgcgtcggtataaaacatatcacggagatgtctttagcacctcctctgaaagcccatcaattatcagttccgaaagcgatttccggcaggtgaggaggtccgaagcttccaaacggtttgagtcttcctcaggtctgcctggggttgatgaaacactgagccaaggccagtcccagcgcccaagccggcaatatgagactccctttgaaggcaacctcatcaaccaagagatcatgttgaagcgccaggaagaagagctgatgcaacttcaagccaaaatggcgcttcgtcagagtagactaagcctctaccccggagacaccattaaggcttccatgctagatattacacgagacccgctgagagagattgccttggagaccgccatgacccagagaaagctccggaacttctttggacctgagttcgtaaagatgaccatcgaaccctttatatctctggaccttccaaggagcattctgaccaagaagggaaagaacgaagataaccgcaggaaggttaatattatgttgcttaatggccagcggctggaactcacctgcgatacgaagactatctgcaaggatgttttcgacatggtggtggcccacattggccttgtggaacaccacctgttcgcgttggcaacacttaaggataacgagtacttctttgttgaccctgacttaaagctgaccaaggtagcaccagagggctggaaagaggagcccaaaaagaagaccaaggcaaccgtgaactttactctattctttaggataaagttctttatggatgacgtcagcttgatccagcatactctcacatgccaccagtactatctgcaactccggaaggatattctggaggagcggatgcattgtgatgacgagaccagcctgttgctggcctcacttgcgctacaggcagagtatggggactatcagcccgaggtacacggggtgagctacttcaggatggaacattatctgccagctagggtaatggaaaagctggacttgtcatacatcaaagaagagctcccaaagctgcacaatacatacgtgggcgcctctgaaaaggagaccgagctggagtttttgaaggtctgtcagcgacttacagaatatggtgtccacttccacagagtacatcctgagaagaagtcgcagactggtattttgctcggcgtctgttcaaagggggttttagtgttcgaggtgcataacggagtgcgcaccctggttctacgcttcccctggagagagactaagaaaatttcattctcaaaaaagaagattacactacagaatacctcagatggcattaagcacggcttccagactgacaattccaagatttgccagtatctcctgcatctttgctcctaccagcataaattccagctccagatgagagctcgccagagcaaccaggatgctcaggatattgatgtgctgcataagcgctggagtatagtcagctcacccgaacgggagatcaccctggttaatctgaagaaagacgcaaagtacggtctcggattccagatcattgggggggaaaagatggggaggctggatctgggaatcttcatatcttcagtcgcacccggcggccctgcagatcttgacgggtgcttgaaaccaggcgacagactcatatctgtgaatagtgtttctctggaaggtgtgtcccaccacgccgccattgagattctgcagaatgcgcctgaagatgtgacactggtgatatcccaacccaaggagaaaatcagcaaggtgcccagcacaccggtccacctgacaaatgagatgaagaattacatgaaaaagtccagctatatgcaggactctgctattgacagctcttcgaaagaccaccactggagccggggtacgctgaggcatatctctgaaaacagcttcggtccgtctggagggctacgtgaaggttctctttcaagtcaggattctcgaacggagagtgctagcttatcacaatcccaagtaaatggcttttttgcctcccacctgggggaccagacctggcaagagtcccagcatggcagcccttcccccagcgtcatctccaaggccacggagaaggaaacgttcaccgactcgaaccaaagcaaaactaagaagccagggatcagcgatgtgaccgactattccgaccgaggggatagcgatatggacgaagccacgtacagttcctcacaggaccaccagacaccaaagcaggagtcctcttcctcagttaacacttccaataaaatgaattttaagacctttagtagcagcccccccaagccaggcgatatcttcgaagtggagctggccaagaacgacaactcactgggcatttcagttaccggtggggtgaacacaagcgtgagacacggcgggatctacgttaaagcggttattcctcagggcgctgccgaatcagacggccgaatccacaaaggcgacagggtgctcgcggtgaatggagtctctctggagggagcaacacacaaacaggctgtcgaaacgctacgtaacactggccaggtggtgcatctcctcctggaaaagggccagtctcccacttcaaaagagcacgtgccagtaacgccacagtgcacacttagtgaccagaacgcccagggtcagggacctgagaaggtcaagaaaacgactcaggtcaaggattactcattcgtgactgaggagaatacattcgaagtaaagctgtttaagaatagctctggcctggggttcagctttagtcgtgaagacaatttgattcccgagcagatcaacgcgagcattgtgcgggtcaagaagttgttccctggtcagccagctgcagagtcagggaaaattgacgtgggggacgtgatcttaaaagtcaatggcgcctctctgaaggggttatcgcagcaggaggtgatttccgccctgcgtggaacagcccccgaggtgtttctgcttctgtgccgcccaccacctggagtgctgccggagatcgatacggccctgctgacacctctgcagtccccagcgcaggtcttgccaaacagcagtaaggacagttcccagccctcctgtgtggaacagtcaacttcgagcgacgagaacgaaatgtccgacaagagtaagaaacagtgtaaatcacctagtcgccgagactcttattccgatagttctggcagcggtgaggacgatcttgtcacggcccctgctaacatttctaactccacgtggagctccgccctccaccaaacactgtctaatatggtgagtcaggctcaatctcaccacgaggcccccaaaagccaggaagacaccatatgcactatgttttactacccacagaaaatcccgaataagccggagttcgaagattccaacccttcacccttacctcccgatatggcacctgggcaaagctaccagccgcaaagtgaatccgcttcatcatcgtctatggataaataccacatccaccacatctccgaaccaacgagacaagagaactggacaccacttaaaaacgacctggaaaatcacctggaagactttgagctggaagtggagctactaatcactctcattaaatctgagaagggctccctcggatttacagtgaccaaaggaaatcagcgcataggatgctatgtccacgacgtgatacaagaccccgctaagtcagatggcaggctgaagcctggtgaccggttgattaaggtcaacgacactgatgttacaaacatgacacatactgatgctgtcaacctgctcagagctgcatctaagactgtgagattggtgattggccgcgtgctcgagctgccccgcatcccaatgctaccgcatctgctcccagatattacgctgacctgcaataaagaggagctgggcttcagcctgtgcggcgggcatgattcgctttaccaagtggtgtacatcagcgatatcaatcccagatccgtagctgccattgaagggaatctacagctcctggatgtgattcactacgtgaatggagtttctacacaagggatgacccttgaggaggtgaaccgggccttggatatgtcgctgcccagtcttgtgctgaaagctacaaggaacgatttacccgtcgtgccctctagcaagaggagcgctgtgagtgccccgaaaagtactaagggaaatggtagttattccgttggtagctgctctcagccagccctcacaccaaacgacagtttctccaccgtggctggtgaggagatcaacgagatctcctatcccaagggcaagtgtagcacatatcaaatcaaagggtcaccaaacttgactcttcccaaagagtcgtatatacaggaggatgacatatatgacgacagtcaggaagcggaggttatccaaagccttctcgacgtggtggacgaggaagcccagaaccttcttaatgaaaataatgcggcagggtattcctgcggccccggcacactgaagatgaatggcaaattgagcgaagagaggacagaagacaccgactgtgacggtagtcccctgccagaatatttcactgaggccactaagatgaatgggtgcgaagaatactgcgaagaaaaagtgaaatctgagagcctgattcaaaaaccccaggagaagaaaaccgatgatgacgagatcacctggggaaacgacgaacttccaattgagcggacaaatcacgaggactccgacaaagaccattcattcttgacaaacgatgagctggccgtgctccctgtagtgaaagtccttcccagtggaaagtataccggggctaacctgaagtctgtgattcgggtcctgaggggtttactggaccagggaattcccagtaaagaacttgagaacctgcaggagctgaaacctctggatcagtgtctgatcgggcagaccaaggagaatagacgaaaaaatcggtacaagaacatattaccttatgatgccacccgagtccctctgggggatgaaggggggtatattaatgcctcttttattaaaatacctgtggggaaggaagaattcgtctacatcgcttgtcagggccccctgcctactacagtgggagatttctggcaaatgatctgggaacagaagtcaacagtcatagccatgatgacccaagaggtggagggcgaaaagatcaaatgtcagaggtattggccaaacattctgggtaagaccaccatggtatccaatcgtcttcggctggctcttgtgaggatgcagcagctcaagggctttgtggtgcgtgcaatgactcttgaagacatacagactcgggaagtgcggcacatttcccacctgaacttcaccgcctggccggaccatgacactcctagccagccagatgacctccttacttttatatcgtatatgagacacatacataggagcgggcctattataacccattgctcagcaggcattggtcggtcaggcacgctgatctgcattgatgtcgttctcgggctcattagtcaagatctggactttgatatatccgatttggtgaggtgcatgcgcctgcaaagacacgggatggtccaaactgaggaccagtatattttctgttaccaggtgatactgtatgtgctgacccgcctccaggctgaagaggaacagaagcagcagcctcagctgctgaaatag

SEQ ID NO: 130863 - DNA, 7305 bp, synthetic construct
  misc_feature 1..7305: note = Description of Artificial Sequence: Synthetic coding sequence
  source 1..7305: mol_type = other DNA
cagttcctctttaccaaagtgtcactggctgatcctgctgccttgggattcattatcagtccatggagcctactcttactccccagcggctcagtcagcttcactgatgagaacatttcaaatcaggacctcagggcatttacagcaccagaagtccttcagaatcagtcgttgacctccctcagcgatgtggaaaagattcacatttattccttaggaatgactctttattggggagccgactatgaggttccccagtcccaaccgatcaaactgggtgaccatctgaattctatcctgctcggtatgtgcgaggatgtcatttacgcccgggtctccgtgaggacagtgctcgatgcctgtagcgctcatatccgcaacagcaactgtgccccatccttcagctacgtgaaacacctcgtgaagctggtcctcggcaatctcagcgggacagatcagctcagctgcaattctgagcagaaaccagatcggagccaggcaatcagagaccgccttaggggaaagggactccccacggggcggagctcaacctccgacgtgcttgacatacagaaacccccactctctcatcagacattcctgaacaagggcctgtccaagagtatggggtttctgtctattaaagacacccaggacgagaattatttcaaagatattttgagtgacaactccgggagagaggactcagaaaatacattttccccataccagttcaaaacctccggaccagagaaaaaaccgatccctgggatagacgtgttatccaaaaagaagatatgggcatcgtcaatggacctcctctgcactgcggacagagatttcagtagcggcgaaaccgcaacctatagaaggtgccatcctgaggcagtaactgtacggacctctacgaccccaagaaaaaaggaagcccgatacagtgacggatctatcgcattagacatcttcgggccgcaaaagatggatcccatataccacaccagggaattgcccacctcttcggccatctcaagcgcattagacaggattagagagcgacagaaaaaacttcaggtgctgagggaagccatgaatgtcgaagagccagttaggcggtataagacctaccatggcgacgtattctcaacgagctcagaatctccttcgattatctccagcgagtcagactttcggcaggttcgtaggagcgaagcttcaaaaagattcgaaagctcttccgggcttcctggcgttgacgaaaccctgtcccaggggcaaagccagcgccccagcaggcagtacgaaacgccctttgagggcaatcttatcaatcaggagatcatgctgaagagacaggaggaggaacttatgcaactgcaggctaagatggccttgaggcagtcccggctttccctatatcccggcgacaccattaaagcctctatgttagacatcacccgagaccccctacgcgagatcgccctggagacggctatgactcagcggaagttgagaaacttttttggacctgagttcgttaagatgaccattgagcccttcatttccctggatctgccccggtctattctgaccaaaaagggaaaaaatgaagataatcgacgaaaagtgaacataatgctgttaaacggacaaagactcgagctgacctgcgacactaagaccatatgcaaggacgtttttgatatggttgttgctcacatcggtctcgtggagcatcacctctttgctctggctaccttgaaggacaatgagtatttttttgtggatcctgacctcaagctgactaaggtggctccagaggggtggaaggaggagcctaaaaagaagacgaaagcaacagtcaactttactctgttttttaggattaaattcttcatggatgatgtcagcctcatacagcacacccttacttgccatcaatactatctgcagcttcggaaggacattttagaggagaggatgcattgcgacgacgagacatccctgcttctcgcttctctggctctgcaagctgaatatggagattaccagccagaagttcacggagtctcctactttcggatggaacactatctgcctgccagagtgatggagaagctggacctatcttatattaaggaggaactgccaaaacttcacaatacctatgttggagcatcagaaaaggagacagagctggagtttctaaaggtttgtcaaaggttaacggagtacggcgtgcatttccatcgcgtgcacccggagaagaaaagtcagaccggaatcctgctgggagtttgttctaagggcgtgctggtgtttgaggtgcacaacggggttcgcacactcgtgctccgattcccttggagggaaaccaagaaaatctcttttagcaagaaaaagataactctccagaatacttccgacgggattaaacatggatttcagaccgacaacagcaagatttgtcagtatctactgcacctgtgctcgtaccaacacaaatttcaactgcagatgcgcgcgagacagtctaaccaggacgcacaggatattgagcgcgcctcgtttaggagcttaaatctccaggccgaatccgtgcgcggatttaacatgggcagggccatatcaacaggatccttggccagtagcactttgaataaactcgccgttcggcccctgtctgttcaggcggaaattctcaagcggctcagttgtagcgaactatccttataccagccactgcagaacagttcaaaagagaaaaatgacaaggctagttgggaggaaaaaccaagagaaatgtctaaaagttaccatgatttgtcccaagccagcctttaccctcacagaaagaacgtaatagtcaatatggaaccaccccctcagacagttgctgaactggtcgggaagccaagccaccaaatgtcccggtccgacgccgaatctctcgccggcgtgacaaagttgaataattcaaaatctgtggcttcactgaatcgaagtccagagcgtcggaaacacgagtcagatagctcttctatagaagacccaggtcaagcctatgtactggatgtgctccacaagcgttggtctattgtttcctcacctgaacgagagatcactctggtgaatctgaaaaaagatgcaaagtatggactcgggttccagataatcggaggggagaaaatgggtcgcctcgacttaggtatttttatttcatctgtagcacctggcggaccggctgatcttgatggatgtctgaaacctggcgataggctgattagtgtcaattccgtgagtttggagggtgtgtctcaccacgctgcaattgagattctgcagaacgcacctgaagatgtgaccctcgtaatcagtcagcctaaggaaaagatatcaaaggtgcccagcacccccgtgcacttgaccaacgagatgaaaaattatatgaaaaagagcagttatatgcaagactcagccatcgacagcagctctaaagaccaccattggagccggggcacgcttcgccatatcagcgaaaattcgtttggccccagcggcggcctgcgggagggcagcctgagctctcaagacagcagaacggaaagtgcctctctcagccagagccaggttaatggctttttcgctagccaccttggtgatcagacctggcaggagtcccaacacggcagcccctctccatcggtcatttccaaagccaccgaaaaggagactttcacagactcaaaccaatccaagacaaagaagcccggcattagtgacgttaccgattacagcgaccgcggtgactccgatatggatgaagccacctacagcagttctcaggaccatcagacccctaagcaggaatcatcatccagtgtcaacacttcaaacaaaatgaactttaagacctttagctcctcaccaccaaaacctggggacatttttgaggtggaactggctaaaaacgacaactcattgggaattagtgtaacggggggagtgaatacaagtgttcgccatggcgggatatacgtgaaggctgttatcccccagggtgcagcagagagcgatgggcgcatccacaaaggagatcgcgtcctggccgttaacggcgtgagcctcgagggtgctacccacaagcaggccgtagagaccttaaggaataccggccaggtagtccatctgttgttggagaaggggcaatcacccacgtccaaagaacatgtgcctgtcactccacagtgcaccctgtctgaccagaatgcacaagggcagggccccgaaaaggtgaaaaagaccactcaggtgaaagactactctttcgtgacggaagagaatactttcgaggtgaaattgttcaagaactcttctgggctcggattttcattcagcagggaggacaatctcattcccgaacagattaatgccagcatcgtccgtgtaaaaaagttgttccctggacagcccgctgctgagtccgggaagattgatgttggcgacgtaatattgaaggttaatggggctagcttgaaaggcctgagccagcaggaggttatcagcgcgctcagaggaacggccccagaggtgtttttattattgtgtcgcccaccccctggagtgctcccagagatcgataccgcgctgctgacgccactgcagtcaccagcgcaggtcctccccaattcttctaaggactcatcacagcctagttgtgtggagcagagtacctcgagcgatgagaatgagatgagtgacaagtctaaaaaacagtgtaagtcgccatcccgacgtgacagctacagtgactcttcggggagtggagaggacgacctcgtcacagcccccgccaatatatcgaatagcacctggagcagtgcccttcaccagaccctcagcaacatggtcagtcaagcccagtcacatcacgaggcccccaagagtcaagaggatacaatctgtacaatgttctattacccacagaaaatccctaataagccggaattcgaggacagcaaccctagtcctcttccaccagacatggcaccaggacagtcttatcaaccccagtcagaatccgcctctagcagctccatggataagtaccatatccatcatatctctgagcccacacgccaggagaattggacccctctgaaaaatgacctcgagaaccatttggaggattttgaactcgaggtagagctgttaatcacgttaatcaaaagcgagaagggaagtctgggctttaccgtgaccaaaggaaaccagcggattggctgctacgtccacgatgtaatccaggatcctgccaaatccgatggacgacttaaaccaggcgatcggctgatcaaggtaaacgacacagatgtcaccaatatgacccacacagacgccgtaaatttactgcgagctgcgtccaagaccgtccggctcgtgataggccgggttttggagttgccgcgaatccctatgctgcctcacctactccctgacattaccctgacgtgcaacaaagaagaactgggcttttcattgtgcggaggacatgattcgctgtaccaggtggtttacatcagtgacattaatccacggagcgtagcagctatcgaggggaatctccaattgctcgatgtcattcactatgtgaacggcgtgagcacccagggcatgacgctggaagaggtcaaccgcgctttagatatgtccctgccttctctcgttttgaaagcaacccgcaatgacctgccagtcgtcccaagtagtaagaggtcggccgtctctgccccaaagtccacgaaaggaaatggcagctactctgttgggagctgttcacagcctgccctgacacccaatgactcgttttccaccgtggcaggggaggagatcaatgaaatttcctaccctaagggtaaatgctcgacataccagatcaaggggtccccaaatctcacattaccaaaggagagctacatccaggaagatgacatctacgatgatagccaggaggccgaagtcatccagtctttgttggacgtcgtggacgaggaggcccagaatcttctcaatgagaataatgcggcggggtactcatgtggccccggaacactgaaaatgaacggtaagctgagtgaagagcgcactgaagataccgattgtgacggcagtccccttcctgagtatttcaccgaggcaacaaagatgaacggatgcgaagaatactgcgaagagaaggtaaagtccgagtcactaattcaaaaaccgcaggagaaaaagactgacgatgacgaaattacatggggaaatgatgaactccccatagagaggaccaaccacgaggattctgacaaggatcattccttcttgacgaacgatgagttggccgtccttcctgtggtgaaagtgctgcctagtggcaagtacactggagccaacctcaagagtgtgataagagtgctgcgtgggctgctcgatcagggcattccttccaaggagcttgagaatctgcaggagttgaagcccctggaccaatgcctgatcggacaaaccaaagaaaatcgccgcaagaatcgatacaaaaatatcctgccatatgatgcaacaagggtcccgcttggcgatgagggcggatatatcaatgcatctttcattaagatcccagttggcaaggaggagttcgtctacattgcatgccagggtcccctaccgacgaccgtgggggacttctggcagatgatctgggagcagaagagcaccgtcattgcaatgatgacacaggaggttgagggagagaagatcaagtgccagagatactggcccaacatcctgggcaagacaaccatggtcagcaacagactgagattggccttggtgaggatgcagcaacttaaggggttcgtggtgagagcaatgacgctggaggacatccagacccgggaggtaagacatatcagccatctgaattttacagcctggcctgatcatgacacaccttctcagcctgatgacttgcttacattcatcagctacatgaggcatatacacaggtccggaccgataatcacccactgttcagctggcatcggcaggagcgggacactgatctgtatagacgtggtgctgggattgatctcccaggatctcgacttcgacatctccgaccttgtgcggtgcatgaggctgcagcggcacggaatggtgcagacagaggatcaatatattttttgctaccaggttatcctctacgtgctgaccaggctccaggctgaggaggagcagaaacaacagccccagcttctcaagtag

SEQ ID NO: 130864 - DNA, 7458 bp, synthetic construct
  misc_feature 1..7458: note = Description of Artificial Sequence: Synthetic coding sequence
  source 1..7458: mol_type = other DNA
atgcacgtgagcctggcagaagcactcgaggtcaggggcggaccacttcaggaggaagaaatatgggccgtgcttaatcagagcgccgagagcctgcaggagctgtttcggaaggtaagcctggcagacccagcagccttggggttcattattagcccctggtctctgcttctacttcctagcggatctgtgtcctttactgacgagaatatttctaatcaagacctccgggccttcactgcgcccgaagtccttcaaaaccaatctctcaccagcctgtccgatgtggagaagattcacatctattctctgggaatgaccctttactggggcgccgactacgaggtccctcagagtcagccaatcaagctcggggatcacctgaatagcatactcctcggcatgtgcgaggacgtaatctacgctagagtctcagtccggaccgtgctggatgcctgtagtgcacatatccgaaattccaactgcgccccctcttttagttatgtgaaacatctggttaagttggttctgggcaacttatccggaacagaccagttgtcttgtaattcagagcaaaagccagaccggtctcaggctatccgtgacagattgagaggaaagggcttgccaaccggtcgatctagcacttctgatgtcctggacatccagaagccccctctctcacatcagacctttctgaataagggtctttcaaagagcatggggtttctctctataaaagatacacaggatgagaactattttaaagatattttatcagacaattcaggacgcgaagatagcgagaatactttttctccataccagtttaagacatcagggcccgagaagaaacccatcccgggcatagatgtcctatctaaaaagaagatctgggcatcttccatggatctgctctgtactgccgatcgggacttcagctctggcgaaactgccacttatagacgctgccaccctgaagctgtgacggtaaggacaagcacaactcccaggaagaaggaggcccgttattccgacggatccatcgctctcgatatatttggcccacagaagatggacccgatttaccacacccgcgagctacccacatcctccgccatatcttccgccctcgatcgcattcgggaaagacaaaaaaaattgcaggtactgcgggaagcaatgaacgtggaagagcccgtacgcaggtacaaaacttaccatggagacgtgtttagcacatcttctgaatccccttccataatttcaagcgagagtgactttcggcaggtgaggagaagcgaggcgtcaaagcgcttcgagtcttcttctgggctaccaggagtggatgagaccctctcacagggccaaagtcaacgaccctctcggcaatatgagacgccattcgaggggaacttgattaaccaggaaattatgcttaaacggcaggaggaagaacttatgcagctgcaggccaagatggccctacgacagagccgcttgtcattgtaccctggggacacaatcaaagctagcatgctggacatcactagagaccctttgagggaaattgctttggagaccgccatgacacagcgaaaattaagaaacttcttcggcccagaatttgttaagatgaccattgagcctttcatttccctggatcttcctagatccatcttgaccaaaaagggaaaaaatgaggacaaccgccggaaggtaaacatcatgttgttgaacgggcagcgcttggagttaacttgtgacaccaagacaatctgtaaggacgtctttgatatggtggtggctcatattggactggtggaacaccatctgtttgccctggctaccctaaaggataacgaatacttcttcgttgaccccgatctaaaactgaccaaagtggcccctgaaggctggaaggaggagcctaaaaaaaagaccaaggccactgtaaacttcactctgttttttcgaattaagttcttcatggatgacgtgagcctcatccagcacacgcttacctgccatcagtactacctgcagctgagaaaggacatccttgaggagcgcatgcattgcgacgacgagaccagtctgctgctagcctcactggccttacaggcggagtacggggactatcagcccgaagtccacggagtgagttacttcagaatggagcactacctccctgcgagagtgatggagaagctggacctaagctacatcaaggaggagctgccaaagttgcacaacacttacgtgggcgcctcagaaaaggagacagaactagagtttctgaaagtatgtcaacggctcacggagtacggcgtacacttccatcgcgttcaccctgaaaagaaatcccagaccggcatattgctcggggtgtgctccaaaggcgtgttagtttttgaagtgcataatggggttcgcactctggtactgagattcccatggcgcgaaaccaagaaaatcagcttcagcaagaagaaaatcacattacagaatacttctgatggaatcaagcacggatttcagactgataactcaaaaatttgccaatatctgctgcatctttgctcttaccagcataagtttcagctgcagatgcgggcccgacagtccaatcaggatgctcaggacatcgagcgggccagcttcaggtccctcaacctgcaggccgagtcagtccgcgggttcaacatgggccgcgctatcagcacaggtagtcttgcaagctccaccctgaacaagctggcagtgcgcccactctctgtgcaagcagaaatcctgaaaaggttgtcttgcagtgaactgagtttatatcaaccactgcaaaattcaagcaaagagaaaaatgataaagctagctgggaggagaaacctcgcgaaatgagtaaatcttatcacgacctatcgcaggcttctctgtatccccatcggaagaatgttatcgttaacatggagccacctccacaaactgttgccgaacttgttggcaagccaagccaccaaatgtccagaagcgacgccgagtccctcgctggcgttacgaaattgaataatagcaagagcgtcgccagtctcaatcgaagtcctgaacggaggaagcacgagtccgacagtagctcaattgaggacccaggacaggcctacgtgctcggaatgacgatgcactcttccggcaacagctcttcccaagtacctctaaaggagaatgatgtgctgcacaagcgatggtccatcgtatctagtccggagagagagatcacattagttaacctcaaaaaggatgctaagtatggccttggctttcaaatcattggcggtgaaaaaatggggagactggatctaggtatcttcatcagctccgtagcgccgggagggccagccgacttggacgggtgcttgaaaccaggcgataggctgatatctgtgaattcagtctctctggaaggggtgagccaccatgcagccattgagattctccagaatgcacctgaggacgtgactctcgttatcagtcagcccaaggaaaaaatatcaaaggtgcctagcactccagtccacctcactaacgaaatgaagaactacatgaagaagagcagttatatgcaggactcagctatagactcatcttctaaagaccatcactggagtcgggggactctgagacacatatccgagaactccttcggcccctcggggggactcagagagggcagcctatcgagtcaagacagtcgcaccgaaagcgccagtctttcccaaagtcaagtgaacgggttctttgctagtcacctgggagatcagacctggcaggagtcccagcacggctcccctagtccatccgttatctccaaagcaaccgagaaagagacatttactgatagcaatcaaagcaagaccaagaagcccgggatctccgatgttaccgattacagcgatcggggcgactctgacatggatgaagcaacctacagctccagtcaggatcaccagacaccaaaacaggagtcttcatcttctgtgaacacctctaataaaatgaatttcaagacctttagcagcagtcctccaaagcctggagacatcttcgaagtggagcttgcaaagaacgacaattcgctgggcatctccgtgacaggcggagtcaacacgagcgtgcgccacggtgggatctacgtgaaggccgtgatcccacagggcgcggcagagagcgacggccgaatccacaaaggggacagagttttagctgtgaacggcgtgagtctggaaggtgcaactcacaaacaagcagttgaaactcttaggaatacgggtcaggtcgttcatctcttgctggagaaggggcagtcccccacgtccaaagagcacgtgcctgtcacacctcagtgtaccctctctgaccaaaatgctcaagggcaggggccggagaaagtaaagaagacgacccaggtgaaagactattcattcgtgaccgaggagaacaccttcgaagtgaagctctttaagaactcatccggtctgggtttcagcttcagtcgagaggataatctgatccctgaacaaattaacgctagcatcgtgcgcgtcaagaaactattcccaggtcagcctgccgccgaatcgggaaagatcgacgttggtgacgttatcctgaaagtaaatggtgcatccctgaagggactctcccagcaggaagtcatctctgcgctgaggggaaccgccccggaggtgtttctgttgctctgccgcccgcctcctggcgttctgcccgaaatcgacaccgctctcctgaccccactacagagtcctgcccaagtgctgcctaactccagtaaagacagcagccagccatcatgcgtagagcagagtacgagttctgacgagaatgaaatgagcgacaaatcaaaaaagcagtgcaaatctccatccagaagagatagctacagtgatagctccggctccggggaggacgatcttgtgacagctccagcgaatatctcaaatagtacttggtcatccgcactacaccagactttatcaaacatggtgtcacaggcccagtcccatcatgaggcaccaaagagtcaggaggacacgatttgcactatgttctactatcctcagaagatccctaacaagccagagttcgaagattccaacccctccccactgccaccggatatggcgcccggccaatcttaccaacctcaatccgagagtgctagtagtagctctatggacaagtaccacattcatcatatttccgagccaacgcgtcaggaaaattggaccccactgaaaaatgatctggagaatcacttagaagatttcgagcttgaagtagaattactgataacactgatcaagagtgaaaaaggaagcctaggcttcacggtgactaagggaaaccagagaataggatgctatgtacacgacgttatccaggacccagctaagagcgacggtagattgaagccaggtgatcgtctgattaaggtgaatgacacggatgtaaccaatatgacccatactgacgccgttaatctgctgcgagctgctagcaaaacagtgaggttggtgatcggtagggttctggagttgcctcgcattcctatgctgccacacctgttaccagacattactctgacatgtaataaggaggagctcgggttctccctgtgcggcggccacgatagcctgtaccaagttgtgtacatctcggatattaatccccggtccgtcgcagccatcgagggtaacctacaattgctggacgttatccattacgtcaatggggtgtcaacccaaggaatgaccctggaagaggtgaaccgagctctggacatgtctctgcccagcctggtcttgaaggcgactcgcaacgatttacctgtggttcccagctcgaaacgaagcgctgtgagcgccccaaagagcacgaagggtaacggctcttactctgtggggtcctgctcccaacccgccttgacacctaacgattccttttctacagtagcaggcgaagagattaacgaaatttcgtaccccaaagggaaatgctcaacataccagatcaaggggtccccaaatttgacattgcccaaagagagctatatccaggaagatgatatctatgacgatagccaggaggccgaggtgattcagtcactattagacgtcgtggacgaggaggcccagaacctcttaaacgagaataacgctgctggctacagctgcggaccaggaaccctgaaaatgaatgggaaactgtctgaggagcggacagaggataccgactgtgacggatctcctctccccgagtacttcaccgaggccaccaagatgaacggctgcgaggagtattgcgaagagaaggtgaagtctgaatccctgatccagaagccacaagaaaaaaagacagacgacgacgagattacctggggcaacgatgagttgccaattgagcgaacaaatcacgaggattcggacaaggatcattcatttttgactaatgatgaattggcagttctgcccgttgtgaaggtgcttcccagcggcaagtacacaggtgctaacctaaagagcgtgatcagagtgcttagaggactactggaccaaggcatccccagcaaagaactcgagaatctacaggagctgaaaccccttgatcagtgcctaatcgggcagaccaaagaaaatcgcaggaaaaaccgatataagaatattctgccttacgacgcaacaagggtacccctcggcgacgaagggggctatatcaacgcaagctttatcaagatcccagtgggaaaagaagagtttgtatatatcgcctgtcaaggcccgttacccaccacagtgggcgacttttggcagatgatttgggagcagaagagtaccgtgattgcaatgatgacgcaggaggtggagggggaaaagattaagtgccagagatactggccaaacatcctgggaaagaccacaatggttagtaacagattgagattggccttagttaggatgcaacagctgaaggggtttgtcgtacgtgcaatgacgctagaggacatccaaacaagagaggtgcgccatatatctcatctgaactttactgcatggccagatcatgatacccccagccagccagacgaccttttaacgtttatctcttatatgcgtcatattcacaggagcgggcctattattacccattgttcggcgggcatcggacggtccggcacactgatttgtatcgatgtagttctcggactgattagccaggacctcgatttcgacatcagcgacctggtcagatgcatgcggctccagcggcacggcatggtccagacagaggatcagtatatcttttgctatcaggtgattctatacgtcctaacccggcttcaagccgaagaggagcagaagcaacagccacagctgcttaaatag

SEQ ID NO: 130865 - DNA, 7401 bp, synthetic construct
  misc_feature 1..7401: note = Description of Artificial Sequence: Synthetic coding sequence
  source 1..7401: mol_type = other DNA
atgcatgtttctctggcggaggcattagaagtcaggggagggcctttgcaggaggaggaaatctgggctgtgttaaatcagagtgcggagtcactccaggaacttttccgcaaagtcagccttgccgatcccgccgctctaggcttcattatttctccgtggagtctgctgctgctaccttctggcagcgtaagctttaccgatgagaacattagcaaccaggacctgagggctttcactgctccagaagtgttacagaaccagagtctgacttctctgtccgacgtggaaaagattcacatctactctcttgggatgaccttgtactggggagcagactatgaagtgcctcagtcacagcccatcaaattgggggaccacctgaattccatattgttgggcatgtgcgaagatgtgatctacgcacgggtcagtgttcggaccgtgttagacgcgtgcagcgcccacatccggaatagcaactgtgccccttcttttagttacgtgaaacacctggttaagttagtccttgggaatctgtccggcacagaccagctgtcttgcaattctgagcagaagcccgacagatcacaggctatacgtgatcggctgagggggaagggcctgcccaccggacgctcctcaacctctgatgttctggacatacagaaaccccccctttcccaccagaccttcttaaataagggcttgtctaagagcatgggattccttagtatcaaagacacccaggatgagaattacttcaaggatatcctgagcgacaacagcggccgcgaagacagcgagaacaccttttctccatatcagtttaagacttcaggacctgagaagaaacctatacccggcattgatgtgctatccaagaagaagatctgggcaagcagcatggacctcctgtgtactgcagacagggacttttctagcggcgaaactgctacctacaggcgttgtcaccctgaggctgtgacagtgcgaacttctacaactcctcgcaagaaagaagctcgatattctgatggaagcatagccctcgatatattcggaccacagaagatggaccctatctaccacacccgggaactcccgacatcatccgccatcagcagcgccctggaccgcatcagagaacgccagaaaaaattgcaggtcctccgggaagcgatgaatgtggaagaacccgttcgccggtataagacatatcacggcgacgtctttagcaccagcagcgaaagccctagtatcataagttcagaaagcgatttccgacaggtgcgccgctctgaagcatccaagaggttcgaatccagttctggtttgcctggggtagatgagacactgagtcagggtcagagccagcgtccctctcggcagtacgagacgcccttcgagggaaatctgattaaccaagaaatcatgctcaagcggcaggaggaggagctgatgcaattgcaggctaaaatggcgctgcgtcaaagcagactatctttgtatcctggagatacaatcaaggcatccatgctggatattacacgcgacccgctcagggagatcgcgctagaaactgctatgacacagcgcaagctcagaaactttttcggcccggaattcgtaaagatgactattgaaccgtttatcagcttggacctgcctcgttctatcttgactaagaagggcaaaaacgaggacaaccggagaaaagtcaatatcatgctccttaatggccagagactcgagttgacctgtgacactaaaaccatttgtaaagatgtgtttgacatggttgtcgcacatattgggctcgttgaacaccacctcttcgcactagctacattgaaggacaacgagtacttctttgtggacccggatcttaaactgacaaaggtggccccagaaggatggaaagaggaaccaaaaaaaaaaactaaggcaactgtgaacttcacccttttttttcgcattaagttcttcatggatgatgtttctctaatccagcatacgcttacatgtcatcagtactacttgcagctgcgaaaggatattctcgaggagcgcatgcactgtgacgatgagacctcccttctgttggcaagcttagctctgcaggccgaatacggcgattaccagccagaggtccacggcgtgtcatacttcaggatggagcactacctcccagcccgggtaatggaaaaactggatctctcttacatcaaagaagaacttccgaaactgcacaatacctacgttggcgccagtgagaaagagactgagctcgaatttttgaaagtgtgccagcggctgacagagtatggggttcactttcatagagttcatccagagaagaaatcgcagaccggcatcttactcggggtatgctctaaaggcgttttagtcttcgaagtgcataacggagtgcggactctggtattacggttcccctggagggagaccaagaaaatcagcttcagtaaaaagaaaattacactccaaaacacgtctgatggcataaaacacggcttccagactgacaacagcaagatctgtcaatacctactgcacttgtgttcataccagcataagttccagctgcagatgcgggcccggcagtctaatcaggacgcacaggatatcgagagggcctcgttcagatcgctgaacctgcaggctgaaagcgtgcgcggcttcaacatgggtcgggccatatcaacaggcagtcttgcgtcctccaccctcaataaactggctgtgagacctctctccgtgcaggcggagatcctcaaaaggctcagttgtagcgagcttagcctctaccagccgctccagaactcatctaaagagaagaacgacaaggcaagctgggaagagaaacccagggagatgagcaagtcctatcacgacctgtctcaagctagcttatacccacatcgaaaaaatgtcattgtcaacatggaaccccctccacaaaccgtggctgaattagttggcaaaccaagtcatcagatgtccagaagtgatgcagagagtctggccggagttacaaagttaaacaactcgaaatcagtggcttcgctgaacaggtcgccagagagacgcaaacacgagtcagactcgtcaagtattgaggatcccggccaagcgtacgtgttagatgtgctgcataaacgctggagcattgtctcctctccagaaagagaaattaccttggttaatttaaagaaggatgccaagtacggccttggtttccagataatcggaggagagaagatggggcgactggacctgggtatcttcatttcaagtgtagcccccggtggacctgctgacctggacggctgcttaaaaccaggcgaccgtttaataagtgtcaatagcgtctcgctcgagggtgtcagtcaccacgccgccatcgagattctccagaatgccccggaagatgttaccctagtgatctcgcagcccaaagaaaaaatttcgaaggtgcctagcacccccgtacacctaacaaacgagatgaagaactacatgaagaagagtagctacatgcaggattctgcaattgacagttcttccaaagaccaccattggtcccggggcacccttaggcacatctctgagaacagcttcggaccaagcggggggctgagagaaggcagtcttagctcacaggattcaagaacagagtccgcctccctctcccaatcccaggtgaacggtttcttcgcttctcaccttggcgaccaaacgtggcaggaatctcagcatggttcaccgtcaccctccgtgataagcaaagcaacagagaaggagacttttactgactctaaccagagtaaaacgaaaaagccaggcatctctgacgtcactgactacagtgatagaggagactcggacatggatgaggccacatattcaagctcccaagatcatcagactcctaaacaggagtcttcatcctccgtgaacaccagcaataagatgaatttcaagacctttagcagctctcccccaaagcccggtgacatatttgaggtagagctggcaaagaatgataattccctggggatctcagtgacgggtggggtcaacacatccgttcgccatggcgggatctatgtaaaagccgtgatacctcagggtgccgcggaaagtgatggtagaatccataagggggaccgggtccttgccgtcaacggggtgagtctggagggagctacacacaagcaggcggtagagaccttgcgcaataccggacaggtcgtgcacctgctgcttgagaaaggccagtcccccacgagcaaggagcacgttccagtgaccccccagtgcacattgtctgaccagaacgcacagggacaaggccctgaaaaggtcaagaaaactactcaggtcaaggattattctttcgtcactgaagaaaatacctttgaggtgaagctcttcaagaacagctccggcctggggttcagcttctcccgcgaggacaatctgatacccgaacaaataaacgcatctatcgtccgcgttaagaagttgttccctggccagcccgctgccgagagcggcaagattgatgttggcgatgtgatcctaaaggtcaatggcgccagcttgaaggggctgtctcagcaggaggtcatctctgcgcttagggggaccgccccggaggtgtttctgcttctgtgccggcctccaccgggcgtgctgcccgaaatagacaccgcactcctgactccgctccagtctccagcacaggtactcccaaactccagcaaagactcctctcaaccctcctgcgtggagcaatcgacttcctccgacgagaatgagatgtccgacaaatccaaaaagcagtgtaaatctccctctagaagggatagctactcagacagcagcggatccggagaagacgatctcgtgaccgcccctgctaacatcagtaattccacctggagctccgctctgcaccagaccctgtctaacatggtttcacaggcccagtcacaccacgaagctcccaagagtcaagaggacacgatctgcaccatgttttactatccccagaagattcccaacaagccagagttcgaagatagcaatccaagcccgttacctcctgatatggctcccggacagtcttaccaaccgcagtcggaatccgcctcaagctcatcaatggacaaataccatatacaccatatctccgaacccacacgccaggagaattggacgcctctgaagaacgatctagagaatcacctcgaagacttcgagctagaggtggagctcctgattactttgatcaaatccgagaagggcagcttggggtttacagtgaccaagggaaaccaacgaatcggctgctacgtgcacgacgtgatccaagaccctgccaagtctgacgggcgtctgaagccgggagacagattgataaaagtgaacgatacggatgttactaacatgacccatacagatgccgtaaatttactgcgggcagcctccaaaaccgtacggttggttattggacgggtgctggagctcccaagaatacctatgctgccacacctgctgcccgatatcaccttaacatgcaataaggaagaattgggctttagtctgtgcggcggccacgacagcctttatcaagtcgtgtatattagtgatatcaatccccggtctgtggcggcaattgagggcaacttacagctgttagatgtgatccactatgtgaacggagtgtccacccagggtatgacattggaagaagtcaatagagccctggatatgagcctcccaagtctggtgttaaaagctacacggaacgatttgccagtcgtaccgtctagcaagaggagtgctgttagcgctcccaaatctacgaaagggaacggttcctacagtgtcggtagttgctcgcagccagcactgactccaaatgatagcttctccaccgttgccggcgaggaaattaatgaaattagttaccccaaaggcaagtgttcaacttatcagataaagggctcccccaatctaacactgcccaaggaatcatatatacaggaggatgacatctacgacgacagccaggaggcagaagtaattcagagcctcctagatgttgtcgacgaggaggctcaaaaccttctcaacgaaaacaacgcagcagggtactcttgcggtccagggaccttgaagatgaacggaaaattgtctgaggagcggactgaggacacagactgcgacggttcaccactgccggagtactttacagaggctacaaagatgaacgggtgtgaggaatattgcgaagagaaagttaagtcagagtcactcatccaaaagcctcaagaaaagaagacagacgacgatgagattacttgggggaatgatgagctccctatagaaaggactaaccacgaagactcagacaaggaccactcgtttttaaccaacgacgagttggcagtcctgcctgtcgttaaagtcttgccttctggtaaatataccggtgccaatcttaagtcagtaatcagggtgctgaggggcctgctggaccagggcataccttctaaagagttggaaaacctccaggagctcaagccattggaccagtgtctgatagggcagaccaaggaaaataggcggaagaacaggtacaaaaacatccttccttatgatgcaacccgggtcccactcggcgatgagggaggatacatcaatgcaagtttcatcaagataccagtgggcaaagaggagttcgtgtatattgcctgccagggccccctccccactacggtgggcgacttctggcagatgatatgggagcagaaatcaaccgtgatcgccatgatgacacaggaggtcgagggcgagaagattaaatgtcaacggtactggccaaatatccttggcaagacaactatggtatcaaaccgacttcggctcgctctcgtgagaatgcagcaactgaagggcttcgtcgtccgggccatgaccctcgaggacatacagacgagggaagtcagacacatctcacatctgaactttaccgcatggccagatcacgatacaccctcccagcccgacgacctgttaacttttatatcttacatgcgtcatatccatcggtccggacctataattacacactgctccgcggggatcggtcggtccggaacacttatatgcatcgacgtcgtgttaggcttaatatctcaggacctggatttcgacatcagcgacctggtgaggtgcatgaggttgcagaggcacgggatggtgcaaaccgaggaccaatacatcttctgttatcaggtcattctctacgtgcttaccaggctccaagcagaagaggaacagaagcagcaacctcagctgcttaaatag

SEQ ID NO: 130866 - DNA, 7473 bp, synthetic construct
  misc_feature 1..7473: note = Description of Artificial Sequence: Synthetic coding sequence
  source 1..7473: mol_type = other DNA
atgcacgtatccctggcagaggcactcgaggtaagggggggaccactccaagaagaagagatttgggccgtgctaaaccagtcagcagagagtctccaggagctgttccggaaggtgtcactcgcagatccagctgccctgggctttattatttccccatggtcactactgctgctcccgtccggcagtgtgtcctttacagacgagaatattagcaaccaggatctgcgtgcattcaccgctccagaagttctgcagaaccagagcttaacgtctttatccgacgtggagaaaatccacatttactcgctgggcatgacgctctactggggcgccgattatgaggtgcctcagagtcagcctattaagctgggcgatcatctaaatagtatattgctcggaatgtgcgaggatgtgatctacgcccgcgtgtccgttcgcacagtactcgacgcttgctctgcccacatccgaaacagcaactgtgcccccagctttagctacgttaaacacctggtaaaactagtgctgggcaatctatccggaacagatcagctgtcgtgtaactctgaacaaaaaccagaccggagtcaggcaatccgcgacaggcttcggggaaagggcctcccgaccggccgcagctccacgtcagacgtgcttgatatccaaaagccccctttgtcccatcaaactttcttaaataaaggactaagtaagtctatgggttttctgtccatcaaggacacccaggacgaaaattactttaaggacattttgtccgataatagtggccgggaggatagcgagaacacgtttagcccttaccagttcaagacctccgggcctgagaaaaaaccgattcccggcatagacgtcctttcaaagaagaaaatttgggcatcctccatggacctcctgtgtactgcagaccgggatttcagcagtggcgaaaccgctacctaccggagatgccacccagaagctgtcactgtgagaacctccacaacgccaagaaagaaggaggccagatatagcgatgggtctatagcacttgatatttttggtccacagaagatggatccaatctatcacaccagagagctccctacttcatccgccattagttccgccttggatcgcattcgggagcgtcaaaagaagctgcaagtgctgagggaggcaatgaatgtagaggagccagtccgtagatataagacctatcacggtgacgttttcagcacatctagcgaatccccctcgattatttccagcgaatcagacttcagacaggtgcgacgcagtgaggcatctaaaaggtttgaatccagcagtggcctccccggcgtagacgaaactctctcgcaaggccagtcccagcggccttctcgccagtacgagaccccattcgagggaaacctgataaaccaggaaataatgctgaaaagacaggaggaagagctgatgcagctacaggcaaagatggccttgcgacaatctcggctgagcctttatccaggcgacactataaaagccagtatgctggacatcactagggatcctctgcgagagatcgctctggaaacagctatgacgcagaggaaacttcgcaacttcttcggcccagagttcgtcaaaatgacgatcgaaccctttatcagcctggacttaccgcgcagcattcttacgaagaaggggaagaacgaggacaaccggcgcaaggtaaatataatgttgttaaatggccagcgtctggaactgacctgcgacacgaaaactatttgtaaggacgtgttcgacatggtggtagcacacatcggtctggttgaacaccatctttttgccctggccactcttaaagataatgagtacttttttgtcgatccagacttgaagttgactaaagtggcacctgaggggtggaaggaagaacctaaaaaaaaaaccaaggccactgtgaacttcactttgtttttccgcataaagttcttcatggacgatgtatcattgattcaacacacacttacctgtcaccagtactacttgcagcttcgtaaggacattctggaggaaagaatgcactgcgacgacgagaccagtctcctgctagcctccctggccctgcaggccgagtatggagactaccagcccgaggtgcatggggttagctacttccgtatggaacattacctgccagctagagtcatggaaaagctagacctgagttacataaaggaagagttacccaagctccacaacacctatgtgggcgccagtgaaaaggaaactgaactcgaattcctcaaggtgtgccagcgtctaactgagtacggcgtgcactttcaccgcgtacacccagagaaaaagtcccagaccggcattctgctgggcgtgtgcagtaagggagtgcttgtattcgaggtccataatggggtgagaaccctcgttctgaggtttccctggagggaaactaaaaagatctccttttccaaaaagaaaattactctccagaatacctccgacggaattaaacacggtttccagactgacaacagtaagatttgccaatatttactgcatctatgtagttaccagcataagtttcaattgcagatgagggctagacagtcaaatcaggatgcacaggatatagagagagcttcttttaggtcactcaatctgcaggccgagtcagtgcgcgggtttaacatgggacgggcgatttccaccggcagtctggcgtcgtctaccctcaataaactggccgtgcggcccttgtctgttcaggccgaaatccttaaaaggctgagctgttcagagctgtctctgtatcaaccgctacagaattccagtaaagaaaagaatgataaggcctcgtgggaggagaaaccccgtgaaatgtccaagtcataccatgatctgtctcaggcttctctgtaccctcatcgtaagaacgttattgttaacatggagcccccgcctcagacagtggcagagctggtgggcaaaccatcccaccaaatgtctagaagtgatgctgagtccctggccggggtgacgaaactgaacaattcaaaatctgttgcaagcctcaaccgctctcccgaaagaaggaaacacgaaagcgatagctcgagcattgaagaccccggccaagcctacgtcctagggatgactatgcattcttcgggaaattcgtcaagtcaagtccctctgaaggagaatgacgtcctccacaaaaggtggtccattgtaagtagccccgagcgggaaatcacactcgtcaacctgaagaaggacgctaaatacggcttggggttccaaattatcggtggagaaaaaatgggccgccttgatctgggcattttcatatcctccgtggcccctggggggcccgccgacctggatggatgccttaagcctggggataggctcataagcgtgaatagcgtctccctcgagggggtgtctcaccacgctgcaatagaaattctccaaaatgcccccgaggacgtaaccctggtaattagccagcctaaagagaaaattagcaaagtccctagcacccctgttcatctaacaaatgagatgaagaactatatgaaaaagtcaagttatatgcaggacagcgcaattgactcttcctcgaaggatcatcactggtcacggggcaccttaaggcatatcagtgaaaatagctttggccccagcggaggcctgcgcgaaggatccctgtcttcacaggatagtcgtacagaatctgcatccctgagccagtcccaggtgaatggctttttcgcatctcacctgggggaccagacgtggcaagaatcacagcacggatcaccaagcccctctgtaatctcaaaggccacagaaaaagagaccttcacagattctaaccagtctaagaccaaaaagccagggatctctgacgtcactgactattcagatcgaggcgactcagacatggacgaggctacttactcctcaagccaagaccatcagactcctaaacaggagagctccagctctgtgaacacctcaaacaaaatgaatttcaagacattttcaagctcacctccaaagccaggggacatcttcgaggttgaattggcaaaaaatgataattctctgggaatctcagtgaccgtactctttgataaaggaggagttaacacctccgtgaggcacggcggcatatacgtgaaagccgtcatacctcagggagccgctgagtcggacggacgaattcacaaaggtgatagagtgcttgccgtcaatggggtgagccttgagggggccacacacaagcaggccgtcgaaactctccggaacactggacaggttgtacatctgttgctggaaaagggccagtcccccacatccaaggagcatgtgcctgtgacccctcagtgtacattatctgaccaaaacgctcagggacagggcccagaaaaagtcaagaagaccacgcaagtgaaagattactcctttgtgacagaagagaatacatttgaggtgaaactcttcaagaattctagcggtctcggattctcttttagccgagaggacaacctgattcctgaacagattaacgcctcaattgtccgggtgaaaaagctgtttccgggccagcctgcagcagagtccggtaaaatcgacgtgggcgacgttatcctcaaggtaaacggagcttcgttaaaaggactcagccagcaagaggtgatctctgccctgcgcggtaccgccccagaagttttcctcctgttgtgtcgtcctccccctggcgtgctgcccgaaatcgacaccgccttgctgaccccattgcagtcgcctgctcaggttctgccaaacagctctaaagattcttctcagcctagctgcgtggagcagtctacttcaagcgatgaaaatgagatgagtgataagagcaagaaacagtgcaagtctccttcaaggagggactcttactccgactcctcggggtccggagaagatgatctggtcacagccccagccaatatcagtaatagtacgtggagcagcgcgctgcaccaaacactgtcgaacatggtaagtcaggcacaatcccatcatgaggcacccaagagtcaggaggacacgatttgcactatgttctactaccctcaaaaaataccaaataaaccagagttcgaggacagcaacccatcgcctctgcccccagacatggccccaggacagtcatatcagcctcagagcgaatcagcctcttcgtccagcatggacaaatatcatatccaccacattagcgaacccactaggcaggagaattggacaccactaaagaatgacctggagaatcatctggaggacttcgaactagaggtggaacttctgatcacactgatcaaatcggagaaaggctcattgggttttacagtgactaaggggaatcaacgaatcggctgttatgtccatgacgtaattcaagatcctgccaagagtgacggcagactgaaaccaggggaccgcttgatcaaggtgaatgatacagatgttacgaatatgacacacaccgatgctgttaacctgttgcgagccgcctccaagactgttcggctggtgatcggaagagtactcgagttgccacggatcccaatgttgccacacttgctgcccgatatcacccttacatgcaataaagaggaacttggcttttctttgtgcggcgggcacgattctttgtaccaagtcgtgtacatcagtgatataaacccacggtccgtggctgccatcgaagggaatctgcagctcctggacgtaattcattatgtgaatggggtatccactcaaggcatgacactggaagaggtgaaccgggccctggacatgtctttacctagccttgtgctaaaagcaacccgaaacgacctgcctgtagtgccttcctcaaagcgatccgccgtgtctgctccaaagtcaacaaaaggtaatggatcctacagcgtcggcagctgcagtcaaccagccctcactcctaatgatagtttttctactgttgccggggaagaaatcaatgaaatctcctatcccaaaggtaaatgcagcacttaccagataaagggctctccaaacctgactttaccaaaagagtcctacattcaggaggatgacatctacgatgacagtcaggaggctgaggtcatccagagtctgctggacgttgtcgacgaggaggctcagaacttgcttaatgagaataacgccgccggatattcctgtggtccgggaaccctaaagatgaatggcaagcttagtgaggaaaggaccgaagacactgactgcgatggctcccccttacccgagtatttcactgaggccacgaaaatgaacggatgcgaggagtattgtgaagaaaaagtgaaatccgagtccctcatccaaaaacctcaagaaaaaaagacagacgacgatgaaataacgtggggaaatgacgagctcccaattgaacgtacaaaccacgaagacagcgataaagaccattctttcttgacaaatgacgaactggcagttctgccagtcgtgaaagtcttacccagcggcaaatatacaggggcaaacctgaaatcagtgatccgggtcctgcgggggcttcttgatcaaggtatcccttcaaaagagctcgagaacctgcaggaactgaaacctctagaccagtgcctgatcggccagacaaaagagaaccggcgaaaaaatcgctataaaaacatactgccttacgatgccacgcgagttccccttggagacgaaggcggatatatcaacgcctctttcattaagatcccggttggcaaggaggagtttgtctatatcgcttgtcagggcccactgcccactacggtaggcgacttttggcagatgatatgggagcaaaagagtactgtgatcgccatgatgactcaagaggtcgaaggtgaaaaaatcaaatgtcagcgctactggcctaacattctggggaagaccactatggtatctaaccgactccggttggctctggttcggatgcagcaacttaagggtttcgtcgtgagagcaatgacactggaagacatacagacgagagaagtgcgacacatcagtcacctgaatttcaccgcctggcctgaccatgatacacccagccaacccgatgatctactcacctttataagctatatgaggcacattcatcgtagcgggcctataattactcattgcagcgcgggaataggccgcagcggcactctgatatgtatcgatgtggtgttgggcctgatcagccaggatcttgacttcgacatctctgatctggtgaggtgcatgaggctgcaacggcacggtatggttcagactgaagaccagtacatcttctgctatcaagtgattctgtacgtgttgacgcgactgcaagccgaagaggaacagaagcaacagccgcagttactgaaatag

SEQ ID NO: 130867 - DNA, 420 bp, synthetic construct
  misc_feature 1..420: note = Description of Artificial Sequence: Synthetic coding sequence
  source 1..420: mol_type = other DNA
atgcatgtgagtttagccgaggctttagaggtaaggggcgggccgctgcaggaggaggaaatttgggcagtgctgaaccaaagtgcagagtctctccaagagctgttcaggaaagtgagtctagccgaccctgctgccctcgggtttatcatttctccctggagcctgttactgttaccctctggaagtgtaagctttacggatgagaatattagtaatcaagacttgagggccttcacagcacctgaggttctgcagaaccaatccctcaccagtctgagcgatgtcgagaagatacacatatactctttgggaatgactttgtactggggagcggactatgaggtgccacagagtcagcctattaagcttggggatcatctgaactcaatactgttaggcatgtgtgaggatgtgtag

SEQ ID NO: 130868 - DNA, 7473 bp, synthetic construct
  misc_feature 1..7473: note = Description of Artificial Sequence: Synthetic coding sequence
  source 1..7473: mol_type = other DNA
atgcacgtcagcctagccgaggccctggaagtaagggggggtcctcttcaagaagaggaaatttgggctgtcttgaatcaaagcgcggagagcttgcaagagttatttcggaaagtgtcgctggcagaccccgcggccctcggattcatcatctcgccttggtccctgctgttgctcccatcaggatccgtgagctttacagacgagaacatttccaatcaggacctaagagccttcacagcacctgaggtgctgcagaaccagtcactcaccagcctcagcgacgtggaaaagatccacatttactcgctcggaatgaccctgtactggggagctgactacgaagtgccccagagccaacccattaaattaggtgatcacctgaacagtattctcctcggaatgtgtgaggacgtcatctatgccagagtcagcgtcaggaccgtgctggacgcttgctcagcccacattcgaaacagcaactgtgccccttccttttcatacgtgaagcatctggtaaaactcgttctaggcaacctgtcaggaactgatcagctcagctgtaattcagaacagaagcccgacagaagtcaggccattcgcgataggctgagaggaaagggcctgcccacaggtcggagcagcacgagcgacgtgctggacattcaaaagccccccctctcccaccaaacctttctgaataaggggctgtctaagagtatggggtttctgagcataaaagacacacaagacgagaactactttaaagatatcttgagcgacaatagtgggcgcgaagattcagagaatacatttagcccttatcagtttaagactagcgggcccgagaagaagccaatccccggaattgatgtgctttccaagaagaagatctgggcgtcatccatggatctcctctgtacggccgacagggatttcagcagtggtgaaactgccacatatcggagatgtcatcctgaagcagtgacagtgagaactagcacgaccccgcgaaagaaggaggctagatattctgatggttccattgctctcgacatcttcggaccacagaaaatggatccaatttatcacaccagagagttgcctacaagctcggcaatctcttctgcattggacagaattagagagcgtcagaagaaactccaggtcttaagggaggctatgaacgtggaggagcccgtgcggcgatacaagacttaccacggtgatgttttttctacctcttcagagtcgccatctatcatttcaagtgaatctgactttcgacaggtgcgacggagcgaggcctctaaacggttcgaatctagtagtggactgcccggcgttgatgagacccttagccagggccaatcccagcggcccagtagacagtatgagacgcctttcgaggggaatctgatcaatcaggagattatgttaaagcggcaagaggaagagctcatgcagctccaggccaagatggcacttcggcagtccaggttgtcactatatcctggcgacacaattaaagcctcaatgctagacattacccgcgaccctttaagggaaatcgccctagaaaccgctatgacacagcggaaactgcgaaattttttcgggccagaatttgtaaaaatgacaatcgagccctttatttctctggatctccctaggtccatactcaccaagaagggtaaaaatgaggacaatcggcggaaagttaatattatgcttctgaatggacagcgactggagctcacgtgtgatacaaagactatctgcaaagacgtgttcgatatggtggtcgctcatatcggtctggtggaacaccacctttttgccttggctacactgaaggataatgagtacttcttcgtggaccccgacctcaagctcacaaaggtggccccggagggttggaaagaagagccaaagaaaaagacaaaggccacagttaattttactctgttcttccgtataaaattctttatggatgacgtgagcctcattcagcatacgctaacatgtcaccagtattatctgcagcttcggaaggatattctagaggagaggatgcattgcgacgatgagacttcactcctgctagcaagccttgccctgcaggccgaatatggcgactaccagccagaagtccatggcgtttcctatttccgaatggagcactatttgcctgcacgcgtgatggaaaagctggatctgtcttatatcaaagaagaacttccgaagttgcacaacacgtatgtgggcgcgagcgagaaggagactgaactagaattcctgaaggtttgccagcgtctgactgaatacggtgtccatttccaccgggttcatcctgagaaaaaatctcagactggtattcttttaggagtgtgtagcaaaggcgttctggtttttgaggttcataatggtgtgaggactcttgtgcttcgtttcccttggagagaaaccaaaaaaatctctttttccaaaaagaagataacccttcagaatacatcggacggtattaaacacggatttcagaccgataatagcaaaatctgtcagtaccttttgcatttgtgttcctaccagcataagttccagttgcagatgcgggctagacaatcgaatcaggacgcccaggacattgagagagccagttttcgctccctgaacttgcaggctgagtctgtgaggggtttcaatatgggccgggcgatcagcacaggctccctagctagttccaccctcaacaagctggcggttaggccattatccgtccaagcggagattttaaagcgtctctcatgtagcgagttgtccctataccagccactccagaacagctcaaaggaaaagaatgacaaagccagctgggaggagaaacctcgggagatgagtaaatcctaccacgacctgagtcaggcctccctttacccccataggaagaatgttattgtcaatatggagccgcccccgcagacagtagctgagctggtggggaagccctcccaccagatgagcaggtccgatgctgaatcgctggcaggcgtgactaagctaaacaactcaaagagcgtggcttctctcaatagatctcccgagcgtagaaaacatgagtcagactcatcgtccatcgaggatccggggcaggcttacgttttggggatgaccatgcactctagcgggaatagctcgtcgcaagtgcccctgaaagaaaacgatgtcttgcacaagagatggtccattgtaagcagccctgagcgcgaaattactcttgtgaatttaaagaaggacgccaaatacggcctcggatttcagatcatcgggggcgagaaaatggggcggttggacttaggtattttcatcagctcggtagctcctggtggccctgcagacctggacgggtgcctgaaacccggggataggctgatctccgtgaattcagttagcttggaaggagtgagtcatcatgctgctatcgagatccttcagaacgctcccgaagacgtcacgctggttattagccagccaaaggaaaaaatcagcaaggtcccctcaaccccagtgcaccttactaacgaaatgaaaaactatatgaagaagtcttcatatatgcaagatagcgcaattgactcatccagcaaagatcaccattggtccagaggaactctccgacacatctctgagaacagcttcggtccatctggaggactgagggagggctctttatcctcccaggacagcagaacagagtctgcatctctctcccagtcccaggtcaatggcttttttgcatcacatctgggcgaccaaacatggcaggagagccagcacgggtcaccgtcacctagtgtcatttccaaggccacggagaaagaaacgtttaccgattccaaccagagcaagacaaaaaagccaggcatttctgacgtgacagactattctgacagaggcgatagcgatatggatgaggctacctacagttcctcgcaggaccatcaaacaccgaaacaagagtctagctcctctgtgaatacctctaacaagatgaattttaaaaccttttccagcagtcctccaaaacctggcgacattttcgaagttgaactcgcaaagaacgataactccctgggcatatccgtaaccgttctgttcgataagggaggggtgaatacatcggtgaggcatgggggcatttacgtgaaggcggtgatcccccaaggtgctgccgagtccgacggcaggatccataagggcgatagggtcctggccgtgaacggagtcagtctggagggagccacccataaacaagcagtggagaccttaaggaatacaggccaggtagtgcatctgctactggagaagggacagagccctacttctaaagagcacgtgccggtaaccccccaatgcacgttgtctgaccagaacgcccagggccagggtcctgaaaaggtaaagaagaccactcaggtcaaagactattccttcgtcacagaagaaaatacatttgaggttaagctatttaagaacagttccggactagggtttagctttagcagggaagataacctcatcccagagcagataaatgccagcattgtgcgcgttaaaaagctgttccccggccagcctgccgcggagtccggtaagattgatgtgggagacgtgatcttgaaagtcaatggggcctcgctgaagggtctcagccaacaggaggtgatcagcgcccttagggggacagctccagaggttttcctcctgttgtgcaggcccccgccaggtgtattgccagagatcgacaccgcccttttaacacctttgcagtcgcccgcacaagtcttgcccaacagctcgaaagattcctcacaaccgtcatgcgttgagcagtccacctcgtcagacgaaaacgaaatgagcgataagtctaagaagcagtgtaagagcccgtcacgacgggattcctactccgatagctctggatccggggaagacgaccttgtgacggctcctgcaaacatctctaattcgacgtggtcctccgccctccaccaaaccctctcaaacatggtgtcccaggcacaatcacatcatgaagcccccaagtcccaagaggacacaatttgcacgatgttctattacccccaaaaaatcccgaacaagcccgagttcgaggattccaatcccagtccgctgccaccagacatggcccccggacagagttaccaaccgcagtctgaaagcgcctcttcatccagtatggataagtatcatattcaccacatatccgaacccacccgccaggagaattggacacctctgaaaaacgatcttgaaaaccatttggaggatttcgagcttgaggtggagttactcattaccctgataaaatccgagaaagggtctcttgggtttacggtcaccaagggaaaccaacggattgggtgctatgtgcacgatgtcatccaagaccccgctaaaagcgacgggcgactcaagccaggcgatcgacttataaaggtaaacgacactgatgtgacgaacatgactcacacagacgccgttaacctcctgcgggcagccagcaagacggtgaggctggtgatcggtagagttttggaattgccacggatccccatgctgcctcacctactgccagacattaccttaacatgcaacaaggaagagctcggtttctctctttgtggtggccatgattctctgtaccaggtggtctatattagcgacataaatcctagatcagtggccgccatagagggcaatctgcaactgctggacgtcattcattatgtcaatggcgtgtctacccaggggatgacgctcgaggaggtgaaccgagcccttgacatgtctttgccttccctggtgctcaaagccacaagaaacgatcttcccgtggtgcccagctcaaagcggtcagccgtatcagcccccaaatctacgaagggaaacggcagctactcggtggggtcctgcagccagcccgcactgacaccaaacgactcattcagtacagtcgctggagaggagatcaacgaaattagctacccaaagggtaagtgctccacgtaccaaatcaaggggagccctaacctcaccctgccgaaggaaagctacatccaggaagacgatatctacgacgattcacaggaggccgaagtcatacaatccctgctcgacgtggtggatgaggaggctcagaatctgctgaatgagaataatgcggctggttattcctgcgggccaggcacactgaaaatgaacggcaaactgtcagaagagcgcacagaagataccgattgcgacggttcgcccttgcccgaatacttcaccgaagccacaaaaatgaatggttgcgaggaatactgtgaagaaaaagtgaaatctgagtccctgatccagaagccgcaagagaagaaaacagacgacgatgaaattacgtggggcaacgacgagcttcctatcgagcgtaccaatcacgaggactctgataaagaccactcttttctgacaaacgatgaactggccgtgctgcctgttgtcaaagttctgcctagcggtaaatacacaggtgccaatcttaagagcgtcatcagggtgctgcgagggctgcttgaccagggcataccaagcaaagagctggagaatctccaggaactgaagccactggaccaatgcctgatcggccagacaaaggaaaaccgacggaaaaatcgatataagaatatcctgccgtacgatgcgaccagggtgccccttggagatgagggggggtacatcaacgcctccttcatcaaaatcccagtgggcaaagaagagtttgtgtacatcgcatgccagggaccattgccaactacagtgggcgacttctggcagatgatatgggaacagaagtccaccgtaatagccatgatgactcaagaggtggaaggcgagaagattaaatgccagaggtactggcccaacatcctggggaaaacaacaatggtgagcaaccgcctccggctggccctcgttcgcatgcagcagctcaaagggtttgttgtgcgggctatgaccctggaggatattcagacacgagaagtgaggcacatctctcatcttaattttacagcctggcccgatcacgacaccccatcccagcccgacgatcttctgacatttatttcctacatgcgccacatccataggtcgggaccaattatcacccattgtagcgctgggataggcagatcaggtacactgatttgcatcgatgtagtgttggggctcatttctcaggacttggactttgacattagtgatctggtgcggtgcatgagactccagaggcacgggatggtccagacagaagatcagtatatattctgttatcaggtgatcctgtacgtgcttacgaggcttcaggctgaagaagaacagaaacagcagcctcagctgctgaaatag

SEQ ID NO: 130869 - DNA, 3564 bp, synthetic construct
  misc_feature 1..3564: note = Description of Artificial Sequence: Synthetic coding sequence
  source 1..3564: mol_type = other DNA
atgcctttcgggctgaagctgcgacgcacccgaaggtacaatgtcttatcgaagaactgttttgttacccgcattaggctgctcgattccaatgtgattgaatgtactctgtccgtagagtcaacaggtcaggaatgcttagaggccgtcgctcagcggctcgaactacgcgagacgcattattttggtctttggttcctctccaagtcccagcaggcacggtgggtggagcttgagaaaccactgaagaaacatttggataaatttgctaatgagccacttctgtttttcggcgtgatgttctacgtcccgaatgtgtcgtggttgcagcaagaggctacccgatatcagtactatctgcaggtaaaaaaggacgtgctcgaggggcggttaagatgtaccttggatcaggtgatcaggctggcaggattagcagtccaggcagatttcggagattacaatcaatttgatagccaggactttttaagagaatacgttctcttccccatggatttagcccttgaagaggccgtcctagaggagttgacgcagaaggtggcacaagaacataaagcccattccggcatcttacccgccgaagctgagctgatgtacattaacgaggttgagaggcttgacggcttcggccaggagatctttccagtgaaggacaaccacggcaactgtgttcacctcggcatattcttcatgggaatttttgtgagaaaccgcatcggaaggcaggccgtgatatatcgatggaacgatatgggaaatatcacacacaacaaatccacaatcctcgtggaattaattaacaaggaagaaaccgccctattccatactgacgacattgaaaacgcaaaatacataagtcgactgttcgcaacccgtcacaaattctacaaacaaaataaaatttgtaccgaacagagcaactctcctccccccattcggcgtcagccgacgtggagccgcagttccctgcctcgccagcagccctacattctcccaccagtgcacgttcagtgcggagaacactattctgaaactcacacgagccaggactccatttttcatgggaatgaagaagcgctgtattgtaacagtcataattctttggacctcaactatctgaacggcaccgttacaaatgggtccgtgtgctctgtacacagcgtcaatagtctgaattgcagccaatccttcattcaggctagtcccgtgtcaagcaatctctccattcctggatccgacattatgcgggctgattacattccgagccatagacacagcgctattatcgtgccaagctaccgcccgaccccagactacgaaacggttatgcgacaaatgaaaagaggaattctgcataccgatagccagtctcagtcgctgcgcaatcttaacatcatcaacacccacgcctataaccaaccagaggatctggtctactcacagcctgagatgcgggaacgtcacccttatacagtaccgtatgggccgcaaggcgtgtacagcaacaaacttgtgtccccctccgatcagagaaatccaaagaataacgtggtgccatcaaagccaggcgcctcagcaataagccacacagtgagtacacccgaactggcaaatatgcaattgcaaggctcacataactattccactgcacatatgctcaagaactatctatttaggcctccacctccgtacccgcgacctcggcccgctacatcaacgccagaccttgcctcccatcgacacaaatacgttagtggatcctcccctgacctggtaacccgaaaagtgcaactgagtgtcaaaacatttcaggaggactcttcccccgtggtacatcagagcctacaggaggtcagcgagccactcacagcaaccaaacaccatggaaccgttaataagagacactctctggaagtcatgaactccatggtgcgcggcatggaagctatgacgctgaaaagtctccatttgcccatggcgcgtagaaacaccctccgggagcagggtccacccgaagagggatccggctcacacgaggtgccccagctccctcagtatcaccacaaaaaaacattttccgacgccaccatgttgatccattcctctgaatccgaagaggaggaggaggaggcccctgagtccgtgccacaaatcccaatgctccgggagaagatggagtatagcgcgcagctccaggcagcgttggcaagaatccctaacaagccaccgcccgagtaccctggaccccgcaagagcgtgtccaatggcgcgttgcgtcaggaccaggcatcattgcccccggccatggccagagctcgcgtgcttcggcatggtccagcaaaggctatctcgatgagccgtacagaccctcctgccgtgaatggagcttctttggggccctcaatatccgagccggacctcacaagcgtaaaggagagggtcaagaaagaaccggtgaaggaaagacccgtttccgaaatgttttctttagaggattccatcatcgagcgggagatgatgatcagaaatctggagaagcagaagatggccggcctggaggcacaaaaacggcccctgatgttagctgcgcttaacgggctgagcgttgcccgggtctccggtcgcgaagaaaacagagtcgacgccacccgcgtccctatggatgagagatttcggacccttaaaaagaagctggaggaagggatggttttcaccgaatacgaacagatcccgaagaagaaagccaatggtatattcagtacagcagccctgccagagaacgccgaaagatccaggattcgtgaagttgtgccttacgaggagaaccgcgtggaactcattccaactaaggaaaacaataccggctacatcaatgccagccacatcaaggtcgtagtggggggcgccgagtggcattacattgccacacaggggcccctgccacacacctgccacgatttctggcaaatggtgtgggaacagggcgtgaacgtgatcgctatggttaccgccgaagaggagggcgggaggacgaagtcacaccgctattggccaaagctgggaagcaaacacagttctgcaacgtacggcaagttcaaggtcactacaaagttccgtaccgattctgtctgctacgccacaacagggctgaaagtgaagcatctgctgtcagggcaagagagaacggtgtggcacctgcagtacaccgattggcccgatcacggctgcccagaagacgtccagggattcctgtcatacctcgaagaaatccagtcagtgcgacgccatacaaactcaatgctcgaaggaacaaagaaccggcatccacccatagttgtgcattgcagcgcgggggtcggtagaaccggagtattaatcctgagtgagctgatgatctattgtttggagcacaacgaaaaggtggaggtgcccatgatgttaaggctccttcgtgagcagagaatgtttatgatacagacaattgcccaatacaaattcgtttatcaagtgctgatccagttcctgcagaactcaaggctgatctag

SEQ ID NO: 130870 - DNA, 636 bp, synthetic construct
  misc_feature 1..636: note = Description of Artificial Sequence: Synthetic coding sequence
  source 1..636: mol_type = other DNA
atgccattcggtctaaagctgagacggaccaggcggtataatgttctttccaagaactgtttcgtgactaggattcggttactggactcgaacgtcattgagtgtacactttcagttgaatccaccggtcaggagtgtcttgaagccgtcgcacagcgactggaactgagggaaacccactacttcggcctgtggttcctgtctaagtcccagcaggcccgctgggtggagcttgaaaagcctttaaagaaacatctggataagttcgctaacgaacccctgctgttctttggagtaatgttctatgtgccaaatgtgtcatggctccagcaggaggcgacaaggtaccagtattacctacaagtgaagaaggatgttcttgaggggcgcctgcgctgcacactcgatcaggtgattcgcctcgccggcctcgccgtgcaggccgacttcggtgactataatcagttcgacagtcaggacttcctgagagaatacgtgctatttcctatggacctcgcactggaagaggctgttctggaagaactgacccagaaggtggcgcaagaacataaggctcaccgtaccatcatggagaccgtctacacattagctttctctttgtggggcttttcgtag

SEQ ID NO: 130871 - DNA, 1383 bp, synthetic construct
  misc_feature 1..1383: note = Description of Artificial Sequence: Synthetic coding sequence
  source 1..1383: mol_type = other DNA
atgtctaggtccctggacagcgcgagatctttcctggaacgattggaagcgcggggaggccgcgagggcgctgtcctcgccggtgaattctcagatattcaagcctgctctgctgcgtggaaggcagacggcgtatgctccaccgtagccggcagtcggccagagaacgtgcgcaaaaatcgctacaaggacgtactcccatatgaccagacacgtgttattctctctctgctccaagaagagggtcacagtgattatatcaatgggaactttattcggggcgtggatggcagtttggcgtatattgctactcagggtccgttgccacacactttgctggacttctggcgcttagtgtgggaattcggggtgaaggttatcctgatggcctgccgcgaaatagaaaatggccgtaagcggtgcgagagatattgggctcaggagcaggagccccttcagaccgggctgttctgtataactttaataaaagaaaaatggttgaacgaggatattatgctgcgcacgctcaaggtcaccttccagaaggagtcccgttctgtgtaccagttacagtacatgagctggcctgacagaggcgtgccgtcctctccagaccacatgcttgctatggtcgaggaggcacgtaggctccagggatccggacctgagcccctgtgtgtccactgcagtgctggatgcggacgcacgggcgtcctgtgcacagttgattacgtccgccaactgcttctgacccagatgatccccccagacttctccctttttgatgtggtcttaaagatgcggaaacagcggccagctgcggttcagacagaggaacaatatcggtttctgtaccatacagtggcacagatgttttgttccactttacagaacgcttcacctcactaccagaatatcaaggagaactgtgccccattgtatgacgacgcgctcttcttgagaacccctcaggctttgctcgccatcccgcgacctcctggaggggtgctgaggtccatctccgtccccgggagtccaggtcacgctatggcagatacctatgctgtcgtccagaaacggggcgcccctgcgggagccggctcgggaacccagaccggtaccggcaccggaacaggcgcgcgatctgccgaggaggcccctctgtattcaaaggtgacaccccgggcccagaggcctggagcccatgccgaggatgccagggggacacttccaggacgtgtgcccgcggaccaaagcccagccggctcaggggcctatgaagatgtggctgggggggctcaaacagggggcctcggctttaacctccgcatcggcagacctaaaggcccccgggacccgcctgctgaatggactagggtctag

SEQ ID NO: 130872 - DNA, 1248 bp, synthetic construct
  misc_feature 1..1248: note = Description of Artificial Sequence: Synthetic coding sequence
  source 1..1248: mol_type = other DNA
atgcccacaacaatcgagagggagttcgaagaactcgacacacagcgtagatggcagcctttgtacttggagataaggaacgagtcccatgactacccccaccgcgttgctaaatttccagagaaccggaacagaaaccggtaccgcgatgtctctccttacgaccactcccgagtgaaactgcaaaatgctgagaatgactacatcaatgcgtccttagtggacatcgaagaggctcaacgctcctatatcctgacacaaggccctttacccaacacctgctgtcacttctggctgatggtctggcagcagaagacaaaggctgtcgtgatgctcaacaggattgttgaaaaggaaagcgtaaaatgcgcacagtattggcccactgatgaccaggaaatgctgttcaaagaaacaggattcagcgtgaaactgctgtccgaagacgtgaagagctactataccgtccatctgcttcagttggagaatatcaacagcggagagaccagaaccatatctcactttcactatactacgtggccagattttggggtgccagagtccccagcatctttcctcaacttcctgtttaaagtgagggagagcgggagcctcaatcccgaccatggcccggcagtgatccactgtagtgctggtatcggccgctcaggcacctttagcctcgtggacacgtgtctggtgctgatggagaagggcgacgacatcaacattaaacaagtcctgcttaatatgcggaaatatagaatgggattgattcagactccggaccaactgagattctcttatatggccattattgaaggcgctaaatgcattaagggagattcatcaattcagaagaggtggaaggagctctccaaagaggacttgagtccagccttcgaccattctcccaataagataatgacagagaagtacaacgggaatagaattggcctggaggaagaaaaactgacaggcgacagatgtacgggactgtcatcgaagatgcaggataccatggaggagaactctgagagtgcccttcgcaaaaggattcgggaagatcgcaaggctaccaccgctcaaaaagtgcagcagatgaaacagcgactgaatgagaatgaacggaaacggaaacggtggttgtactggcaaccgatcttgactaaaatggggtttatgtcagtgattctggtaggagctttcgtgggatggacgctgtttttccaacagaacgccttgtag

SEQ ID NO: 130873 - DNA, 1164 bp, synthetic construct
  misc_feature 1..1164: note = Description of Artificial Sequence: Synthetic coding sequence
  source 1..1164: mol_type = other DNA
atgcctactacaatagaacgggagttcgaagagttggacacacaaagacggtggcagccactgtatctcgagattagaaatgagagccacgactacccccaccgcgtggccaagttccctgagaaccggaacagaaaccggtatagagacgtgtcaccatacgaccattccagggtgaaactgcagaacgccgagaatgactatattaacgcatctctggtcgatatcgaagaggcccagaggtcttacattcttactcagggtcccctgcccaacacctgttgtcacttctggctaatggtatggcagcagaagacaaaggccgttgttatgttgaaccgtatcgtcgagaaggaatcggtaaaatgcgctcagtattggcccactgatgaccaggagatgctcttcaaagagacaggattcagcgttaagctgctcagcgaggacgtgaaaagctattacaccgtccatctgctgcagttggagaacattaactccggcgaaacccggacaatcagccattttcactataccacatggccagacttcggcgtgcctgaaagcccagcctccttcctcaatttcctgttcaaggtgcgcgaatctggctctctgaaccctgatcacgggccagcagtgattcattgcagcgcaggtattggaagatcaggaaccttctctctggtagatacatgcttggtgctgatggaaaagggtgatgacattaacatcaagcaggttctgcttaacatgagaaagtacagaatgggactgatccaaactcctgatcaactgcggtttagttatatggcaatcatcgagggtgctaagtgtattaaaggagactccagtattcagaagcgatggaaagaactgtccaaagaggacttgtcgccagcctttgaccattctcctaacaaaatcatgacagaaaaatataatggcaaccgtattggcctggaggaggagaagctcacaggagatagatgtaccggattgtcatccaagatgcaggataccatggaagagaattctgagtcagccctgcggaaaaggatccgagaggatcgaaaagccactactgcccagaaagtgcagcagatgaaacagcgattgaacgagaatgaacggaaaagaaagcggcctcggttgacagacacatag

SEQ ID NO: 130874 - DNA, 1179 bp, synthetic construct
  misc_feature 1..1179: note = Description of Artificial Sequence: Synthetic coding sequence
  source 1..1179: mol_type = other DNA
tgtcagcaggagttcaggatgtatggtaaggacggcaagggcacaaactggatggatcaaggcgatatggagtgtagaatgcaggagattgacgaccacagccgagtcaagctgcaaaatgccgaaaacgattacattaacgccagcctcgtcgacattgaggaggctcagcgaagctatattctgacccagggccctctgcccaatacatgctgtcatttctggctgatggtatggcagcagaagactaaagcagtggtaatgctcaaccgaattgttgaaaaagagtccgttaagtgtgcacagtactggccgacagacgatcaagagatgctattcaaagagacaggctttagcgtcaagctgcttagtgaggatgttaaatcatactatacagttcacctcctgcaattggaaaatatcaactctggagagaccagaacgatctcacactttcactatactacttggccagatttcggcgtccctgaatcaccggcatccttcctgaacttcctatttaaggtgagggaatcagggagcctcaatccagatcatggacctgcagtgattcactgttcagcaggaattgggaggagtggtactttctccctggtggatacgtgtcttgttctcatggaaaaaggagacgatataaacatcaaacaagtacttctaaatatgagaaaatatcgaatgggcctgatccaaacaccggaccaactgaggttcagttacatggctattattgagggagcaaaatgcataaagggagattcttcaattcaaaaacgttggaaggaactgtcaaaagaagatcttagcccagcctttgaccattctcctaataagatcatgaccgagaagtataatgggaatagaatcgggctcgaggaggagaagctgaccggcgacagatgtaccggcctgtcttcaaaaatgcaggacacgatggaggagaattccgagagcgccctgcgtaagcggatcagagaagaccgaaaggccacaactgcccagaaggttcagcagatgaagcaacgcctcaatgagaatgaaaggaagcgaaaacgatggctgtactggcagcctatactgacaaagatgggcttcatgagtgtgatcctggtaggggcgttcgtgggatggactctgttcttccaacaaaatgcgctgtag

SEQ ID NO: 130875 - DNA, 1062 bp, synthetic construct
  misc_feature 1..1062: note = Description of Artificial Sequence: Synthetic coding sequence
  source 1..1062: mol_type = other DNA
atgcccaccaccattgaacgcgaattcgaagaattggacacccagcgacggtggcaacccctgtatctggagatcaggaacgaaagccacgactatccacatcgagtagccaagttccctgaaaaccggaaccgcaacaggtatcgtgatgtatctccgtacgaccactcacgcgtgaagctgcagaacgcagagaacgactatatcaatgccagtctggtggacatcgaagaggcccagcggtcctacatcttgacccagggaccactgcctaacacttgttgtcacttctggctcatggtgtggcagcagaaaaccaaagccgtggtgatgctcaatagaatcgtggaaaaggagtcagttaagtgcgcacagtattggcccactgatgaccaggaaatgctgttcaaagaaaccgggttcagcgtgaaactgttgtccgaagatgttaagagctactataccgtacatttactccagcttgaaaacattaatagcggcgagacacggacgatctcacatttccactacacaacgtggccagatttcggtgtgcctgagtcacccgcctcctttctaaatttcctgtttaaggtgcgagaaagtggaagtctgaatcccgaccacggcccggctgtcatccactgcagtgccggaatcggacgctctggcacgttctcattggtggatacttgcctggtgttgatggagaagggggatgatattaatattaagcaagtgctgttgaacatgaggaaataccggatgggtttgatccaaacccccgaccagctccggttctcttacatggccattattgagggcgccaagtgcattaaaggcgatagctccatacaaaaaagatggaaagagttatctaaagaagatctctctcctgctttcgaccattcgccaaataagattatgacagaaaaatacaacggaaaccgtattggcctcgaggaagagaagctcacaggcgataggtgtacgggtctatcctcaaaaatgcaggacacaatggaagagaactcagagcgcccacgcttgacagatacctag

SEQ ID NO: 130876 - DNA, 2424 bp, synthetic construct
  misc_feature 1..2424: note = Description of Artificial Sequence: Synthetic coding sequence
  source 1..2424: mol_type = other DNA
atggaccagcgagagatcctgcagaagtttttagacgaagcacagagcaagaagattacgaaggaggagtttgcgaacgagttcctgaagctcaagaggcagtctacaaagtataaagctgacaagacatatcctactaccgtggcagaaaagccaaaaaatatcaaaaaaaatcgctataaggacatactgccatacgactactcccgagtcgagctaagcttaatcacgtccgatgaagatagcagctacatcaacgcgaattttatcaagggcgtgtacggacccaaggcatacatcgccacgcaaggaccgctgagtacaacgctcctcgacttctggcgtatgatctgggagtacagtgtgctcattattgtcatggcatgtatggaatacgaaatggggaagaagaagtgcgaacgctattgggcagagccgggagagatgcagctagagtttggtccgttctccgtgtcgtgtgaagctgagaaacggaagtccgactacattatacggaccctaaaagtgaaatttaacagcgagacgaggactatttaccagtttcattataaaaactggcccgatcatgacgttccctcttccatcgatcccattcttgagctcatttgggacgtgcggtgctaccaggaagatgacagtgtccccatatgtatccattgttcggccggctgtggtcgcactggtgtcatatgtgccattgactatacatggatgctccttaaggatggtattatccctgagaactttagcgtcttctccctgatacgcgagatgcgcacacaaaggccatcactcgtgcagacccaggagcagtatgaactcgtctacaatgccgtactggaactatttaagcggcagatggatgtcattcgggacaaacactctggaactgaaagtcaggccaaacactgcattccggaaaagaatcacacactccaagcagactcttattcacctaatctacccaaaagcacaactaaggccgccaaaatgatgaaccaacaacgaacaaaaatggagatcaaagagtcgtcaagcttcgacttcaggacctccgaaatcagcgccaaggaagaactcgtgcttcatcccgctaaatcttcaaccagctttgatttcctggaactcaactattccttcgataagaatgctgataccaccatgaagtggcagacaaaagccttccctattgtgggagagccacttcagaagcaccagtctttggatctgggaagcctgcttttcgaaggctgcagcaattctaaaccagtcaacgcagcaggccgatatttcaactccaaggtgcccatcacgaggaccaaaagtaccccctttgagctgatccagcaacgggaaaccaaagaggtggattccaaggagaactttagctatctggagtcccagcctcacgactcatgcttcgtggagatgcaggcccagaaagtgatgcatgttagcagtgcagagctcaactattctctaccatatgacagcaaacatcagatcaggaacgcatctaatgtgaagcatcacgactcctcggctctgggtgtgtacagttacattcctctcgtggagaatccctacttcagttcatggccgccctcaggcacaagcagcaaaatgagtttagaccttcccgaaaaacaggacggcaccgtcttcccgtctagcctcctgcctacctcgtccacatcattatttagctactataacagtcatgatagcctttcactgaactcaccaacaaatatcagctcccttctgaatcaggagtctgcggtgctggctaccgcaccacggatcgatgatgaaatcccaccgccgctacccgtgtggacaccagaaagttttatcgtcgtggaagaagccggtgaattttctcccaacgtgccaaaatccctgagctctgcggttaaggtgaaaatcggtacctccctggagtggggcggaacatcagaacccaagaagtttgacgattctgtgatattgagaccttccaaatctgtcaaactgagaagtcctaaatccgagctgcatcaggatcgatcaagcccaccaccccccctgcctgaacgcacactagagagcttttttcttgcagatgaagactgtatgcaggcccagagcatcgagacatactccactagctaccccgacactatggagaattctactagcagtaagcagacactgaagacgcccggcaagagctttacaaggagtaagtctttaaagatcttacgcaatatgaaaaagtcgatttgcaacagctgtcccccaaataaacccgcagaatctgttcagtccaataattcctcttccttcctgaacttcggcttcgccaatagatttagtaagccaaagggccctcgaaatcctccccctacttggaacatctag

SEQ ID NO: 130877 - DNA, 1692 bp, synthetic construct
  misc_feature 1..1692: note = Description of Artificial Sequence: Synthetic coding sequence
  source 1..1692: mol_type = other DNA
atgttgctgaaggatggcattattcctgaaaacttcagcgtgttttctctgatccgagaaatgaggactcagagaccctctttggtccagacacaggaacagtatgagctagtgtataatgcagtgctggagttgtttaagcgtcagatggatgtcatcagagataaacatagcggaaccgagagccaggccaaacactgtattccagagaagaaccacaccttgcaagcggactcctatagcccaaatttgcctaagagcaccacaaaggctgccaaaatgatgaatcaacagagaaccaagatggagatcaaagaaagctcaagttttgacttcaggaccagtgaaatttcggctaaggaagaactggtgctccacccagccaaaagcagcacttcgttcgacttcctcgagctgaactactctttcgataagaatgcggacaccacaatgaaatggcagactaaagcattcccaatcgtgggcgagccacttcagaaacaccagtccctcgatctcgggagtctcctatttgaggggtgttcgaactctaagcctgtaaatgcagcagggcgctattttaattccaaagtgcctatcacccgaacaaagagtaccccttttgagctgattcagcagcgggagacaaaagaagtcgacagtaaagagaacttttcttatcttgaaagtcaaccccacgactcatgcttcgtagaaatgcaagcccagaaggttatgcatgtgtcttctgctgaactgaactactctctaccttatgactcaaaacaccagatccgaaatgcctcgaacgttaagcatcacgatagtagtgcacttggggtatatagttatataccactcgtggaaaacccatatttctctagctggccacctagcgggacaagctctaagatgagtctcgatctgcctgagaagcaggatgggaccgtgtttcctagcagtctactgccaacttctagcacaagcctgttctcttattacaatagccacgattccctgtccctgaattcacccactaatatctctagtcttctgaaccaggaatccgccgttctggcgaccgcaccacggatcgacgatgagatcccaccccctctgcccgtctggactccagagtcttttatcgtagtggaagaggctggggaattctcaccaaacgtgcccaagtctctctcctctgcggtaaaggtaaaaatcggcacgagtctcgaatggggagggacctcagaaccgaagaaatttgatgactcagtaatcctgaggccctccaagtctgtgaagctccggagcccaaagagtgaacttcaccaggatagaagcagtccacctcctcctcttcctgagcggacccttgaaagttttttcctcgctgacgaggactgtatgcaagcgcaatcaatagaaacctattccacaagttaccccgacacaatggagaacagtaccagttccaagcagacgctgaagacacccggtaagtcgtttacgaggtcaaagtcactcaagatcttacgcaatatgaagaaaagtatttgtaactcgtgtccacccaacaaacccgccgagagcgtccagtcaaacaattcctcttcctttctgaatttcggattcgccaatcgtttcagcaaaccgaagggaccccgaaaccccccaccaacgtggaacatttag

SEQ ID NO: 130878 - DNA, 4911 bp, synthetic construct
  misc_feature 1..4911: note = Description of Artificial Sequence: Synthetic coding sequence
  source 1..4911: mol_type = other DNA
atggaggcagttcctcgcatgcccatgatttggttagacctaaaagaggccggtgatttccactttcaacccgccgtgaagaaattcgtgctcaaaaactacggcgaaaatcctgaggcctataatgaggaactgaagaagctcgaactgttgaggcagaatgccgtgagggttccccgggacttcgagggctgtagcgttttgcggaaatacctgggccaacttcattacctccaatcaagggtgcccatggggagcgggcaggaagctgcagtccctgtgacatggacagagattttcagcggaaaaagcgtggcccacgaggatatcaagtatgaacaggcctgtatcctgtataatctgggcgccctgcacagtatgctgggcgctatggacaaaagagtttcagaggaaggcatgaaagtctcctgtacccacttccagtgtgccgcaggcgcatttgcgtatctcagagagcacttcccccaggcatactcagtcgatatgtcaagacagatcttgacactcaatgtgaacttaatgctggggcaggctcaagaatgcctccttgaaaaatccatgctcgataaccgcaagtccttccttgtcgccaggatctccgcccaggtggttgattattacaaagaggcctgtagagcactggaaaatcccgacactgcaagtctgctcgggagaattcagaaggattggaaaaagttggtgcagatgaagatttactatttcgcggctgtggctcacttgcacatgggaaagcaagccgaagagcaacagaaattcggggagagagtggcctacttccaatctgcattagacaagttaaatgaagctatcaagcttgccaaagggcagcctgacaccgtgcaagacgccctacggttcacgatggacgtcatcgggggaaagtataactctgccaagaaagataacgactttatctaccacgaagctgtgccggccctggataccttgcagcctgtcaaaggagctccactggtaaaaccgttgcccgtgaatcccacggatcccgcagtgactggcccagatatcttcgccaaattggtacctatggcagcccacgaagccagttccctgtactctgaggaaaaagcaaaactgcttagggaaatgatggcaaaaattgaggacaagaatgaggttttggatcagttcatggattccatgcaactcgacccagagaccgtggataacctggacgcctactcccacatcccaccccagctcatggaaaagtgcgctgccctgagtgtgcggccagacaccgtaaggaatctggtccagagcatgcaggtgctatcaggagtgttcactgacgtggaggcatccctgaaggatattcgagacttactcgaggaggatgagctactggagcagaaatttcaggaggccgtcgggcaagcaggagccatctccataacctctaaggcggaattagctgaagtgagaagggaatgggcgaaatatatggaggtgcatgagaaagcttcctttactaactctgaactacaccgcgcaatgaatttacatgttggcaacttgaggttgctttcaggtcctctggatcaggtgcgcgccgcactgccaacgcccgcactctccccagaagacaaggccgttctgcagaatctcaagcgcattctcgccaaagtgcaagagatgcgcgatcagcgggtttcccttgagcagcagctgagggagctcattcagaaggacgatatcactgcaagtctggttaccaccgatcacagtgagatgaaaaagctttttgaggaacagttaaagaagtacgaccagctgaaagtttacctcgaacagaaccttgcagctcaggatagggtgctgtgcgctctcaccgaagctaatgtgcagtacgcagcagtcaggcgggttctctctgacctagaccagaaatggaattctaccctgcagaccctggtcgcttcttacgaggcttacgaggatttaatgaagaagtcccaggaggggcgcgatttctatgcagatctggaatctaaagtcgccgccctcctcgaacggactcagagcacttgccaggcccgcgaggctgctaggcagcagctacttgacagggagctgaaaaaaaaaccgccccctagacctaccgcccctaagcccctgctgcctagacgcgaagaatctgaggcggtggaagctggggaccctccagaggagctgaggtccctccccccggatatggtggccggacctagactgcccgacacattcctcggctccgccaccccactgcactttccccccagtccttttccgtcttccaccgggccaggtcctcattaccttagtggcccattaccacccggaacgtattcaggacctacccagctgatccaaccgagagcccccggcccacacgctatgcccgtggctcctgggcctgcactctaccccgcccctgcttacactccagagcttggactggtgcctagaagctctccacaacatggggtcgtatccagcccttacgtgggcgtcgggccggcaccccccgtggccgggctgccatccgcgcctccacctcagttttctgggcccgagcttgccatggcggtccgacccgccacaacaaccgtggattctatacaagcaccaatcccctcccacacagcgcctagacccaatcctacaccagcccctcccccgccatgtttcccagttccacctccacagccccttccaaccccttatacgtaccctgccggggccaagcagccaattccggcccaacatcacttttccagtgggatcccagcaggtttcccagcccctaggatcggcccacagcctcagccccacccccaaccgcaccccagccaagcctttgggccacagcccccccaacagcctctgcccttgcaacacccccacctatttcccccacaggcgcccggcttacttcctcctcagtctccctacccttacgcgcctcagccaggtgttctcggacagcccccgcctccactgcacactcagctctatcccgggcctgcgcaggacccacttccagcacactctggcgcactgcccttcccctcgcctggacctccccaacctccacatccccctctcgcctatggacccgccccatcgacgcggccaatggggccacaggcagcacccctgacaatccggggcccatctagcgccggccagtcaacgccatcccctcatctagttcccagcccagccccatccccgggacctggtcccgtcccaccacgccccccagccgcggaaccccccccttgccttcgtcgcggtgccgcggctgcagatttactgtcttccagtccggaatcacaacacggcggtacccaatcccctggcggcgggcagcccttgctgcagccaacaaaggtcgatgccgcagaagggcgtagaccacaggcgctgcgtctaattgaaagagatccctatgagcaccctgagagactgcggcagcttcagcaggagctcgaggccttcagaggacaactgggagacgtgggggccttggacactgtgtggagggaacttcaagacgcccaagagcatgacgctagaggaaggtcgatcgccatagcgaggtgctactccctcaagaaccgccatcaagatgtgatgccgtacgactccaaccgggtggtcctgcgtagtgggaaggacgattacattaatgcctcatgtgtggaaggactatccccttactgccctcctctcgttgctactcaggctcccctgcctggcactgccgcagatttttggctgatggttcacgagcaaaaagtgtccgtgatagtcatgctggtgagtgaagccgagatggagaaacaaaaagttgcaaggtattttcccaccgagcgcggacagcctatggtgcatggtgctctcagtctagcgttgtcgtccgtgcgctcaactgaaacccatgtagagagggtactgagcctccagtttagagaccaatccctgaaaaggagtctggtgcacttgcactttccgacttggccagagctcggactccctgactccccatctaatctcctgcggtttatacaggaggtgcatgcccactacctgcatcagcggcccttgcacactccaatcatcgtccattgcagctcgggcgtcggccggactggcgcctttgccctgctgtacgccgctgtgcaagaagtggaggccggcaacggtattcctgagttgccacagctggttcgcaggatgcggcaacagcgcaagcacatgctgcaggagaagctacacctcagattttgctatgaagccgtggtaagacacgtagaacaagtgctgcagcgacatggcgtgcccccaccttgcaaacctctagcttccgccagtatctctcagaagaatcacctgccacaggacagccaggacctggtgttggggggggacgtgcctatttcctctatccaagcgacgatcgccaagctgagcattcggcctccgggaggactagagtccccggtggcctcactgcctgggccagcggagccgcccgggctcccaccagcctcgcttcccgagtctacgcctattcctagttctagtccccctccccttagctctccgctgcctgaggcccctcaacccaaggaagaaccaccagtgccagaggccccaagttccgggccaccctcaagctcactggagctcctagcatccttgacacctgaggcattttcacttgactcctcactgaggggcaagcagcgtatgtctaaacataacttcttgcaagctcataatggccagggactgcgggccacgcgtccttcagacgaccctctgtccttactggatcccctgtggaccttgaacaagacctag

SEQ ID NO: 130879 - DNA, 2739 bp, synthetic construct
  misc_feature 1..2739: note = Description of Artificial Sequence: Synthetic coding sequence
  source 1..2739: mol_type = other DNA
atggaagcagttcccagaatgccaatgatttggttagatctcaaggaagcaggagactttcatttccagcctgctgtgaaaaagaatgccgtgcgtgtgcctagagactttgagggttgtagtgtgcttcggaagtaccttgggcaactacattacctgcagtctcgcgttcctatgggcagcggacaggaagctgccgtacctgtgacgtggacagagattttctcagggaagtcagtggcgcatgaagacatcaaatatgaacaagcatgtatcctgtataacctgggggctctgcacagtatgcttggcgcaatggacaagcgagtcagtgaggagtgtgctgctggtgccttcgcatacctgagggagcatttccctcaagcttacagcgtagacatgtcacggcagatcctcacactcaacgtgaatcttatgttggggcaggctcaggagtgtctgctcgagaagagcatgctggacaacagaaaaagctttttggtggctcggatttctgcccaggtggtggactattataaagaggcttgccgtgcgctggaaaatcctgatactgcaagcttactcgggcggatccagaaggactggaaaaagctcgtacaaatgaagatatactatttcgccgctgtcgcccacctgcacatggggaaacaggcagaagagcagcagaagtttggagaacgagtcgcttatttccagtccgcactggacaagttgaatgaggccattaaactcgccaaaggccaacctgataccgtgcaagatgcgctgaggtttacaatggacgtgattggaggaaagtacaattctgcaaagaaggataacgactttatttaccacgaagctgtgccggctctggacacattgcagcctgtcaaaggcgctcctctggttaagcctttaccagtcaacccaaccgatcccgctgtgacgggccccgacatcttcgccaaattagtcccgatggcagctcacgaagccagcagcctgtacagcgaggagaaggcaaagttactgagggagatgatggctaaaatagaagataagaacgaggtcttggaccagttcatggactctatgcaactggacccggagaccgtggacaatttggacgcatactcacatattcccccacagctcatggagaagtgcgcagcactctctgtgcggcctgacaccgtgagaaatctggtgcagagcatgcaggtcctgagcggggttttcacagacgtggaggcttctttgaaagatatacgagacctcttggaggaggacgaactcctcgagcaaaagttccaggaggcagtgggccaggccggcgccatttccataacgtccaaggccgagctggcggaggtgagaagagagtgggcaaaatatatggaggtccatgaaaaggcctcctttacaaattctgagctgcatagggctatgaatctgcacgtcgggaatctccggttgctttccggtccattagaccaggtgcgggccgccttgccaaccccagccctctcacctgaagacaaagctgttctgcagaatcttaagagaatcttagccaaggtgcaggaaatgcgagaccagcgggtctcgttggagcagcagctgagggagctcattcagaaggacgacattacggcctctttggtcaccactgaccattctgagatgaagaaactttttgaggagcaactgaaaaagtatgaccagcttaaagtgtacctcgagcaaaacctagcagctcaggacagggttctgtgtgccctgactgaagcaaatgttcagtatgctgcggttcggcgggtgctaagcgacctggatcagaagtggaactccacacttcaaacccttgtcgccagctatgaggcttacgaggatctgatgaaaaagagtcaggaggggcgggatttttatgcggacttagagtctaaagtggccgcacttctcgagcgaacccaatctacctgtcaggccagggaagccgcgaggcaacaattgctggaccgagaactgaagaagaagccccctccccgtcctacagccccaaagcctttattaccccggcgcgaagaatccgaagctgtggaagccggggaccctccagaggagttgcgttcacttcctcctgacatggttgccggacccagactgcccgatacttttctggggtctgctacccctctgcattttcccccgtcaccttttccatcaagtactgggccagggccacattatttatccggaccattacctcctgggacctactctggtcccactcaattgatccagccacgggcacccggcccccacgcaatgcccgttgcacccggtcccgccctctaccctgcaccgtcctctgcaccgtcttttacgtccgtttgggcgtcggcaccaacggctgcgccctccactccagcatcaacaagtctgcccacgcctggtcctaggaccccaacacctaccattcctctgccactctgtcccagcgcgtggggacccggggccgcagcaacgccaccaacgcaccctgctctgccacgttcacgctcccgtccctctgcctcacccttaaggggcagtgcattccctcagccttgggcacctagcgccagcccttctccaaccgggatttggagctgccctttctatcagacacatggacctcccgggagtccatcctaccactctagggctctggtgtgttggccagtccacccatag

SEQ ID NO: 130880 - DNA, 1698 bp, synthetic construct
  misc_feature 1..1698: note = Description of Artificial Sequence: Synthetic coding sequence
  source 1..1698: mol_type = other DNA
atgaattacgagggggcaaggagtgagcgagaaaatcatgcagccgacgattctgagggtggcgcccttgacatgtgctgtagcgagcggctgccaggcttgccgcagccaattgtcatggaagcactcgatgaggcagagggcctgcaggatagtcagcgggagatgcccccccctccccccccaagcccaccaagcgacccggctcagaagcccccaccgcgaggtgctggctcccactccctcaccgtgcggtccagtctctgcttgttcgctgcttctcaattccttctggcctgtggggtgctctggttctcaggttacggacacatctggagtcagaacgccaccaacctcgtgagcagtttgcttaccctgctgaaacagctggagccgactgcatggctcgattctggcacttggggagtgccgtcccttctgctggtgttcctgtcggttggcctggtattggtaacgacactagtttggcatctgttgcggacacctcctgaacctccaacccccctgccacctgaagacaggcgacagtccgtgagcaggcagccgagctttacatattcagagtggatggaggaaaaaattgaggacgatttcctggacctagatccggtacctgagacacctgtcttcgattgcgtgatggatataaaacccgaggccgaccctactagtctcaccgtaaagtctatggggcttcaggagcggcgaggcagcaatgtgtctcttaccctcgacatgtgcactcccgggtgcaacgaagaagggtttggctaccttatgtcccctcgggaagaatccgcacgggaatacttgttgtctgctagcagagtgttacaggccgaagagttacacgaaaaagctctggacccattccttctgcaggccgaatttttcgagataccaatgaatttcgttgaccccaaggagtacgatattcctgggctcgtgcggaagaataggtacaagaccatactgccaaatccccatagccgggtctgcctgaccagccccgatccagatgaccctctgtcctcatatatcaatgctaattatattcgcgggtacggtggtgaagaaaaagtatatattgcaacccagggtcctatagtgtccaccgtcgctgatttttggcgtatggtctggcaagagcacactccaattatcgtaatgattactaacattgaggagatgaatgaaaaatgtacggaatactggcccgaagaacaggtggcctacgacggcgtggagattaccgtccagaaagtaattcatacggaggactatcgacttcgcctcattagtctcaagtctggtactgaagaaaggggactaaaacactactggttcacaagctggcctgaccagaagacaccggatagggcgcctccattgctacacctggttcgggaggtcgaagaggcggctcaacaggaagggcctcattgtgccccaatcatcgtgcattgctctgcagggatcggcagaacaggttgcttcattgccacctccatatgttgtcagcagcttagacaggagggggtggttgatattctgaaaaccacttgtcagctgcgacaggatcggggcggcatgatccagacgtgcgaacagtatcagttcgtccaccatgttatgagcctgtatgaaaagcaactcagccaccaaagcccagaatag

SEQ ID NO: 130881 - DNA, 1602 bp, synthetic construct
  misc_feature 1..1602: note = Description of Artificial Sequence: Synthetic coding sequence
  source 1..1602: mol_type = other DNA
atgaactacgaaggggccagaagcgagcgcgagaatcacgcggcggacgactctgagggaggtgcccttgatatgtgttgtagtgaacgcctgcccggcttgccacagcccatcgtcatggaagccctagacgaagcggagggtctgcaagactcacagagagagatgcctcccccgccgccaccctcaccaccctctgatccggcccagaagccccccccccgaggcgcgggcagccacagcctcacggttcggtctagcctctgcttgtttgccgcatcccaatttctcttggaaccaacggcttggctcgattctgggacctggggagtgccatccctcctcctcgtctttctctcagtcggtctggtactagtgacaaccctagtctggcatcttctcaggaccccccccgaacctcccacaccattacctcctgaagatcggcgacaatctgtctcccgacaaccgtccttcacttactctgagtggatggaggaaaaaatcgaagacgacttcctggatttggatcccgttcccgagactcctgtatttgattgcgtcatggacattaagccagaagccgaccccacaagcttaacggttaaaagtatgggtttacaggagaggcgggggagtaacgtgtcccttacactcgacatgtgtacacccggatgtaatgaggagggcttcggctacctcatgagcccacgggaggaaagcgcccgcgaatatctgctttccgccagccgggttctgcaggcagaagagttgcatgagaaagctcttgatccgtttcttctccaggcagagttctttgagatcccaatgaactttgtggatccaaaagaatatgatattcctggcctggtgaggaagaataggtataagacgatattgcctaacccgcactctcgtgtctgcctgacaagccctgatcccgacgatcctctgagtagttatataaacgcaaattatattcgtgggtatggcggtgaagaaaaggtgtatatcgccactcagggcccaatcgttagcaccgtggctgatttctggcggatggtgtggcaagaacacactcctatcattgtcatgattacaaatatcgaggaaatgaatgagaagtgtacagaatattggcccgaagagcaagtggcctacgacggggttgagattaccgtgcagaaggtgatccacactgaggactaccgcctgcgtctgattagcctgaaaagtgggaccgaggagcggggcttgaagcattactggttcacctcatggcctgatcagaagacacccgacagggctcctcctctgctacatctagtgcgggaggtcgaagaggccgcacagcaagagggacctcattgtgctcctattatcgtgcactgcagtgctggaatcggacgtaccgggtgtttcatagccacatctatttgctgccaacaattgcgtcaagagggagtggtggacatcttaaaaactacctgccagctgcgtcaggatagaggtggaatgatacagacatgcgagcagtatcagttcgtgcaccatgtgatgagcctctatgagaagcagctcagccaccagtcccccgaatag

SEQ ID NO: 130882 - DNA, 1698 bp, synthetic construct
  misc_feature 1..1698: note = Description of Artificial Sequence: Synthetic coding sequence
  source 1..1698: mol_type = other DNA
atgaactacgaaggcgctagatctgaaagagagaaccacgccgctgacgacagtgaaggaggggctctggacatgtgttgttccgagagactgccaggactgcctcagccgattgtgatggaagccttggatgaagccgagggtctgcaggactcgcaacgcgaaatgcctcctcctccccccccatcaccaccttctgaccccgctcaaaagcctccccctaggggcgccggatcccatagccttaccgtacgctcgtccctctgcctcttcgccgcatctcaattcctcctggcctgcggtgtcctgtggttcagcggatatggccacatctggagtcagaacgccaccaatcttgtcagctcgctgctcaccctattaaaacagctcgaacctacagcatggctggattctggtacttggggcgttccctccttgctgctggttttcttgtccgttggcctcgtgctggtgactacactcgtctggcatcttctgcggacccctcccgagcctccaacgccactccctccagaggatcggagacagagcgtcagtaggcagccgtctttcacatattcagaatggatggaggaaaagatagaggacgacttcctggatttggatccggtacctgaaacaccggtgttcgactgtgtgatggacattaagcccgaggccgatcccacaagtctgacagtgaagagtatgggactgcaggagcgcagggggtcgaacgtcagtctgacactggacatgtgcacccctgggtgcaacgaggaggggttcggctaccttatgtctccgcgagaggagagcgctcgcgaataccttctgtccgcaagccgggtgcttcaggccgaggaattgcacgaaaaagcactcgatccctttctcctgcaggccgaatttttcgagattcccatgaactttgtggacccgaaggagtatgacattcccggtttggttcgcaagaaccgctacaaaacaatcctccccaaccctcacagtcgcgtctgcttaacctcacccgacccggacgatcctctttcctcatacatcaatgctaattacattcggggctacggcggtgaggagaaggtatatatcgctacacaaggccctatagtgagcacagtcgctgacttttggagaatggtgtggcaggaacatacgcccattatcgtgatgataacgaacatcgaggagatgaatgaaaagtgtacggagtattggcccgaagaacaggtcgcctatgacggtgtggaaataacagtacagaaagtaattcacaccgaggattacagactgaggctgataagtctcaaatctggcactgaagaacggggactcaagcattattggttcacgtcttggcccgaccagaaaactcccgatcgcgcaccccctcttctccacttagtccgcgaggtggaggaggctgcccagcaggaagggcctcactgcgcacccatcatagtgcactgctctgccggaattgggcggacaggttgtttcattgctacaagtatctgttgccagcagctgcgccaggagggggtggtggatattctcaaaacgacttgccaactgcgtcaggataggggtgggatgatccagacctgtgagcagtaccaattcgtgcatcacgtgatgtcgttgtacgagaagcagctatcgcaccaaagccctgagtag

SEQ ID NO: 130883 - DNA, 1788 bp, synthetic construct
  misc_feature 1..1788: note = Description of Artificial Sequence: Synthetic coding sequence
  source 1..1788: mol_type = other DNA
atggtgcgctggttccaccgagatttgagcggcctggacgcggaaactcttctgaagggacgcggcgtgcacggctccttcttggctcgacccagcagaaagaaccagggcgacttctctctgagtgtcagagttggagaccaggtgacccacatccggatccaaaacagtggtgacttctacgacctctacgggggcgaaaagttcgcgaccttgacggaactggttgagtattatactcagcagcagggtgttttacaagacagggatggaaccatcattcacctaaagtatccattaaattgctcagaccccacttccgagcgctggtaccacggacacatgtctggcggacaggccgaaacgcttctccaagcaaagggcgagccctggacctttcttgtgagggaaagcctgagccagccgggtgatttcgtgctgtcagtgctttccgaccaaccgaaagctggacctgggagtcctttgcgcgtcacgcacatcaaggtcatgtgtgaaggcgggcggtatactgtgggcggtctcgaaacatttgattccttgacggacctcgtggagcacttcaagaagacggggattgaggaagcttccggtgcgtttgtgtacctgcggcagccctattacgctacaagagtgaatgcagccgacatcgaaaacagagtcttggagttgaacaagaaacaggaaagcgaggacacagccaaagcagggttttgggaggagtttgagtcactccaaaagcaggaagtgaaaaatttgcaccaacgactggagggccaaagacccgagaataagggcaagaaccggtataaaaatatcctcccattcgaccattcccgtgtgattctccaggggcgcgactccaacatcccgggtagtgactacatcaacgccaactacattaagaatcagctcctgggacccgacgaaaatgcaaagacctacatcgcatctcagggatgtcttgaggcaaccgtgaatgacttttggcaaatggcatggcaggagaattcacgggttattgtcatgacaacccgggaagtagagaagggccgcaacaaatgcgttccgtattggcccgaggtagggatgcagcgagcatatggcccttattcagtaacaaactgtggagaacatgacaccaccgagtataaacttcggaccctacaggtatccccccttgataatggagacctcattagggagatatggcactaccaatacctgagctggcccgaccatggggtgccgtcggagccggggggagtcctgtcatttttggaccagatcaatcagcgacaggagtccttgccgcatgcgggacccatcatagtgcattgttccgcaggtatcggcagaacagggaccattatcgtgatcgatatgctcatggagaacatcagcaccaaggggctggattgtgacattgacatccagaagacaatacagatggtgcgtgcacaaagatcaggtatggtccagactgaagctcagtacaaatttatctacgtggctattgcgcagttcatcgaaactaccaaaaagaagctggaagtcttgcagagccagaaaggccaggagtcagagtatggcaatatcacgtacccgcctgccatgaaaaatgcacatgccaaggcaagccgcacctcatcaaagcacaaggaagacgtctatgaaaatcttcacaccaagaacaaacgtgaggaaaaagttaaaaagcagaggtccgcggacaaagaaaagtcaaagggaagcctaaagcggaaatag

SEQ ID NO: 130884 - DNA, 1794 bp, synthetic construct
  misc_feature 1..1794: note = Description of Artificial Sequence: Synthetic coding sequence
  source 1..1794: mol_type = other DNA
atgttgagccggggctggtttcatagagacctgtcagggttagacgctgaaacattgctgaaaggaagaggcgtgcacggctcttttcttgcaagaccatcacgtaaaaatcagggagacttctctctgtcagtgcgagtcggcgatcaagttacacacatccggatccagaatagcggagacttctacgacctgtacggcggcgagaaattcgccaccctgactgaactggtcgagtattatacacaacagcagggagtactgcaggacagagacggtactatcatccatctgaaatatcccctgaattgttctgaccctaccagtgaacggtggtatcacgggcacatgtccggaggacaggctgaaacacttctccaagccaagggagagccctggacatttctcgtgagggaatccctctcccagcctggggactttgtcctgagcgtgttgtccgaccagcctaaagcgggacccggaagccccctgcgggtgacacacatcaaagtgatgtgcgagggcggacgctataccgtgggcggcttagaaacttttgattccctgaccgatctcgtggagcactttaaaaagacagggatcgaggaggcctccggggccttcgtctatctccgacagccctattatgcaacccgggtgaatgccgccgacattgaaaaccgtgtcctggaactgaacaagaagcaagagagcgaggatacagccaaggccggattttgggaggagtttgaatcactccagaagcaggaggttaagaatcttcaccaaaggcttgagggccagaggccagaaaacaagggcaaaaataggtataagaacatactgccatttgaccattcccgggtgatccttcagggccgagatagtaacataccaggatctgactatatcaatgcaaactatataaagaaccagctcttaggccccgacgaaaacgccaagacctatattgcttctcagggttgtctcgaggccacggtgaacgacttctggcagatggcttggcaggagaactcacgggtgattgtgatgaccactagggaagtggaaaaagggaggaacaagtgcgtaccatattggcccgaagttggcatgcagagagcttacggaccatacagtgttacgaattgtggcgagcacgacacgacggagtataaacttcggaccctgcaggtgtccccactcgataacggcgacttaattcgggaaatctggcactaccagtatttgtcatggcccgaccacggggtcccttcagagccaggcggcgtgttgtcatttttagatcagatcaatcagcgacaagaaagcctgccacatgccggacccatcatcgtgcactgttctgctggtattggtcgaacaggaacaattatagtaattgatatgctcatggagaacatttctaccaaaggactggactgtgatatcgacattcagaagacaatccagatggtgcgagcccagcggtcaggcatggtccaaaccgaagcccagtacaagtttatctatgtagccatcgcacagttcatcgagactacaaagaagaaattagaagtgctgcagagccaaaaggggcaggagtctgaatatgggaatattacctacccacccgcgatgaaaaacgcacacgccaaggcttcaagaactagcagtaagcacaaggaggacgtttatgaaaatctgcatacaaaaaacaagagggaggaaaaagtgaaaaaacagagaagcgcagacaaggaaaagtctaaagggagcttaaagcgtaaatag

SEQ ID NO: 130885 - DNA, 1671 bp, synthetic construct
  misc_feature 1..1671: note = Description of Artificial Sequence: Synthetic coding sequence
  source 1..1671: mol_type = other DNA
atgctctcacgcggggtgggcgatcaagtcacccacattaggatccagaattctggagacttctacgacctttacggcggtgagaaattcgctacgctgacagagctggttgaatactatactcagcaacaaggagttctgcaggaccgggacggcactataatccacctgaagtacccgctgaattgtagcgaccccacctcagaacgctggtatcacgggcacatgagtggaggccaggcggaaacgttgctgcaggcgaaaggcgaaccatggacatttctcgtacgggaaagcttgtctcaacctggagattttgtcttgtcggttctcagtgatcaacccaaggccggtccagggtctcctttgcgcgtgacgcatattaaagtaatgtgtgaaggggggaggtatactgtgggcgggctggagaccttcgacagcctcacagatctggtggagcatttcaagaagacagggatcgaagaagctagtggggcgtttgtttatttgaggcagccgtattacgctacaagggtgaatgctgccgatattgagaaccgagtcttggaactcaacaaaaaacaggagtctgaagacacagccaaggccggcttctgggaagaatttgagtcccttcagaagcaagaggttaagaacctgcatcagaggcttgagggccagaggcctgaaaataagggaaagaatcggtacaaaaatattctgccctttgatcactcgcgggtgatcctccagggacgcgactccaatattccaggaagtgattatatcaacgcaaattacataaaaaaccagcttcttgggcccgacgagaatgccaaaacttacattgccagccagggctgccttgaagccactgtcaacgatttttggcagatggcctggcaggagaatagccgggtgatcgttatgactactcgggaggtggaaaaaggcaggaataagtgtgtgccttattggcccgaggtaggaatgcagcgcgcctatggaccctactccgtcacaaattgcggggaacatgacactactgaatataagttgagaacccttcaggtgagcccattagataatggtgacctgattcgagaaatatggcactaccagtatctgagctggccggatcacggtgtcccttctgagccaggtggcgtcctaagctttctggaccagattaatcagagacaagagtcactgccacacgccggacccatcatcgtgcactgctcagccggtattggccggacagggaccattatagttattgatatgttgatggaaaacattagtaccaaggggctcgattgcgacatcgacatccagaaaaccatacagatggtcagggcccaacggagtggaatggtccagaccgaagcgcagtacaaatttatatacgtggctattgctcaattcatagagaccactaaaaagaaactggaagtgctgcaaagccaaaaagggcaagagtcagagtacggaaacattacctacccgccagccatgaagaatgctcatgcgaaggccagtcgcacatcttcaaaacataaggaggatgtctatgaaaatctgcataccaaaaataagcgggaagagaaggtgaaaaagcaacggtctgcagataaagaaaagtccaagggatcactgaagcgaaagtag

SEQ ID NO: 130886 - DNA, 1875 bp, synthetic construct
  misc_feature 1..1875: note = Description of Artificial Sequence: Synthetic coding sequence
  source 1..1875: mol_type = other DNA
atggtcagatggtttcatcgcgatttatctggcctagacgccgagacgctgctgaagggccgcggcgtgcacggatcctttttagcacggcccagccggaagaatcaaggtgatttcagcctgtcagtcagggtgggtgaccaggtgacccatattcgtatccaaaattccggagacttttatgatctgtacggaggagaaaagttcgccacccttaccgagctcgtggagtactatactcagcagcagggagtgcttcaggatagagatggaactataattcaccttaagtaccccctgaactgtagcgatcccacctctgagagatggtatcacggacatatgtcgggaggacaggccgagactctcctgcaagccaaaggcgaaccctggacatttctggtgcgggagtccctctcgcaaccaggcgattttgtcctcagcgtgctgtctgaccagccaaaggctggccccgggagtccactgcgggtgactcacattaaagtgatgtgtgaaggggggaggtatactgtgggcggcctggaaaccttcgatagcctcaccgatctggtggagcatttcaaaaaaacggggattgaggaagcttctggtgcattcgtgtatttacgccagccatactacgcgaccagagtgaatgcagcagacattgagaatcgcgttctggaacttaacaaaaaacaggagtcggaggacactgccaaggccggtttttgggaggagtttgagtcactgcagaagcaggaagttaaaaatctgcaccagcgcctcgaagggcagcggccagagaataagggaaaaaaccgctataagaatatactgccatttgaccattctagggtgatactccagggccgagactcaaacattccagggagtgattacatcaacgccaactacattaaaaatcagctgctcgggccagacgagaatgctaagacctatattgcgagccaaggatgcctcgaggccaccgtcaatgacttctggcagatggcttggcaagagaatagccgagtaattgttatgactacccgtgaagtggagaagggcagaaataaatgcgtcccctattggcctgaggtgggaatgcagagggcatacggcccctactccgtgaccaactgtggtgagcatgatacaacagaatataagttgcgaactctccaggtgtcacctttggataatggcgatctgatacgagagatatggcactatcaatatctgagttggccagatcatggggtaccaagcgagcccggcggcgtgttgtccttcctcgaccagatcaaccagagacaggagtctctgcctcatgctggacccataatagttcactgctccgccggcattggccgaactgggaccatcattgttatagacatgctcatggaaaatatttctaccaaaggcctggattgcgacatcgatatccagaaaactatccaaatggtgcgggcacaacgttcagggatggtccaaacagaggctcagtacaaattcatatacgtcgccatcgcccagtttatcgagaccacaaagaagaagctggaagtgctccagtctcagaaaggccaggagagtgaatacggcaacattacatacccccccgccatgaagaatgcgcacgctaaggcgtctcgaaccagcagcaagtcgctggagagctccgcaggcacagtggccgccagtcccgtgaggagggggggacagcgagggctccccgtcccgggccctccagtactgtcacccgacttgcaccagctgcccgttctggctcctctccatccggccgctgacacccgacggatgtgtatgcgtacctgcactttgagaacccgcggaagacgaaagtag

SEQ ID NO: 130887 - DNA, 1083 bp, synthetic construct
  misc_feature 1..1083: note = Description of Artificial Sequence: Synthetic coding sequence
  source 1..1083: mol_type = other DNA
atggtgcaggcccacggaggaagaagtcgggctcaacccctgactctgtccttgggcgcagctatgacacagccaccaccagaaaagacccctgccaaaaagcacgtcaggctgcaggagaggcggggatcaaacgtggccctgatgctggacgttcgatctcttggggcagtcgagccaatctgcagcgtgaacactccccgggaggttaccctgcactttcttagaacagccgggcacccactcactagatgggcactgcagcgccaacctcccagtcccaaacagctggaggaggagttcctgaaaattcctagcaattttgtgtctcctgaggaccttgacatcccaggccacgcttctaaggaccggtacaaaaccattctgcccaacccccaatcccgagtgtgcctcggaagagcccaatctcaagaagatggagactatatcaacgcaaactacatccgcggatatgacggtaaggagaaagtgtacatcgcaacgcagggcccaatgcctaacactgtttctgacttttgggaaatggtctggcaggaagaagtttcactcatcgtgatgcttactcagctcagagagggaaaggagaaatgcgttcactattggccaaccgaagaggaaacttacggcccattccagatccgcatacaggacatgaaagagtgccctgaatacacggtccggcagctaacaatccagtatcaggaggagagacggtcggtgaaacacattctatttagcgcctggcctgaccaccagactccagaaagtgcgggcccactgttgcgcctggtcgctgaggtggaggagagccctgaaaccgccgcccatcccggccccatcgtggtccactgtagtgccggtatcggaaggactgggtgcttcatagcgaccagaatagggtgtcagcagctgaaagcgcgaggtgaggtggacattctgggcattgtgtgtcagctgaggctggatagagggggtatgatccaaaccgcggaacagtaccagtttttacaccataccctggccctctacgctggacagctgcctgaggagcctagtccctag

SEQ ID NO: 130888 - DNA, 1398 bp, synthetic construct
  misc_feature 1..1398: note = Description of Artificial Sequence: Synthetic coding sequence
  source 1..1398: mol_type = other DNA
atggttgggaaggcttggcccttgacgcacagtcagggcaccggaccttgggcccccgaggggcacagacgcgaggctgcagacccatggtggcaaagacagcaagcccaggaggggcggatgcaactaggatgcgcctgggttgcagccagacgcggtggaggtagaaaactggcatcctggagcctgctgtcaccgcagcgtcagacagaccgccagaccgattcatggcaggaagccgcttggggacctcagctcctccagcagaccagctggctgagtgagcctcctctgggccctgcaccgcacctttctatggtgcaggcccacggaggacggtcaagggctcaacctctgacactgtccctcggtgccgccatgacacaaccacccccagaaaagaccccggcgaaaaaacacgtacgtctgcaggaacggagaggttcgaacgtggccctgatgctggatgtgaggtcactcggagcagtggagccgatctgttcagttaatacccccagagaagtgacccttcactttctgcgtaccgcaggccacccattaacccgttgggctctgcagcgccagcctccatctcctaaacagctcgaagaagagtttctgaaaattcctagcaattttgtgtcccctgaggatttggatatccccggccatgcttctaaggatcgctataaaacgatattacccaatccccagagcagggtgtgcctagggcgggcccagtcacaggaggacggggattacattaacgccaattatatccggggatatgacggcaaagagaaggtctacatcgctacccagggccctatgccgaatactgtgagtgacttttgggagatggtctggcaggaggaggtttctctgattgtaatgctgacccagctgagggaaggcaaggaaaaatgcgtccactattggcccactgaagaagaaacatatggaccttttcagatccgcattcaggatatgaaggagtgccccgagtacactgtcagacagttaacgatccagtatcaggaagaacgccggagtgtaaaacacattctattcagtgcttggccggatcatcagaccccagagtcggcagggcccctgctgaggttggtggccgaagtggaggaatcccctgaaactgccgcccaccccggaccgatcgtcgttcactgttccgcaggcattgggcggacgggctgtttcatcgccacccgcattgggtgccagcagctgaaggcccgcggcgaagtggacatccttggcattgtatgccagctgcgcctcgacagggggggcatgatccagactgcagagcagtatcagttcctgcaccatacattggccctttacgccggccagctgccggaggagccttccccctag

SEQ ID NO: 130889 - DNA, 1200 bp, synthetic construct
  misc_feature 1..1200: note = Description of Artificial Sequence: Synthetic coding sequence
  source 1..1200: mol_type = other DNA
atgggggcaagcttctggccaatccggcaggctagggaacagcaacgccgggctcttagctttcggcagacatcttggctgagtgagcctccattaggccccgctccccatctatcaatggttcaggcccacggaggcagaagtcgcgctcagcccctgaccctgagtctcggcgctgctatgactcagccacccccggagaaaacacctgctaagaaacatgtgagactacaggagaggaggggttctaacgtcgccctgatgttggacgtccgtagtctgggggcagtcgaacccatctgtagtgtgaacaccccacgcgaagttaccctccacttcctccgcacagcaggccatccactgacgcgctgggctcttcagaggcagccgccttccccaaagcagctggaagaagagttcctcaaaatccctagtaatttcgtaagtccggaagatctcgatatccccgggcacgcatcaaaggaccgctataagactatacttccaaatcctcaaagccgagtctgcttgggtagagctcaatcacaggaggacggagactacatcaacgccaactacatccggggatacgacggtaaggaaaaggtgtacatcgctacgcagggccccatgcccaatacagtgtccgacttttgggagatggtctggcaggaagaggttagccttatcgtgatgctcacccagctccgagagggcaaagagaagtgtgtgcactactggcccactgaggaggaaacctatggtccctttcaaatacgaatccaggatatgaaggagtgtccagagtacaccgtgcgacagctgaccattcagtaccaggaggaaaggcggtcggtcaagcacattctgtttagtgcctggccagaccatcaaactccagaatccgctggacccctcctgagacttgtcgccgaggtggaggagtctcctgaaactgccgcccacccaggtcccatcgtcgttcattgttccgccgggataggtcgcaccgggtgcttcattgcaacccggatcggctgccagcaattaaaggccagaggcgaagtggacattctgggcatcgtgtgtcagttacgtctagatcggggagggatgatacagacagccgagcagtaccagtttctacatcacactctagctctgtacgccggtcagctccctgaagagccttccccttag

SEQ ID NO: 130890 - DNA, 465 bp, synthetic construct
  misc_feature 1..465: note = Description of Artificial Sequence: Synthetic coding sequence
  source 1..465: mol_type = other DNA
atggtgcaggctcatggggggcgcagcagagcacagcccttaaccctgagcctaggtgctgccatgacccagccgccaccagaaaaaactccggcaaaaaagcatgtcagactgcaagagaggagaggctcaaacgtagccttgatgctggatgtgaggagcttgggcgctgtggaacccatttgttctgtgaatacgcctagggaggtgaccttgcattttctgcgcacagcagggcatcccctgacccgttgggctctgcaaagacaacccccaagtcctaaacaacttgaggaagaattcctgaaaatcccttcaaactttgtaagccccgaagacctggacataccaggtcacgcctccaaagatcggtacaagaccattttacccaatccccagtccagagtgtgtctaggtcgggcccagtcacaagaggacggagattacatcaacgccaattattag

SEQ ID NO: 130891 - DNA, 1326 bp, synthetic construct
  misc_feature 1..1326: note = Description of Artificial Sequence: Synthetic coding sequence
  source 1..1326: mol_type = other DNA
aagcggcgtcgggctgctagcatgaaccgcctgggttgctggcctgcccgtagtctgccaagaagcgggcgcgggtccggtcaacgctccctgggcctgggcggacatccgagcgggccccgtcatcccggaacccccgctgctaaaagaacctgggagtcccccggagtgagggctcgggactgcccgctttccacgtcatggctgtccgagccgcccctcggccccgccccacacttgtcaatggtacaagctcatggagggcgttcccgagcccaaccccttactttgagcctcggagcagccatgacccaacccccgcctgaaaagacgcccgcgaagaagcatgtacgactgcaagaaagaagaggatctaacgtcgcgttgatgctggatgtgaggtcgctgggagctgtcgaacctatttgttcagtgaatactcccagagaggtcaccttacactttctgcggactgccggacaccctctgactcgctgggccctccagcgccagccgcctagtcctaaacaactggaagaggagtttttgaagatcccgagcaacttcgtgagtccggaggaccttgacatccccggccatgcctcaaaggaccgctacaaaaccattttacctaatcctcagtcccgcgtgtgtctggggcgagcgcagtcccaagaggacggcgactatattaatgctaactacatccgcggatacgacggaaaggaaaaggtttatattgccactcaggggccgatgcctaacacagtcagtgatttctgggaaatggtctggcaagaagaggtttcactgatcgtgatgctgactcagcttcgggagggcaaagaaaagtgtgttcattactggcccactgaggaggagacctacgggccttttcagattaggattcaggatatgaaggagtgtccagaatatacagtgaggcagctaacaattcaatatcaggaagagagacgctccgtcaaacatatcctcttctctgcatggcctgaccaccagacccccgagtcagccggccccctgctcaggctagtggctgaggtggaagaaagcccggagaccgccgcccaccctgggcctatagtggtgcattgtagcgcaggaattgggagaacagggtgctttattgcaaccaggatcggatgccaacagcttaaagcacgtggggaggttgatattttgggcattgtgtgccagctacgtctcgataggggtggtatgattcagacagcagagcaatatcaatttctccatcatactctggctctatacgctggccagcttcccgaggagccctctccctag

SEQ ID NO: 130892 - DNA, 423 bp, synthetic construct
  misc_feature 1..423: note = Description of Artificial Sequence: Synthetic coding sequence
  source 1..423: mol_type = other DNA
atggtgcaagctcacggagggcggagtagggcacagccattaaccctgtctctcggagccgcgatgacacagcctccacccgagaagacccctgcaaagaagcacgtgagactccaggaaagaagggggagtaacgtggccctcatgcttgatgtccgcagtttgggtgccgttgagccgatctgctctgtgaacacccctcgggaggtgacactccactttctgcggacagctggccaccccctgacacgatgggccttgcagcggcagccccccagcccaaaacaactggaggaggagttcctgaagatccctagtaacttcgtttcacctgaagatctggacattccaggccatgcctcaaaagaccggtacaaaactattctgcccaacccccaatcgcgagtctgtctgggccggtag

SEQ ID NO: 130893 - DNA, 1083 bp, synthetic construct
  misc_feature 1..1083: note = Description of Artificial Sequence: Synthetic coding sequence
  source 1..1083: mol_type = other DNA
atggtgcaggcccacggggggcgatcccgcgctcagcccctcaccttgagcttgggcgccgcgatgacccagcccccacctgagaagacccccgctaaaaaacatgtgaggctccaggagcggagaggcagcaacgttgctcttatgctggacgttcgctcactcggagcagtggaacccatctgtagtgtgaatactccaagagaagtcacactgcattttctgaggaccgccgggcaccctctgactaggtgggccttacagaggcagcccccgtctccaaagcagcttgaggaggagttcctcaaaattccttccaacttcgtgtcccctgaggatctggatattcctgggcatgcctccaaggaccgctacaagactattcttcccaacccacagtcacgagtgtgtctgggacgggcgcagtctcaggaagatggagactacatcaatgctaattatatcagaggttacgatggaaaagaaaaagtttatattgctacccagggcccaatgcccaatactgtttctgatttctgggaaatggtgtggcaggaggaggtgagcctcatcgtgatgctgacacagttgagagaaggcaaggagaaatgcgtccactactggccaacagaagaagagacatatggacctttccagatcagaatccaggatatgaaggagtgtcctgagtataccgtgcggcagttgactattcagtatcaggaagaacgccgcagcgtaaaacatattctgttcagtgcttggcccgatcatcagaccccagagtctgccggacccctcctgcgcctggtggccgaggtcgaagagtccccggagaccgccgcccaccctgggccaattgtggttcactgtagcgctgggatcgggcgcaccgggtgtttcattgctacgaggattggctgccagcagcttaaagctcgcggcgaggtggatattttggggatcgtgtgccaactgaggttagaccgcggagggatgatccaaaccgccgagcagtaccagttccttcaccatacactggccttatacgcagggcagttaccagaggagccatctccgtag

SEQ ID NO: 130894 - DNA, 570 bp, synthetic construct
  misc_feature 1..570: note = Description of Artificial Sequence: Synthetic coding sequence
  source 1..570: mol_type = other DNA
atgcccaacacggtttctgatttttgggaaatggtgtggcaggaggaggtgtcactcatcgtgatgctgacccaactgcgggaaggcaaggaaaaatgtgtccattactggccgaccgaagaagaaacatacgggcctttccagatcagaatccaggatatgaaggaatgccccgagtacacagttcgccaattaacaattcagtaccaagaagagcggcgaagcgtaaagcatatcttgttctccgcctggcctgaccaccagactcccgagtccgctggccctctgctgagactcgttgcagaagtggaagaaagtccagaaactgccgcacacccagggcctatcgtggttcactgcagcgccggcataggacgcaccggatgctttatcgccactcgtatcggttgtcaacaactgaaggcccggggagaagttgatatcctggggatagtgtgccaactcagacttgaccgagggggcatgatccaaaccgccgagcagtaccagttcctacaccataccctcgccttatatgcaggacaacttcccgaggaaccgagcccttag

SEQ ID NO: 130895 - DNA, 411 bp, synthetic construct
  misc_feature 1..411: note = Description of Artificial Sequence: Synthetic coding sequence
  source 1..411: mol_type = other DNA
atgaaggaatgccccgaatataccgtgcgacagctcacaatccagtaccaagaggaacgtcgaagcgtgaagcacatattgttttcagcctggcctgaccatcaaactcccgaaagcgccggccctttactccgcctcgttgccgaggtagaggagtccccagagactgccgctcaccccggaccgatagtggtgcattgttcggctggcattggacgcacagggtgcttcattgccacacggattgggtgccagcagttgaaagccagaggcgaggtggatatcttaggaattgtgtgtcagcttaggttggatagggggggtatgatccagactgcagaacagtatcagtttctgcaccacacccttgcgctgtacgccggacagctcccagaggaaccgtcgccctag

SEQ ID NO: 130896 - DNA, 1545 bp, synthetic construct
  misc_feature 1..1545: note = Description of Artificial Sequence: Synthetic coding sequence
  source 1..1545: mol_type = other DNA
atgtcgtctccgatctccaaatcaaggtcccttgctgcttttttacagcagctccgcagccccagacaaccacccaggctcgtgacttcgaccgcctacacctccccacagccgagggaggttcccgtgtgtcctcttacggccggtggagagacccagaacgcagccgcgctacccgggccaacatcatggcctctattgggcagcttgctgcaaatactgtggaagggaggattaaagaagcagcatgacacgctcgttgagtaccacaagaagtatggtaagatttttcggatgaagctgggaagcttcgaatccgtccatctcggctccccttgtctgctcgaagccttatacagaaccgaatccgcctacccccagaggctcgaaattaagccatggaaggcgtatcgagattatcgcaaagagggatacggactcctaatcctggagggcgaggactggcaacgagtgaggagcgcattccagaagaagctgatgaaaccaggggaagtcatgaaactcgacaacaagatcaatgaagtactcgccgacttcatgggaaggatcgacgagctgtgcgatgagcgcggacacgtcgaagatctttactccgaactgaacaagtggagcttcgagagcatctgtctggtgctctacgaaaaacgatttggcctgctccagaagaacgcaggtgatgaggccgtaaacttcattatggcaataaagaccatgatgagcactttcggtagaatgatggtgaccccagttgagcttcataaatccctaaacacgaaggtctggcaggatcacactctggcctgggatactattttcaagtcagtgaaggcttgtattgacaaccggcttgaaaaatattcacagcaaccctccgccgatttcctgtgcgacatttaccaccagaacaggctcagcaagaaggagttgtacgccgccgtcactgaactgcagctggccgcagttgagaccacggcaaacagtctgatgtggattttgtataatctgagtcggaaccctcaggtgcaacaaaagctgctgaaggagattcagtctgtgctacctgagaaccaggtgccacgggctgaagacctgcgtaacatgccttatttgaaagcatgccttaaagagtccatgcgcctcaccccctctgtgccatttactacccggaccctggacaaagcgaccgtactgggcgagtacgctttgcctaagggaactgtcctcatgctgaatactcaggttctggggagtagtgaagataacttcgaagacagcagtcagtttagacctgagcggtggctgcaggaaaaagagaaaatcaacccctttgcacatcttccatttggggtcgggaaacgaatgtgtattggtcggagacttgcggaactgcagctgcatcttgcactgtgctggatcgtgcgcaagtatgatatccaggcaaccgacaatgagcctgtggagatgctacattctggaaccctggtgccaagtcgggagctgcctatagccttctgccagaggtag

SEQ ID NO: 130897 - DNA, 2382 bp, synthetic construct
  misc_feature 1..2382: note = Description of Artificial Sequence: Synthetic coding sequence
  source 1..2382: mol_type = other DNA
atggattcttggtttatcctggttctgctcggttccggtctgatatgcgtttccgctaacaacgcaacaaccgtggcgccaagcgttggcatcactcgtctcatcaactcctccacagctgagccagtcaaagaggaagcaaagacatcgaatcccacctccagcctcacctccctttccgtcgcacccacgttctcccccaatatcactcttggtcccacctatttgactactgtgaattcaagcgattctgacaatggcacaacacgaacagcctcgaccaatagcattggtattacgatctcaccgaacggcacttggcttcccgataaccagtttactgacgcaaggaccgagccttgggaaggcaatagttccactgctgcgacaacacctgagacttttccaccctctgatgagactccaatcatagccgtaatggttgcactttccagcctactggtgatagttttcattatcattgtcctgtacatgctgaggttcaaaaaatataagcaagcaggcagtcactcaaactcgtttagactgtctaatggtagaactgaagacgttgagcctcagtccgtgccgctgctcgccagaagcccctccaccaacagaaaatatcctccactgccagtagataagctcgaggaagagatcaataggagaatggccgatgataacaagctgtttcgggaagaatttaatgcgctcccagcttgcccgatccaggctacttgcgaagcagcctccaaagaggaaaataaagaaaaaaaccgctacgtgaatatcctgccttatgaccacagtagggttcacctcacccctgtggaaggcgtcccagatagcgattacattaatgcgtcattcattaatggctaccaggagaaaaacaagtttattgccgctcagggaccaaaggaagagacagtcaacgatttttggcgaatgatctgggaacaaaacacagccaccatagtcatggtaactaacttaaaggaacgcaaggagtgcaagtgtgctcaatactggcctgatcaaggttgctggacatatgggaatatccgagtgtcagtggaggacgtgacggtgctcgttgattacactgtcagaaaattctgcatccagcaggtgggtgatatgaccaatcgaaagcctcaaagacttatcactcaattccacttcacctcttggccagatttcggagtcccctttacacccatcggcatgttgaagttccttaagaaggtcaaggcatgtaatccgcagtacgccggggccatcgtggtccactgttcggcaggagtaggcaggactggaactttcgtggttatagacgccatgctggacatgatgcatactgaacgtaaagtcgacgtatacggcttcgtttctaggattagagcacagcggtgccagatggtgcagacagatatgcaatacgtgtttatatatcaagctctcctggaacattacctatatggtgacaccgaactggaagtgacttcattagagacccacctccagaaaatttacaataagatacccggtacctcaaacaatgggttggaggaggagttcaagaagctgacttcaattaagattcagaacgacaaaatgcgtacgggtaaccttcccgcgaatatgaagaagaacagggtgctgcaaattatcccctatgaattcaatcgggtgattatccctgtcaagcgcggtgaagaaaacacagactatgtcaacgcttcctttatcgatggttatcgtcaaaaagactcctatatagcgtcccaaggcccgctgcttcacacgatcgaggacttctggaggatgatctgggagtggaaatcttgtagtattgtgatgctaacagaactggaagaacggggccaggaaaaatgtgcccaatactggcccagcgacggactggttagttacggtgacatcaccgtggagctgaaaaaagaggaagagtgtgagtcttacactgttagagacctgttagtgaccaataccagagaaaataaaagtaggcaaattagacagtttcactttcatggctggcccgaagtgggcatcccgtcagatggcaaaggaatgatcagtatcatcgcagcagtgcagaagcaacagcagcagtccggaaatcatcccatcactgtccactgttcggccggagccggtaggacaggaacattctgcgccctcagcactgtgttggagcgagtcaaggccgagggaattctggatgtgttccaaaccgtcaaatctctcaggctgcagcggcctcatatggtgcagaccttggaacagtatgagttttgctataaggtggtacaggagtatatcgacgcctttagcgattatgctaattttaagtag

SEQ ID NO: 130898 - DNA, 2382 bp, synthetic construct
  misc_feature 1..2382: note = Description of Artificial Sequence: Synthetic coding sequence
  source 1..2382: mol_type = other DNA
atggatagctggtttattcttgtcctgttgggcagcgggttaatatgtgtcagcgctaataatgcgacaaccgtggccccttcagtgggaatcacccggctcatcaactctagcacagccgagccagtcaaagaggaagccaagacttcaaaccctacttccagcctcaccagcctttcagtggcacccactttcagtcccaatatcacattggggccaacctacttgacgactgtgaattcatcagattctgataatggcactacacggacagcctcaacaaattctatcggaatcacaattagccccaacggaacgtggctacccgataatcagtttaccgatgctaggaccgaaccgtgggagggtaactccagcaccgctgccaccacccctgagacctttccaccctccgacgagacacccattatcgccgtgatggtcgcactttcctctctcctcgtgatcgttttcataattattgtcttatacatgctcaggtttaaaaagtacaagcaagctgggtcacactcgaacagtttcagacttagcaacggccgcacagaagatgtcgaacctcagtcagtccctctgcttgctaggtctccgtccacaaatcgtaaatacccgccccttcctgttgacaaactggaggaggagataaacagaagaatggctgatgataacaaactcttcagggaggaattcaacgcactgccagcctgtccaatccaggctacgtgtgaggccgccagcaaggaagagaacaaggagaagaaccggtacgtcaacattctgccgtacgaccacagtcgtgttcacctgactccggtggagggcgtccctgactccgactatataaacgcctcttttatcaacggctaccaagagaaaaacaaatttattgccgcccaaggaccaaaagaagagaccgtcaacgatttctggcggatgatttgggagcagaataccgcaactattgtgatggtgactaacctcaaagagcggaaggagtgtaagtgcgcccagtactggccggaccagggctgttggacttacgggaatatccgagtcagcgtggaagacgttaccgtcttagttgactacacagtgagaaagttctgcattcagcaggttggcgatatgaccaatcgcaaaccacagcggttaattactcagtttcacttcacaagttggcctgacttcggggtgccttttacaccaatcgggatgttgaaatttctgaagaaagtgaaggcctgcaacccccagtatgcaggcgcgatagtggttcactgctcagccggggtgggacgtacaggtactttcgtggtgattgacgctatgctggacatgatgcatactgaaaggaaggtggatgtttacgggtttgtgtctcgaatccgtgcccaaaggtgtcaaatggtgcagacggatatgcaatatgtattcatataccaggccctgttggagcattatctatatggcgacacagagctggaggtcacctccctggagacccatctgcagaagatttacaacaaaattcccggcaccagcaataacggccttgaagaggaattcaaaaaactgacaagtatcaagattcaaaatgacaagatgaggaccggcaacttgccggccaacatgaagaagaatcgtgtgctgcagattatcccctacgagtttaaccgcgtcataattccagttaaaagaggggaggagaataccgactatgtcaacgcctctttcatagatggatatcggcagaaagactcctatatcgctagccaagggcctctgctgcacactattgaagacttctggagaatgatttgggaatggaaatcatgctcaatagtcatgctcactgagctcgaagaaagaggacaggagaaatgtgcccagtactggccatccgacggtctggtgagctacggtgacattactgtggaacttaagaaggaggaagagtgcgagagctataccgtgagggatcttctggtgacaaataccagggaaaacaagtctaggcagatccgacagtttcacttccatggatggccagaagttggaattcctagcgatggcaaaggcatgatcagcatcattgctgctgttcaaaagcagcagcaacaaagcgggaatcaccctattacagtccactgcagtgcgggggcaggacgcacaggcaccttttgcgctctgtccacagtcttagaacgtgtgaaggcagaggggatcctggacgtattccagacggtgaagtcactgcgactgcagaggccccacatggtacaaaccctggagcaatatgagttttgttacaaggtggtacaggaatacatcgacgcctttagcgattatgccaatttcaaatag

SEQ ID NO: 130899 - DNA, 1977 bp, synthetic construct
  misc_feature 1..1977: note = Description of Artificial Sequence: Synthetic coding sequence
  source 1..1977: mol_type = other DNA
atggttgccttgagcagtctgttggtcattgttttcatcattattgtcctgtacatgctgcgacgcttcagaaaagctgagctgatgagcagaaataccgaaaagtacaaacaggcgggcagtcacagtaattctttcaggctaagcaacgggcgaacggaggatgtcgaaccgcagagtgttcctctgctcgctcgatctccctccaccaaccggaaatatccgcccctgcctgtggataaactcgaagaggaaataaatcgaagaatggcagacgataacaagctttttcgcgaggaattcaacgctcttcccgcttgcccaatccaggccacctgtgaggctgccagtaaagaggagaataaggagaagaatcgctacgtgaatatcctgccatatgatcactctagagtgcatctcacccccgtggaaggagtcccagatagtgattacataaatgcatcgtttataaacgggtaccaggagaagaacaaatttatcgccgcccaaggaccaaaggaggagacggttaatgatttctggcggatgatatgggagcagaatactgctaccatcgtgatggtcacaaatctgaaggaaagaaaggagtgcaagtgcgctcagtattggcctgatcagggatgctggacgtacggtaatatccgcgtgagtgtcgaggacgtgacagtgctcgtggattacaccgtgagaaaattctgtattcagcaggtgggagacatgacaaatcgtaagccacaaaggctgataacacagttccacttcacatcgtggcccgatttcggagttccgttcacgcccatcggaatgcttaagtttcttaaaaaagtgaaggcctgtaacccccagtacgccggggcaattgtagtgcactgttcagcaggggtcggcagaacgggaacttttgtcgtcattgacgctatgcttgacatgatgcatacagaaagaaaagttgacgtctatggctttgtctctaggatccgcgctcagcggtgccagatggtacagactgacatgcagtatgtcttcatctaccaggcactgctggagcactacttatacggggatacagagctcgaggttacctcgctggaaactcacctgcagaagatatacaataaaatccccggaacttccaacaatgggcttgaggaagagtttaaaaaacttacatcaatcaagattcagaatgataaaatgcgcacaggaaatctgcccgcaaatatgaagaagaatcgggtgttgcagatcatcccgtacgagtttaaccgggtcattattccagttaagcggggggaggagaacacagattacgttaacgctagttttatcgatggttacaggcagaaggacagttatatcgcttctcaagggcccttactgcacaccattgaggacttttggcgaatgatctgggaatggaaaagctgtagcatcgttatgctgaccgaactcgaggaaaggggtcaggagaaatgtgcccagtattggccctctgacggtctggtttcctacggggacattacagtcgagttaaagaaagaagaggagtgcgaaagctacaccgttagagacttgctcgtgactaacaccagagagaataagagccggcagatacgccaattccacttccacggctggcctgaagtgggcataccttctgatggaaagggcatgatcagtattatcgcagcagtgcagaagcaacagcagcagtccggaaatcatccaataaccgtgcattgcagcgctggagctggtcgcaccggaacgttctgtgcattatctactgtgcttgaaagagttaaagcagaggggatcctggacgtttttcagacagtgaaaagtctcaggctccagcgcccacacatggtccagacactcgaacaatatgagttttgttacaaggtggtccaggaatatatcgatgcctttagcgattacgcaaattttaagtag

SEQ ID NO: 130900 - DNA, 2409 bp, synthetic construct
  misc_feature 1..2409: note = Description of Artificial Sequence: Synthetic coding sequence
  source 1..2409: mol_type = other DNA
atggactcgtggtttatactcgtcctccttgggtccggactcatatgcgtttcagccaataacgcaacgaccgtagctccatccgtagggatcacacgcctgattaatagcagcaccgccgagccggtaaaggaagaggccaagacgtccaacccaacttcgtcccttacatcactttccgtggcacccacatttagccctaacattacactgggacctacataccttacaactgtaaactcctccgattctgataacgggaccactcgcacagcatcgacaaattccatcggaattaccatttcacccaacggaacctggctccctgacaatcaattcactgatgcacgtaccgaaccttgggagggaaactctagtactgccgctactacccccgagactttcccaccgtcaggtaactctgacagcaaagatcggcgcgatgaaaccccaattatcgccgttatggtggcattatcgtcactcctggtgatagtgttcatcatcatcgtgctgtatatgcttaggtttaagaaatacaaacaggctgggtcccacagtaactcttttcggcttagcaatggcagaaccgaagacgtggaaccccagtccgtgccgttgttggctaggtcaccaagcaccaatcggaagtatccgcctctccctgtggacaagctggaagaggaaatcaatcgccgaatggccgacgacaacaaactcttccgggaggagtttaacgctctgcctgcgtgtccaatccaggcaacctgcgaggcagcttcaaaagaagaaaataaagaaaagaataggtatgtgaatatactcccatatgaccactctagggtacacctgacccccgttgaaggagtgcccgactccgactatattaacgctagctttatcaacggttatcaggaaaaaaacaagttcatcgcagcccaaggacctaaggaagagacagtgaacgacttctggaggatgatttgggaacagaatactgcaaccatagtcatggtaactaacctgaaagagaggaaggaatgtaaatgtgctcaatattggcctgatcagggatgctggacttatggaaatattagggtttctgtagaggacgtgacagtactggtcgactacacagtgcggaagttctgtatccagcaggttggagatatgaccaaccggaaaccccagaggctcatcacacaattccacttcacaagttggccggacttcggggtaccattcacccccatagggatgttgaagttcctgaagaaggtgaaggcctgtaaccctcagtacgccggcgccattgtagttcactgttctgcgggagttggaaggaccgggacgttcgtcgtgattgatgccatgctggacatgatgcacacagaacgtaaggtcgacgtgtacggcttcgtatctcgaatccgagcccagagatgtcagatggtccaaaccgatatgcagtatgtgttcatttatcaggctctgctcgaacattatctgtatggggatactgaactcgaagtgacctcccttgagacccacctacagaagatctataataaaatcccagggacgagcaataacggcttagaagaagagtttaaaaaactgactagtatcaaaatccaaaatgataaaatgcgcacaggcaacctgccggcaaacatgaaaaagaacagagtcttgcaaattatcccctacgaattcaatcgggtgattatccccgtgaagcgtggggaagagaacacggattacgttaacgcaagcttcattgacgggtaccgtcagaaagatagctacatcgcatctcaggggcctttactgcacactatagaagacttttggagaatgatctgggaatggaagtcatgttccatcgtgatgttaacggagctggaagaaaggggtcaagaaaagtgtgctcagtactggccttcagacgggcttgtgtcatacggagatatcactgtcgagctgaagaaggaagaggagtgtgagtcctacacagtccgcgacttgctggttaccaacacacgggaaaacaaatctcgacagattcgacagttccatttccatggttggcctgaagtgggaatccccagcgatggaaagggaatgatcagtataattgctgccgtgcaaaagcaacagcagcagagcggcaatcaccctataaccgtgcactgttccgccggagcaggaagaacagggaccttctgtgctctgtcaacggtactcgagcgcgtgaaggcagagggcatcctcgatgtgttccagaccgtgaagtctttgaggttacagcggccacacatggttcagacacttgaacaatatgagttttgctataaagtggtccaggaatacatcgacgctttctccgactacgctaattttaaatag

SEQ ID NO: 130901 - DNA, 2409 bp, synthetic construct
  misc_feature 1..2409: note = Description of Artificial Sequence: Synthetic coding sequence
  source 1..2409: mol_type = other DNA
atggactcctggtttatccttgtcctcctggggtctggcctgatttgcgtgtcagcgaataacgctaccactgtggcccctagtgttggcattactcggctcatcaactccagcacagcagagcccgtgaaggaggaagcaaagacttccaatcccactagttccctgacaagcctgtctgtggccccaactttcagtcccaatataactctaggccccacctacctgactaccgtgaactcctctgattcggacaacggcacaacacgaaccgcctctacgaactcaatcggcatcacaatttccccaaacgggacatggctccccgataaccagttcaccgacgctcgcactgagccctgggagggcaattcctctacagcggccacaacccccgagactttcccgccgagtggcaactcggacagcaaagatcggcgagatgaaacacccataatcgcagtaatggtggccctatcatccctgctggtgatagtgtttataattattgtgctctacatgctgagatttaaaaaatacaagcaggccggctcacatagtaacagctttcgattgtcaaatggccgcacagaagatgtagaaccccagtccgtgccactcctggctcggagtccaagcacaaatcggaagtatcctcccctgccggtggacaagcttgaagaggaaatcaacaggcggatggcagacgataacaagctgttcagggaggaattcaatgcgctgccagcctgtcccatacaggccacgtgcgaggcagcctctaaagaagagaacaaagagaagaatagatacgtgaatatccttccgtacgatcattccagggtccacctgacacctgttgagggggtgccagattcggactatataaacgccagctttataaacggatatcaggagaagaacaaatttatcgcggctcaggggcctaaggaagagaccgtgaacgatttctggaggatgatttgggagcagaacacggccacgattgtaatggtaacaaacctaaaagaacgcaaagaatgcaaatgtgcccagtactggccagaccaggggtgttggacctatggcaatattagagtgtcagtggaggatgtgacggtgctcgtggattacaccgtccgaaaattttgtattcaacaagtcggagacatgaccaaccggaagcctcagcgactgatcacacagtttcatttcactagttggccggacttcggtgtcccatttaccccaattggaatgctcaagtttcttaagaaagtcaaggcctgcaacccccagtatgcaggggctatcgtcgtgcattgctcagccggcgtcgggaggacaggcacctttgtggtgatcgatgcaatgctcgacatgatgcacactgagcgcaaggttgacgtctatggtttcgtgtcgcgcatccgggctcaacggtgtcagatggtgcagaccgatatgcagtacgtgtttatctaccaggctctcctcgagcactatctctatggcgatactgaactggaagtcacttctctggaaacccacctacaaaagatttacaacaagatccccgggactagtaacaatggcctggaagaagagttcaaaaagctcacctctataaagatccagaacgataaaatgcgcactggcaatctgcccgctaacatgaaaaaaaaccgcgtgttgcaaatcatcccatacgagtttaacagggtgatcattccagtgaaacggggcgaggagaacactgactacgtgaacgccagttttatcgacggataccggcagaaggactcctatatcgcctcacagggtccactccttcatactattgaggatttttggagaatgatttgggagtggaagtcatgttccattgttatgttaacagaacttgaagagcggggacaagaaaagtgtgcccagtactggccctcagacggattagtaagctatggggacatcacagtcgagcttaagaaggaggaagagtgcgagtcatatactgttagagatctgttggtgactaacaccagagaaaacaagtctagacaaataaggcaatttcacttccacggatggcccgaagtaggcattccaagtgatgggaaaggaatgatcagcatcattgccgcagtgcaaaagcagcaacagcaatccgggaaccatccaataaccgtgcactgtagcgccggcgccgggcgcaccgggactttctgcgccttatctacagtgctggagcgggtgaaagcggaggggattctcgacgtattccagaccgtgaagtctctgcgattgcagcgcccacatatggtgcagactctggaacagtacgaattctgctacaaggtcgtccaggagtatatcgacgctttcagcgactacgcgaatttcaagtag

SEQ ID NO: 130902 - DNA, 603 bp, synthetic construct
  misc_feature 1..603: note = Description of Artificial Sequence: Synthetic coding sequence
  source 1..603: mol_type = other DNA
atggattcctggttcatcctggtcctgctgggatcaggcctgatttgtgtgtcagccaacaacgcaacgacagttgcccctagcgtgggtattacgagactgatcaattcgtccaccgccgagcctgtcaaagaagaagcaaagacttccaatccaacctcttccctcaccagtctgtccgttgcaccaacgttcagccccaatatcactctcggtccaacctatttaacaacggtgaattcctctgacagcgataacgggaccacccgaacagcctcgacaaattcaattggcatcaccatctccccgaacggaacctggctccctgacaaccagtttaccgacgcaaggacggaaccatgggaagggaacagctccactgctgccaccacaccggagactttccctccgagcggcaatagcgattctaaggatcgccgcgatgaaactcccattattgctgtaatggttgctctttcatcattgctcgtgattgtattcatcatcatcgtgctgtacatgttgaggttcaagaagtataaacaagcaggtagccactcgaattccttcagactgtccaacggccgcacagaggacgtctag

SEQ ID NO: 130903 - DNA, 2442 bp, synthetic construct
  misc_feature 1..2442: note = Description of Artificial Sequence: Synthetic coding sequence
  source 1..2442: mol_type = other DNA
atggatgatgccgttcagattactaagatctccatggattcctggtttatactggtcttgctcggcagcggccttatttgcgtctccgccaataatgctaccacggtggccccgtcagtggggataacgaggctgattaactcttctactgccgagcctgtgaaagaggaggctaaaacttcaaatcctacttccagcctcacttcactgtccgtggcccccaccttcagccccaacattacccttggcccaacttacttaacaactgtgaactccagcgacagcgacaacgggacaactcggacggcctcaaccaacagcatcggcatcacaatctctcctaacggtacatggcttcccgacaaccagtttaccgacgcaaggacagaaccctgggagggcaattcttccacagctgcaacaacccccgaaacctttcccccctcagggaacagtgattcaaaggataggcgggacgaaacaccgatcatagctgtcatggttgccctgagttcacttctcgtcattgtcttcattataatagtgttatatatgctgcgctttaaaaaatacaaacaagccggctctcacagcaatagtttcaggctgtcaaatggacgcaccgaagatgtcgagccacaaagcgtgcctctgttggcccgctccccctccactaatcgcaaatatccgcctctgcctgtggataagctggaggaggagatcaacagacggatggcggacgacaataaactatttcgcgaggagttcaatgccctgcccgcatgtcccattcaagcgacctgtgaggcggcgtccaaggaagagaacaaagagaagaatcggtacgtgaatattttaccctatgaccacagtagggtacacttgacacccgttgagggcgtaccagactccgattacatcaacgctagctttattaacggttaccaggagaaaaacaagttcatcgcagcacagggccccaaagaggagaccgtgaacgacttctggaggatgatatgggagcaaaataccgctacaattgtgatggtgaccaatctgaaggaacgcaaagagtgtaagtgtgcccaatattggcccgaccaggggtgctggacctacggcaatatccgagtgagcgtcgaggatgtcaccgtgttagtggattatacagtaaggaaattctgtatccagcaagttggcgacatgactaatcggaaaccccagaggctgatcactcagttccactttaccagttggcccgacttcggtgtgccattcacacctatcggaatgctcaagtttttaaaaaaagttaaggcctgtaacccacagtacgctggcgccatagtcgtacattgttccgcaggcgttggccgcaccggcacatttgtcgtgatcgatgccatgctggacatgatgcatacagaacgtaaggtggacgtatatggatttgtgagtagaattcgcgctcagcgctgtcaaatggtgcagactgatatgcagtacgtcttcatttaccaagcactcctcgaacactacctctacggggacacagaacttgaagtaacaagtcttgagacccaccttcagaagatctacaataagattcctggtacctctaataatggcctagaagaagagttcaaaaaacttacatccatcaaaatccaaaacgacaaaatgcggaccgggaatcttcccgcgaatatgaaaaagaatcgtgtcctgcagatcatcccatacgagtttaacagagtcatcatccccgtaaaaaggggggaagagaatactgactatgtgaatgcaagctttattgacggatatcgacagaaggattcttacatcgccagccaaggaccactgctgcacacaatcgaggacttctggaggatgatctgggaatggaagtcctgtagtatcgttatgctcactgagctggaggagcgtggtcaagagaagtgcgctcaatactggcccagcgatggtttggtgtcatacggagatataaccgtagaacttaaaaaggaagaggagtgcgagtcctacactgtgcgcgatctactggtgaccaacacgagagagaacaagagtcgccaaattcggcagttccacttccacggctggccggaggtaggtatcccctccgatggaaagggtatgatttctatcatagcagccgtgcagaaacagcagcaacagagtggaaatcaccctattacagtgcactgtagtgccggcgccggcaggaccggtaccttttgtgccctgagcaccgtcctggagagagtgaaggcagaggggatacttgacgttttccagaccgtcaagtccctacgacttcagcgcccccacatggtgcaaaccttagagcagtatgaattttgttacaaagtggtgcaggaatatatcgacgcattttccgattacgccaacttcaagtag

SEQ ID NO: 130904 - DNA, 528 bp, synthetic construct
  misc_feature 1..528: note = Description of Artificial Sequence: Synthetic coding sequence
  source 1..528: mol_type = other DNA
atggattcttggtttatcctcgtactgctcgggagcgggttgatctgcgtctctgctaacaacgccacaactgtggctccatcagtcgggatcactcggctgattaatagctctacagccgaacccgtgaaagaagaggctaagactagtaatcccacctcctctttgacctctttgtcagtggccccgactttttcacctaacattacattgggtcccacttacctgacaaccgtgaattcctccgacagtgataatggcactacacgtacagcgtcgacaaactctatcgggatcacaatttctcctaacgggacttggctgcccgataatcagttcaccgacgcaagaaccgaaccatgggagggcaattctagcactgccgccactacgcctgagacatttcccccgtccggcaactcagacagtaaggacagaagggatgaaacacctattatcgccgtcatggttgccctgagttctttgctcgtcatcgtgtttatcatcatcgtgctgtacatgctgtag

SEQ ID NO: 130905 - DNA, 417 bp, synthetic construct
  misc_feature 1..417: note = Description of Artificial Sequence: Synthetic coding sequence
  source 1..417: mol_type = other DNA
atggactcgtggttcatactagttctgcttggatctggcctgatctgtgtttccgctaacaatgctactacagtcgctccgagtgttggaattacccgtcttatcaactcttcaactgctgagccagtcaaggaggaagctaaaaccagtaatcccacctcaagtctcacatcgctgagcgtcgctcccactttctcaccgaacattactctgggaccaacttatctcaccactgtgaactcatctgatagtgataacgggactacccggactgcctcaaccaactccatcggtattacaatcagccccaacggtacctggttgcctgacaaccagtttacagacgcacgcacagaaccctgggaaggaaattccagtaccgccgctactactccagaaacttttccaccctcttag

SEQ ID NO: 130906 - DNA, 762 bp, synthetic construct
  misc_feature 1..762: note = Description of Artificial Sequence: Synthetic coding sequence
  source 1..762: mol_type = other DNA
atggactcctggttcatactggttttactgggttctgggttgatttgcgtgagcgctaataatgccacaaccgtggcgccctcagttggtataactcgactaattaactcttctacagcggaacctgtcaaagaagaagctaaaacaagcaaccccacttcatctctgacatcattgtctgtcgcacccaccttcagcccaaatattaccttgggacccacatatttgaccactgtgaacagctcagactccgataatgggacaacaaggacagcctctactaactctatcgggattacgatttccccaaacgggacatggctacccgataaccaattcaccgacgcccgaacagaaccctgggaagggaactccagtactgccgccacaacccccgagacctttccaccatctgacgaaacacctatcattgcggttatggtggctctaagttcccttcttgtaattgtgttcattattatagtcttgtatatgctacgcttcaaaaagtacaagcaggcaggcagtcacagcaatagcttccgtctatccaacgggcggaccgaagatgtcgagcctcaaagcgtgcctctactagcccggtctcccagcactaatcggaagtatccaccccttcctgtggacaaactggaggaggagatcaatcgtcggatggctgatgataacaagttgttccgtgaggagtttaatgctttgcccgcctgtcccattcaggccacatgcgaagctgcgagcaaatag

SEQ ID NO: 130907 - DNA, 1239 bp, synthetic construct
  misc_feature 1..1239: note = Description of Artificial Sequence: Synthetic coding sequence
  source 1..1239: mol_type = other DNA
atgactaatcggaagccgcagaggctaataacccagttccatttcacctcctggcccgacttcggagtcccgttcacaccgattggaatgctgaaattcttaaagaaggtcaaagcctgcaacccacagtacgccggtgcgatcgtcgttcactgtagcgctggggtaggtcgcacaggaacgtttgtggttatcgatgctatgctggatatgatgcacaccgaacgtaaggtggatgtctacgggtttgttagtaggattagagctcagagatgccagatggtccaaactgatatgcagtatgtgtttatataccaggcactgttggagcactacctgtacggcgatacagaattggaagtaacatctttggaaacccatctgcagaagatatataataagattccagggacttcgaataatggtctggaagaagaattcaagaagttgacgtccattaagatccagaatgacaagatgcggaccggcaatctgccagctaatatgaagaaaaacagggtccttcagattatcccatatgaattcaaccgggtgatcataccggttaagcgtggcgaagaaaacaccgattatgtgaacgcatccttcattgatggttatcggcaaaaggacagctacatcgcttcccagggacctctgctgcacacaattgaggacttctggcgaatgatctgggaatggaaaagctgcagtattgtgatgctgacggagcttgaagaacgaggccaagaaaagtgcgcgcagtactggccatcggacgggctagttagctacggggatataactgtcgaactgaaaaaggaggaagaatgcgagagttataccgtgagggatctgctggtgacaaacactagagaaaataagtcaagacagatacgccagttccatttccacggatggcctgaggtggggatcccatctgacggcaagggcatgatctccatcattgccgccgtgcaaaaacagcaacagcagagtggcaatcatccaattaccgtgcactgctctgcaggcgcaggcaggaccgggactttttgcgctctttccactgtgctggaacgcgtgaaagccgagggcattcttgacgtcttccagactgtcaagtcactcagattacagcgtccgcatatggtacaaactctcgaacagtatgagttttgttataaagtggtacaggagtacattgacgctttctccgactatgcgaactttaaatag

SEQ ID NO: 130908 - DNA, 5994 bp, synthetic construct
  misc_feature 1..5994: note = Description of Artificial Sequence: Synthetic coding sequence
  source 1..5994: mol_type = other DNA
atgctgagtcatggggccggactggctttgtggattacgctatctttgctgcaaactggcctggccgaaccggagagatgcaatttcaccttggcagagtccaaggccagcagtcacagcgtttcgatccagtggcgaatactcgggtctccatgcaacttttcactgatttactctagcgatactctgggcgcggctctgtgtcccacatttcgaatcgataatacaacctatggttgtaatctgcaagatttgcaagctgggacgatttacaacttcaggattatctcactcgacgaagagaggacagtggtgttacagaccgacccactgccccccgctcggtttggcgtctccaaagaaaaaactacgagcacttcacttcacgtctggtggaccccctcctccgggaaggtgacctcttatgaagttcagttattcgatgaaaataaccagaagattcagggggtgcaaatacaggagtctacttcttggaacgaatatacttttttcaacttaaccgccggatcgaaatacaatattgcaatcaccgctgtgtcagggggcaagcgctcattcagcgtatacaccaacggcagcactgtgccaagcccagtaaaagacattggtatctcgactaaggccaacagtcttcttatctcatggtcacatggatccggcaacgtcgagcggtaccgcctgatgctgatggacaagggaatactggtacacggcggtgtggtggacaaacatgcaacaagttatgccttccatgggttgacaccagggtacttgtacaatctcacagtaatgactgaggccgcgggtttacagaattaccggtggaaactggtgcggacggcaccaatggaggtgtctaacctcaaagtgactaacgacggctcactcactagtctcaaggttaagtggcagcggcctcctggcaacgtggacagctacaacattactctgtcacataagggcaccatcaaggaatctagagtactggcgccgtggatcacagagacgcacttcaaggagctggttcctgggcgcttgtaccaggtgactgtgtcatgtgtgtcgggtgagctatccgctcagaaaatggcggtgggtcgcacatttccagataaggtcgcaaatttagaggctaacaacaatggacgtatgcgatcactcgtggtgtcctggagcccaccagcaggggactgggagcaataccgcatccttttgttcaatgattccgtagtgctcctgaatatcaccgtgggaaaagaagaaactcagtatgtcatggacgacacaggccttgtgccggggcggcagtatgaagtcgaggttatagtcgagagcggcaatcttaagaattctgaaaggtgccaggggagaaccgttcctttagccgtgctgcagttacgggtcaagcacgctaatgaaactagcctttccattatgtggcaaacccctgtggccgaatgggagaagtacatcatctcactggccgatagagacctgctgctgatacacaaaagcttatctaaggatgctaaggagtttacattcaccgatcttgttccaggaaggaagtatatggcaacggtaacaagcatttctggcgatttaaagaactcaagttcagtaaaggggcggacagtgcctgctcaggtgacagatctgcacgtggctaaccaaggcatgacttcttctctgttcacaaattggacccaagcgcaaggggacgtagagttttaccaggtcttactgatccacgagaacgtagttatcaaaaacgaatctatttcatccgagacatctcgatatagtttccactcccttaagtccggatcattgtactctgtcgtggtgactaccgtgtctggagggatctcttcaagacaggttgttgtggagggcagaacagtcccctcaagcgtgagcggagtcacagtgaataacagtggccggaatgattaccttagtgtgagttggctgctggccccgggcgacgtagataactatgaagtgactctgagtcatgatggcaaggttgtgcagtccctcgtgatagctaagtccgttcgcgagtgtagtttctccagcctgacacctggccgcctgtacactgtgacaatcacaactagatccggtaagtacgaaaatcactctttttcccaggaaaggacagtccccgacaaggttcagggagtgagcgtgtcgaattcagcacgatcagactatctccgagtgagctgggtccacgctactggagattttgaccactatgaggtcacaattaaaaacaaaaacaatttcattcaaaccaagtcaataccaaaaagcgagaacgagtgtgtatttgtacaactagtgcctggacgcctctattctgtgaccgttactactaagtccggccagtatgaggcgaacgaacaggggaatggccgcactatccccgaaccggtgaaggatttgacactgagaaatcggtccacagaggacctccatgtgacgtggagtggggccaacggtgacgtggatcagtacgagattcagctgctgttcaacgacatgaaagtctttccaccgttccacctggtgaacactgcaacagagtaccggttcacctctttgacgccagggagacagtacaaaatcctggtacttaccatttccggggacgtccaacagtctgcgtttattgaggggttcacggtccccagcgcagtaaaaaacattcatatttccccaaacggagcaactgattcgctgacagtgaactggacaccaggaggaggcgacgtcgactcatatactgtgtcggccttccgccattctcagaaggtggatagtcaaactattcctaagcacgttttcgaacacacattccacagacttgaagccggcgaacagtaccagataatgatcgcctcggtctccgggagtctgaagaaccagatcaacgttgtcggacgaacagttcctgcctcagtgcagggcgtgattgccgataatgcctatagttcttattccctcattgtatcctggcaaaaagccgccggcgtggccgagagatatgacatcctcctgctgaccgaaaatggcatcttattgcggaatacaagcgagccagcaaccacaaaacagcacaaatttgaagatttgacccccggcaagaagtacaagattcagattctgactgtcagcggtggtctgttctcgaaggaagcacagacagaaggcagaacagtgcccgccgctgtcacagatcttagaatcactgaaaatagcactagacatttaagcttccgctggaccgcttccgagggcgaattgagctggtacaatatatttttgtacaacccagatggaaacctgcaagaacgggcccaggtcgacccactagtgcagagtttctctttccagaacctactgcagggcagaatgtacaagatggtgattgttactcatagcggcgaactgagtaatgagagtttcatttttggtaggactgtccctgcatctgtttcccaccttcggggttctaaccgcaatactacagattccctgtggtttaactggtcccctgcaagcggagattttgacttctacgaactgattctatataaccccaacggaactaagaaggaaaattggaaggataaggacctgaccgaatggcgtttccagggcctagtgccaggtaggaagtacgtgctctgggtggtaactcattcaggtgacttgagcaataaggttactgccgaatccaggacagctccctccccacctagcctgatgagctttgctgacattgcaaacacttcgcttgccattacctggaagggtccaccggattggaccgattataatgatttcgaactgcagtggctgccaagggacgcacttactgtctttaatccgtacaacaatcgcaaaagcgaaggccggattgtatacggtttgcggcctggcaggtcctaccagtttaatgtcaagactgtcagcggcgattcctggaaaacatatagtaaacccatcttcggttcagtgagaaccaaacctgataagattcagaacctgcattgtaggccccaaaactcaacggccattgcctgttcatggattccgcctgattccgatttcgacggatacagtatagaatgcaggaagatggacacacaggaggttgagtttagtagaaagctggaaaaagaaaagagcctactgaacattatgatgctggtcccacacaagcgttaccttgtcagcatcaaagtgcaaagcgcaggcatgacttcggaagtagtcgaggatagtaccatcactatgatcgatcgcccacctcctccacctcctcatattagggtcaatgagaaggatgtgttgatcagtaagtctagtatcaattttactgtgaattgttcatggttttccgatactaacggagctgttaaatattttacagtagtggtacgcgaggcggacggaagcgacgaacttaagccagaacagcagcaccctctgccttcatacctggagtataggcacaatgcttctatcagagtataccagacaaactactttgcttctaaatgtgcagaaaatcctaactccaactcaaaatcttttaacatcaagcttggtgccgagatggaaagcctcggaggcaagtgtgacccaacccagcagaaattctgcgatgggccactgaaaccccacacagcctaccgaatctctatcagggccttcacccaactgtttgatgaggacctcaaagagttcacgaagcctctctacagcgacacattttttagcctgcctattactaccgaaagtgaaccactgtttggcgcaatcgagggcgtctccgctgggttgttccttattggaatgcttgtcgccgtggtggctctgctcatatgccgccagaaagtgtctcacgggcgcgaacgtccgagcgccaggctgtccatccgccgagacagacctctgagtgtgcacctaaatctgggacagaaaggcaatcgcaaaacctcatgtcccatcaagataaatcagtttgaaggacatttcatgaagctccaagccgacagtaattacctgctttccaaggagtacgaggagctaaaggacgttgggagaaatcagagctgcgacatcgctctcctcccggaaaatcgtggcaagaatcgatacaataacatcctaccttacgacgctacccgagtaaagttaagcaacgtggatgacgatccctgtagtgactacatcaatgcatcatacatacccggcaacaactttcggcgagagtacatcgtgacgcaggggccgctgccgggcaccaaggatgacttctggaagatggtgtgggagcaaaatgtacacaatatagtcatggtaacgcagtgtgttgagaaggggcgggtgaagtgcgaccattattggccggctgatcaagacagcctctactatggcgatcttattctgcagatgctgtccgagtccgtactgcctgaatggacaatccgggagtttaagatttgcggggaagagcaactcgatgcccaccgtctcattagacacttccattacacagtgtggcctgaccatggggttcctgagacaacccagtcactgattcagtttgttagaactgtgagggactacatcaacaggtcacccggagccggcccaacagtggtccactgcagcgccggggtcgggagaactggcacgtttattgctttggatcgaattctgcagcagctggatagcaaagactcagttgacatttatggagccgtgcatgatctgcggttgcatcgggttcacatggttcagacggagtgccagtacgtgtatttacatcagtgtgtccgagatgtattgcgggcccgcaagctgagatctgagcaggagaatccactgtttccaatctacgagaatgtcaaccctgagtaccaccgggatcccgtctattccagacactag

SEQ ID NO: 130909 - DNA, 6648 bp, synthetic construct
  misc_feature 1..6648: note = Description of Artificial Sequence: Synthetic coding sequence
  source 1..6648: mol_type = other DNA
atggaggcggaattctacatggtgatcctgacgtgtctgattttccgaaactcagaaggcttccaaatcgtacacgtccaaaaacaacagtgcttgtttaaaaatgagaaggtggtcgtcggaagttgcaaccggacgatccaaaatcagcaatggatgtggacagaggatgaaaagcttctgcatgtcaaatccgcactgtgtctcgccatctctaatagctctcgcggtccctcgaggtctgcaattttagacagatgtagccaggcaccgcgctggacttgttacgaccaggagggattcctggaagtcgagaatgcctcactcttcttgcagaagcaagggagcagggtcgttgtgaaaaaggctcgcaagtacctgcactcctggatgaagattgatgtgaataaggaggggaagttagtgaatgaatctctgtgccttcagaaggccggcctcggggctgaagtgtccgtgcgatcaacacggaacaccgctcccccacagattctaaccactttcaacgctgtcccagacggattggtcttcttaatccgtaatacaacagaggcttttattcggaacgcagctgaaaactacagccaaaactcctcggagcgccaacacccaaacctgcatatgaccggcatcactgacactagctgggttttgtctaccactcaaccattcagtagtaccacagaggaaactggtcttgcagagcctgagcggtgtaatttcacactagccgagagcaaagcctcctctcattcagtgagtatccagtggaggattctagggtcaccttgcaatttctctctcatctactcctctgacacgttgggagcggcactgtgcccaacattccgcattgacaacaccacctacggatgcaatctgcaggacttgcaggcaggcaccatctataacttcagaataataagcctggacgaggagcgcacggtcgtccttcaaactgatccgctcccacctgcccgcttcggcgtttcaaaggagaaaaccacaagcactagcctgcatgtctggtggactccttctagcggaaaggtgactagctatgaggtccaactgttcgacgagaataatcagaagatccaaggcgtccagatccaagagagcacaagctggaacgaatacacgttctttaatctgaccgccggatctaaatacaacatcgctatcacagcagtgtccgggggtaaacgcagtttctccgtgtacaccaatgggtcgaccgtcccctctcccgtgaaggacatcggaataagcacaaaggcgaattccctgttaatttcatggagccacggcagcgggaacgtggaacgataccgtctcatgttgatggacaagggcattctcgtccatggaggtgtggtagataagcacgccactagctacgcatttcatggactcactcccggctatctatacaatctgactgttatgacagaagctgccggactgcagaattacaggtggaaactggtgagaacagcgccaatggaagtctctaacctcaaggtgactaacgacggctctcttacctctctcaaagtgaaatggcagcgcccgcctggaaacgtcgattcatataatataactttgagccacaaggggactattaaagaaagtagggtcttagcgccctggatcaccgagacccacttcaaagaactggtgcccggaaggctgtatcaagtgacagtgagttgcgtgtccggagagctatctgcacagaagatggctgttggtcgaacattccctgacaaggtagctaacctggaagccaataataatgggcgcatgcgctcattggttgtttcctggagccccccagctggggactgggagcagtaccgaatccttttgtttaacgacagcgtggtgctactgaacatcactgtgggtaaggaagagacacaatatgttatggacgataccggcctggtgccaggtcgacagtacgaggtcgaggtcatcgttgagtcgggtaatcttaagaattcagagcgctgtcaaggcaggaccgtgcccctggctgtactacagctacgggttaaacacgcaaatgagacaagcctgagcattatgtggcagacacccgtcgctgagtgggagaaatacatcatcagcctggccgaccgggacctccttttaatacataagagtctgtctaaagatgcaaaggaattcaccttcaccgatctggtgccaggaaggaagtacatggcaaccgtgacctctatttccggtgaccttaaaaattcctcctccgtgaaaggaagaaccgtccccgctcaggtaacagatttgcacgtggccaaccagggtatgacctccagcttgttcacaaactggacccaggcccaaggggacgtcgaattttaccaggtgctacttattcacgagaatgtggtgattaaaaacgagagcatttcatcagaaaccagtagatacagcttccactcactgaaatccgggtcactgtactcggtcgtagtcaccaccgtcagtggaggcatctcctccaggcaggttgtcgtcgaggggcggaccgtgccgagcagcgtgtctggggtgacagtcaataattctggaagaaacgactatctgagcgtgagttggctgctggcacctggcgatgtcgacaactatgaggttaccttgtcacacgacggcaaggtggtgcagagtctggtgattgccaagagcgttagagaatgctctttcagcagtttaaccccaggccgactctacacagttacaatcaccacccgctcaggcaagtacgagaaccatagtttttctcaggagcggactgtgccagataaagttcagggtgtgagcgtctcgaacagcgcccgcagtgattatctcagggtgtcatgggtccacgccacgggagacttcgatcactacgaggtcacaatcaaaaataaaaacaattttatccagacaaagtctatccccaagtcagaaaatgagtgcgtatttgtccagctggtgccgggccgcctgtattccgtgacagtaaccacaaaatcaggccagtacgaggctaatgagcagggcaatggtaggacaatcccggaacctgtaaaggacctcactctgaggaatagaagtaccgaggatctgcacgtcacctggagtggcgccaatggcgacgtcgatcagtatgagatccagcttctgttcaacgacatgaaagtgttcccacctttccatctagtgaacaccgcaactgagtaccgctttaccagccttacacctggccgccagtataaaatcctggtgctgacaatttcgggagatgttcaacaatcagcctttatcgaagggttcacagtgccatccgctgtcaaaaacatccacatctcaccaaatggggctacagacagtctcacggtcaactggacccctggtggaggcgatgtggacagttataccgtgtccgcattccggcactcacaaaaggtcgacagccagacgattcccaagcatgtctttgagcatacatttcatcgactggaggccggggagcagtaccaaatcatgattgctagtgtctctggatccctgaagaatcagatcaacgtcgttggccggactgtgccagcctcggtgcagggagtaatcgctgataacgcctactccagttatagcctcatcgttagttggcagaaggctgccggggtcgctgaacggtatgatatactattgctgactgaaaacggtatcttattaaggaacacatctgaacctgctacgacaaagcaacacaaattcgaggacctgacccctggaaagaaatacaaaatccagatcctgacagtcagcggggggctgttttccaaggaagcacaaacagaaggaagaacggtgcctgccgcagtgactgatctccgaattaccgagaactcgacaaggcacttgtctttcagatggaccgcgagcgaaggcgagctgagttggtataacatctttttatataaccctgacggcaacctgcaagagagagcccaggttgatcctctggtgcagagtttctcttttcagaacttgctgcaaggacggatgtataagatggtgatagtgacacactccggcgaactctcaaacgagtccttcatctttggtcggaccgtgccagccagcgtctcacacctgcggggcagtaaccgaaatacgactgattccctgtggttcaactggtcccctgcttcaggcgatttcgacttctacgagctgatactgtataacccaaacgggaccaagaaggagaattggaaggacaaagatctgaccgagtggcgattccaagggctggtccctggaagaaagtacgtgctatgggtggtcacacactccggtgatctcagtaataaggtgactgctgagtccaggacggctcctagtccaccatctttgatgagtttcgccgatatcgccaacacgagcctggctattacctggaaaggcccacctgactggactgattacaacgatttcgagctccagtggctgccgcgggatgccctgaccgtgtttaacccgtataataacagaaaaagtgaaggccgaatcgtttacggactgagacccggaaggtcctaccagttcaacgtcaaaactgtgagcggagattcctggaagacctattccaaaccgattttcggaagcgtcaggacaaagcctgataagatccagaacctccattgtcgcccacaaaactccacagccatcgcctgtagttggattccacccgacagcgactttgacggatattcaatagaatgtaggaagatggacactcaggaggtagagttcagtcggaaactggagaaagaaaaaagtcttcttaatataatgatgttagtgccacataagcgttaccttgtgtccattaaggtgcaatccgccgggatgacatccgaagttgtcgaagacagcaccattacaatgattgaccgcccaccacctccccctccccacatccgagtgaatgagaaggatgtattaatctcaaaatcctccatcaacttcacagtcaactgttcctggttcagtgacacaaacggggcagtcaagtactttactgtggttgtccgcgaggctgacgggtccgacgaattgaaacccgagcagcagcaccccttgccctcttatcttgagtacagacataatgcctctattcgggtctaccaaacaaactatttcgcaagcaagtgtgctgaaaacccaaacagcaatagtaaaagctttaacatcaagttgggcgctgagatggaatcactgggtggcaagtgcgaccccactcagcagaaattttgcgacggccctctgaagccccacaccgcctacagaatctctattcgtgccttcacacagctgtttgatgaagacctaaaggagttcactaaacccctgtactctgatacattttttagcctgcctatcaccacggaaagcgagcctctcttcggtgctatcgaaggcgtgtccgcaggcctgtttctgatcgggatgctagtggcagtggtcgccctgctaatatgcagacagaaagtatcccacggacgagaaagaccctctgcaaggctcagcatccggcgcgatcggccattaagcgttcatcttaaccttggacagaaggggaacaggaagactagctgccccattaaaatcaaccagttcgagggccactttatgaagcttcaggctgactccaactatctcttgagcaaagaatacgaagagctcaaggatgtggggagaaatcaatcctgtgacatcgctctcttgcctgagaatcgtggaaagaacagatataacaacatactgccctacgacgcgactcgagtcaagctgtccaacgtcgacgatgacccttgcagcgactatattaacgcaagttatatacctgggaataactttcgcagagaatacattgtgacccaggggccactgccaggcacaaaagacgatttctggaagatggtttgggagcagaatgttcacaatattgtcatggtaacacaatgcgtggagaagggaagggtcaagtgcgaccattactggcccgcagatcaggacagcctgtattatggggacttgatcctgcagatgttgtcagagagcgtgttacccgagtggaccatcagggagtttaaaatttgtggcgaagagcaactagatgcacatcggttaataagacactttcactacacagtttggccagaccatggcgtgcccgaaaccactcagtccttgattcagtttgtaaggacagtgagggattacatcaatagaagtccaggcgccggccctactgtggtgcactgttctgctggcgttggcagaaccgggacatttattgcacttgatagaatcctccaacagttggattccaaagactccgttgacatatatggagctgtccatgatttgaggctgcacagggtgcatatggtgcagaccgagtgtcagtacgtgtacctccaccagtgtgtccgggacgtgctgcgagcgaggaagcttcggtccgagcaggagaaccctctatttcctatatacgaaaatgttaatccagagtaccatcgcgatccggtgtactcccggcattag

SEQ ID NO: 130910 - DNA, 5724 bp, synthetic construct
  misc_feature 1..5724: note = Description of Artificial Sequence: Synthetic coding sequence
  source 1..5724: mol_type = other DNA
atgctctcccacggagctggtctggccctgtggattaccctctcactgctgcagacggggcttgccgaacctgagagatgtaacttcacactcgccgagtctaaagcatcctcacattcggtttccatccaatggcgaatcctggggagcccctgcaatttcagcctcatttacagttccgacaccctgggggcagcgttgtgcccgaccttccggatcgacaacacgacctatggatgtaatctccaggatctacaggcaggcactatttacaactttcgtataatctctctggacgaggagagaaccgtcgtcctgcagacagatccactgcccccagccaggttcggagtctcaaaggaaaaaacgacctccacctctctccacgtctggtggacaccttctagtggcaaagtcacatcatatgaagtgcaattgtttgatgaaaacaaccagaagatccagggcgtccagatacaggaaagcaccagctggaatgaatatactttttttaacctgaccgccggcagtaaatataacattgcgatcacagcagtaagcggaggaaagcgaagcttctcagtctatacaaatggtagcaccgtgcccagtcctgtaaaggacataggcatatctaccaaagctaactcacttctcatttcatggagccatggctctggtaacgttgagcggtaccggctcatgttgatggataagggcattttagttcatgggggagtcgtcgataagcatgctaccagctacgcatttcatggcctgactccaggttacctgtataacctcaccgttatgactgaagccgctggcctgcagaattaccgatggaagctggtcaggacggcgcccatggaggttagtaatctcaaggtgactaatgacgggagtctaactagtctaaaggtgaagtggcaacggccccctggtaacgtagactcttacaacatcaccctatcacataagggcacaatcaaggagtctcgggtgttagcaccctggatcaccgagacccactttaaagaactggttccaggtcggttgtaccaggtgactgtgtcatgcgtatccggcgagctgagtgcgcagaaaatggccgtggggaggactttcccgttggctgtgctgcagttaagggtcaagcatgcaaacgaaacttccctttccattatgtggcagacgccagtggccgagtgggagaaatacattatatctcttgctgaccgggacctgcttctgatccacaagagcttgagtaaggatgccaaggagtttactttcacagacttggtgccaggacgcaagtatatggccactgttacaagtatcagcggagacttgaagaactcaagttctgtgaaaggccgaacagtgccggcccaagttacagacctccacgtcgccaaccaaggaatgaccagcagcctatttacaaactggacccaggcacagggcgacgtagaattttaccaggtactgctgatccacgaaaatgtggtcatcaagaacgaatcaataagttcggagacctcccgatacagcttccatagcctgaaatctggcagcttgtactcagttgtcgtgactacagtctcgggtgggatctcatcacgtcaggttgtcgtagaaggccgcacagtaccgtcaagtgtgagcggggtgaccgtcaacaattctggaagaaacgactacctgtccgtcagttggctgttggcccccggggatgtcgataattacgaggtgaccttgagccacgatggaaaggtggtccagagtctagtaattgctaagtccgtccgcgagtgttccttttccagcctcacccccgggaggctgtatacagtgaccattacgacccgatctgggaagtatgagaaccattcctttagccaggaacgcactgttccagataaagtccagggagtctccgtctctaacagcgcgagatccgactacctgcgcgtgagctgggtccacgcaacgggggactttgaccactacgaagtgaccattaagaacaagaacaacttcattcagaccaagtctattccaaaatcggaaaacgaatgcgtctttgtgcagcttgtgccaggaaggctgtacagcgtgaccgtcacaaccaagtctggacaatatgaagccaacgaacaggggaatggacggactattcctgaacccgtgaaagatcttacactgcgtaaccgctcaactgaggaccttcacgtcacctggtccggagccaatggcgacgtggaccagtacgaaatccagcttctgtttaacgacatgaaggtgtttcccccatttcatctggtgaataccgccacggagtaccgttttacatctcttactcctgggcgacagtacaaaatcctggtgctgactatatccggggatgttcagcaatctgcctttattgagggcttcacagtgccaagtgctgtcaagaacatccacatcagccccaatggagccaccgatagccttactgtcaactggacacctgggggcggtgatgtcgactcttacacagttagcgccttccgccatagccagaaagtggatagccagacgatcccaaagcacgtcttcgaacacacgttccacaggctcgaagcgggagagcagtaccaaattatgattgcttctgtgagtggatcgcttaagaatcagattaacgtagtgggtagaactgtgcctgcgtccgtgcagggggtgatagcagacaacgcctatagctcatatagtctcatagtgtcctggcagaaagctgccggtgtggccgagaggtacgacattctgctcctcactgagaatggtatcctgttgagaaacacttcggaacccgccaccacgaaacagcacaaatttgaagacctgacgcctggtaagaaatacaaaattcagatcctgaccgtatcaggtgggctgttttccaaggaagcacagaccgaaggcaggactgtcccagccgcggtgaccgacctacgcataaccgagaatagtactcgtcacctatccttccgttggaccgcaagcgagggtgaactgtcttggtacaatatattcttgtataatcctgatgggaatctgcaggagcgggctcaggttgatcccttggtgcaaagtttttcattccagaatttgttgcaggggcgcatgtataagatggtaatagtgacccactctggggagctatcgaacgagagcttcattttcggccgcacagtgcccgccagcgtgagtcacctccggggatccaataggaacaccacggactccctgtggttcaattggagtccagcatccggggacttcgacttttacgagctgatcctctacaatcccaacggcacaaagaaagaaaactggaaagacaaagacctgaccgaatggcggttccagggcctcgttcccggaaggaaatatgtcctctgggtcgtgacacacagtggggacctgtccaacaaggtgacagcagaaagtcggaccgctccctcgcccccaagcctgatgtcatttgcagatatagccaacacgtctcttgctattacttggaaaggtcccccagattggaccgactataacgactttgagttgcagtggctgcccagagacgccctgaccgtattcaacccctataataaccggaagtcggaagggcgcattgtatacgggcttcgcccaggcaggtcttaccaattcaacgtgaaaacggtctccggtgatagttggaagacctactctaagcccatctttggctctgtaagaaccaagcctgacaagattcaaaatctacattgtcgcccacagaactctactgccatagcgtgcagctggattcctcccgattcggacttcgacggttatagcatagagtgcagaaaaatggatactcaggaggtagagtttagtagaaagctggaaaaggagaagagcctgcttaatatcatgatgctggtcccgcacaagagatatcttgtgtctattaaagtgcaatcggccgggatgacatctgaagtcgtggaagattcaaccattacaatgattgaccggccgccacctcctcctccccacatccgagtgaatgaaaaggacgtgctgatttccaagagcagcattaattttaccgtcaactgctcctggttttcagacaccaacggtgctgtaaagtactttaccgtcgtggtgagagaggctgatggtaacgacgagctcaaaccagagcagcagcacccacttccatcctatctggaataccgccacaacgcaagcatcagagtataccagacaaattatttcgcatcaaaatgcgccgaaaaccccaattctaacagtaagagttttaacataaaactcggagccgagatggaaagtctggggggtaagtgcgacccaactcagcagaagttttgtgacggaccgctcaaacctcacacggcctaccgtatcagcatccgggccttcacacagttgtttgatgaggacctgaaggagtttacaaagccgctgtactcagataccttctttagcctccccatcaccacagagagcgagccactttttggggcaatagagggtgtgtcagctgggttattcctcatagggatgttggtcgctgtcgtggctctgctgatctgtagacagaaggtgagtcacggcagggaaaggccatccgcccgtctgagtattaggcgggaccgtccgctgagcgtccatctcaacctgggccaaaagggcaataggaagaccagttgtcccatcaagattaatcagtttgaaggccattttatgaagctgcaggccgacagcaattatctcctgagcaaggaatacgaggagctcaaggatgttggtaggaaccagtcttgcgatattgccctactaccagaaaacaggggcaagaacaggtacaataatattcttccttatgatgccacccgcgtgaaactctctaatgtcgatgacgatccttgtagcgactacattaacgcttcctatatccctggaaataattttcgaagagaatatatcgttacccaggggcctttgcctgggaccaaggacgacttttggaaaatggtctgggagcagaatgtacacaacatcgttatggtaacacagtgcgttgagaaaggacgcgttaaatgcgaccactattggcccgccgatcaggattccctatattacggggatctcatcctgcagatgctgtctgagagtgtgctacccgagtggaccattcgggagtttaaaatctgtggggaggaacagctcgacgcccatcgcttgattagacacttccattatactgtgtggcctgatcatggagtccccgagactactcagtctctcatccagttcgtgaggacggtgcgggattatattaataggtccccaggcgcagggcccacggtggtgcattgttctgccggagtggggagaacgggaacattcattgccctggatcgtatactgcagcagctggactccaaggacagcgttgacatctatggcgccgtacacgatctgcggctccacagagtccatatggtgcaaacggaatgtcagtacgtgtatcttcaccagtgtgttcgcgatgttctgagggctcgcaaactgcgtagcgagcaggagaatcccctctttccgatttatgaaaacgtgaatcccgaatatcaccgtgatcctgtgtattccaggcattag

SEQ ID NO: 130911 - DNA, 2760 bp, synthetic construct
  misc_feature 1..2760: note = Description of Artificial Sequence: Synthetic coding sequence
  source 1..2760: mol_type = other DNA
atggaggccgaattctatatggtcatcttaacctgtcttatttttcggaactcggaaggcttccagatagtccacgtccaaaagcagcaatgtttgttcaaaaatgagaaagtggttgtaggttcttgcaacagaactatccagaatcagcagtggatgtggacggaagatgagaagctgctccatgttaaatctgccctgtgtctggcgatttctaattccagcagaggcccatcccgaagcgcgatcctggaccgttgctcccaggccccacgctggacctgttacgaccaagaaggatttcttgaggtcgagaatgcctcgctgttcctgcaaaagcaggggtctcgcgtcgtcgtaaaaaaagcgcggaagtatctgcacagctggatgaagatcgatgtgaataaagaagggaagctggttaatgaatcactgtgtctgcaaaaagctggactcggtgccgaggtgtcagtgcggtcgacaagaaacaccgccccgccccagatcctgactacctttaatgcagtgccggatggcctggtctttctgatcagaaatactacagaggctttcatccgcaatgccgccgagaattacagtcagaactcttctgagcgacaacacccaaacctgcacatgaccgggattactgatacctcctgggtcctgagcacaacccaacctttcagcagcactaccgaggagactgggctggccgagcccgagagatgcaactttactctcgccgaatccaaagcatcatcccattctgtttcaatccagtggaggattcttggttccccttgcaacttttcgctcatttattccagtgacacactgggtgctgccctctgcccgaccttcaggatcgacaatactacatacggatgtaacctgcaagatttacaagcaggtacgatatataacttcaggatcattagtttggacgaagagcgaactgtagttctccagaccgatcccctgccccctgcccggttcggtgtctctaaggagaagacaacttcaacttctctgcatgtgtggtggacaccatcctcagggaaagttacatcttatgaagtgcagctcttcgatgagaataaccagaaaatccaaggggtacagatccaggaatctacatcatggaatgagtatacttttttcaacctgacagcgggtagcaagtataacatcgccataaccgcggtgagtggcggtaaacggtcattctcggtctatacaaatggctccactgtcccttccccggtgaaggacatcggcatatcgacaaaggcaaatagcttattgatatcatggagccatggctccggaaacgtcgaacggtatcggctcatgctgatggataagggtattttagtccacggcggcgtggtagataaacatgccacaagctatgcatttcacggattgaccccagggtatttgtacaacctcaccgttatgacagaagcagcaggactccagaactatcgctggaagctggtgcggacagcgccaatggaggtgagtaatctgaaggtgactaatgacggaagccttacaagcttgaaagtgaagtggcagcgccctccgggaaacgtggattcctacaacataactcttagccacaaaggaacaatcaaagaaagcagggtccttgctccctggatcacagaaacccatttcaaagagctggtgccaggaaggctataccaggttaccgtctcctgcgtctcgggcgagctatccgcgcaaaagatggccgtcggcaggaccttccctgacaaagtggcgaatctggaggccaacaataacggcagaatgaggagcttggtcgtgtcgtggagccccccagccggggattgggaacagtatcgtatactgctgtttaatgattcggtcgttctgctgaacatcacagtgggtaaggaagaaacacagtacgtgatggacgacactggtctggtgccaggccgtcagtatgaagtggaggtgatcgtggaatccggaaatctcaagaacagtgagcgctgccagggccggaccgttcctctggcagtactacagttgcgggtgaagcatgccaacgagacaagcctctccataatgtggcagactcccgtcgccgaatgggagaaatatatcatcagtctcgctgaccgggatttgttgttgatccacaaaagcctgtctaaggacgccaaagaattcacctttacggacctagtgcctggaaggaaatacatggcaacagtcacctccatttcaggagatttaaaaaactcctccagcgtgaaagggcggacggtgcccgcacaagtaaccgacttgcacgtagccaaccagggcatgacttcgagcctttttaccaactggacccaggcccagggagatgttgagttctaccaggtccttctgatccatgagaatgtggtgatcaaaaacgaatcgattagctccgaaacctcacgctactctttccattcattaaagagcggatctctttacagtgtggtggttaccaccgttagtggcggcatctcctcacggcaagtggtggtagaggggcgtacggtcccagacaaagttcagggtgtctcggttagcaacagtgccaggtccgactacctgagggtgtcttgggttcacgctaccggcgatttcgatcactatgaagttaccattaagaataagaacaatttcatccagaccaaagctttcccatcacagaagactaacgtgtaccttttctcctag

SEQ ID NO: 130912 - DNA, 5724 bp, synthetic construct
  misc_feature 1..5724: note = Description of Artificial Sequence: Synthetic coding sequence
  source 1..5724: mol_type = other DNA
atgctgagtcacggcgctggcctagcactatggataacactgagcctgctgcagaccggcttggctgaacccgagcgttgcaactttacacttgcagaatcaaaggctagctctcactctgttagtatccagtggcgcattttaggttccccatgcaacttcagcctgatctattccagcgatacccttggggctgccctgtgccccacattccgcatcgacaacacaacatacggatgcaacctgcaggacctgcaggcggggaccatttacaacttccgcattatctccctcgatgaagagaggactgtggtcctacagacagatccattacctccagctcggttcggcgtgtctaaggagaagaccacttctacatcgctacacgtgtggtggacccccagcagcggcaaggtgactagctatgaagtgcagctctttgacgagaataatcagaaaattcaaggagtgcagatccaggaatccacaagctggaatgagtacacctttttcaatctgaccgccggttccaaatacaatatcgcaatcacagcagtgtctggcggaaaacgctcattctccgtgtataccaacggcagcactgtcccttcccccgttaaggacatcgggattagcaccaaggctaatagtctgctgatcagctggagccatgggtcagggaacgtcgagcgctacaggttgatgctgatggataagggcatcctggttcacggtggagtcgtggacaagcatgctacaagttatgccttccatgggctgacacccggctacctttacaaccttaccgtcatgaccgaagcagccggactgcagaattaccgctggaagctggttcggacagctccaatggaggtttcaaacctgaaggtaaccaatgatggatcccttacatcactgaaggtcaaatggcaacgcccccccgggaatgtggacagttataacattactctttctcacaagggaactattaaggaaagcagggtcctcgctccttggataaccgagacccatttcaaggaactcgttcctggtcggctgtatcaggtgactgtatcatgtgtgtcaggtgagctgagcgctcaaaaaatggctgtgggtagaacctttcctcttgccgtcctccagctccgtgtcaagcacgctaacgagacctcactaagtataatgtggcagacacccgtggctgagtgggagaagtacattatctcccttgcggatagagatttactactcatccataagtccttaagtaaggatgcaaaggagttcaccttcacggatctcgtgcctggacgtaagtatatggccaccgtgacatctatatccggagatctgaaaaattcttcatccgttaaaggcaggacagtgccggctcaagtcacagaccttcatgtggccaatcagggcatgacgtcatcattgtttacaaattggacgcaagcacagggcgacgtggagttctatcaggtcctgcttattcacgagaacgttgtgataaagaacgaatctatttcaagcgagacctctcggtactcttttcactccttgaagtcaggctccctgtatagcgtcgtggtgacaacagtgtcaggagggatttcttctagacaggtcgtcgtagaggggcgaactgtgccatcatcagtgagcggggtcacggtgaataattccggccgtaacgattatctctccgtgtcttggctgctggcccccggagacgttgataattatgaggttactctgtcccacgacggaaaagtagtacaaagtctcgtaatagcaaagtcagtcagagagtgctctttctcctcgctgacaccaggacggctgtatactgtaaccatcaccactagaagtggtaaatatgagaaccactctttctcacaggagaggacagtgcccgacaaagtccaaggcgtgagtgtgtcaaattccgcacggtcagattacttgagagtctcatgggtgcacgccactggcgattttgatcactatgaagttaccattaaaaataagaacaacttcattcagactaaatccatccccaagtccgaaaatgagtgtgtgttcgtccagcttgttccaggtagactctactccgtgaccgttaccactaagagcggacagtatgaggctaacgagcagggcaatggtaggaccatacccgagcctgtgaaggacctcacactgcgcaaccgaagcacagaggatctgcacgttacctggtctggagcaaatggtgacgttgatcagtacgagatccaactcttgtttaacgacatgaaggtgtttcctcctttccatttagtgaataccgcaaccgagtatcgattcacctccttaactcctggccgccaatataaaattcttgtcttgaccattagtggagacgtccagcaaagcgcttttattgaggggttcacagtgccaagcgctgtgaaaaacattcacatcagcccgaatggggctacagactcactcacagtaaattggacgcccgggggtggtgatgtggacagctacaccgtgtccgccttcagacactctcagaaggtggactcacagacaattcctaagcacgtgtttgaacacacatttcatcgcctggaggctggagaacagtaccagatcatgattgctagtgtctccggctccttaaaaaaccagatcaatgtggtaggccggacggtaccggcctctgtacagggggtgatagccgataacgcctacagcagctactccctcattgtaagttggcagaaagctgccggcgtggctgagcgctacgacattctccttctgaccgaaaacggtatcctcctgaggaacacctcggaacctgcaacgaccaagcagcacaagtttgaagatcttacacccggcaaaaagtataaaatccagatcctcacggtctcagggggactattctctaaagaggcccaaactgaggggaggactgttcctgcggcggtgaccgaccttcggatcaccgaaaacagcacgaggcacctatccttccggtggacggcatccgaaggagaactgagctggtataacatcttcctgtataatcccgacggaaatctgcaggaacgagctcaagtcgaccccctggtccaaagtttctcttttcagaacctgctgcaaggacgcatgtacaagatggtgatagtcactcactccggagaactaagcaatgaaagctttatctttggaaggaccgtccccgcctctgtttcgcacctgaggggaagcaatcgcaacaccacagattccctttggttcaactggagtcctgcatctggggatttcgacttctacgaactgatactctataaccccaacggtacaaaaaaggaaaactggaaggataaagatttgacagagtggcgcttccaggggctcgtgcccggacgaaagtacgttctctgggtggtgactcatagtggggatctaagtaataaagttaccgctgagagcaggacagccccttcccctcctagtctgatgagcttcgctgatattgcgaataccagcctggctattacatggaaaggtccccccgactggactgattacaatgactttgagctgcaatggctccctagggacgctctgaccgttttcaatccatataataatcggaagtcggagggtcgaatcgtgtacggcctgcggcctggtaggtcataccagtttaatgtcaagactgtgtctggcgattcctggaaaacctacagcaaacctatatttggctcagtgcgtaccaagccagacaaaattcagaacctgcattgtagaccccagaatagtactgctattgcttgcagttggattcctccggattccgacttcgacggctactcaatcgagtgtaggaagatggacacacaggaagtcgagttttctaggaagttggagaaggagaagtctcttctgaatataatgatgctggtgccacacaagaggtacttggtgtccatcaaggtgcagtcagccggaatgacaagcgaggtagtcgaagacagcacaattacaatgatagacagaccacccccccccccaccccatatacgcgtcaatgagaaggacgtgctcatcagtaagtcaagcattaattttactgtcaattgtagctggttcagtgatacgaatggtgctgttaagtattttaccgtggtggtcagagaggcagacggtagtgatgagcttaagcccgaacagcagcaccccctgccaagttatctcgagtaccgtcacaacgcgtccatccgagtgtaccaaaccaactacttcgcctctaagtgcgctgagaatccaaactcaaatagcaaatcttttaatataaaacttggtgccgagatggaatcactggggggtaaatgcgatcctacccaacagaagttttgtgacgggcctctcaaaccgcacactgcctaccgcatcagtatcagggcttttacacagctttttgacgaggatcttaaggaatttacaaagcctctgtacagtgatactttcttctctttgcccatcactacagaaagcgagcctctgttcggcgccatagaaggtgtgtccgcaggcctttttctgatcggcatgcttgtggctgtcgtggcgttgttaatctgcaggcagaaagtttctcatggccgtgagcggccttctgccagactttctatccgcagagatagacctctgagcgtgcatctgaatctggggcagaaaggaaaccgtaagacctcctgtccaatcaagatcaatcagttcgagggccattttatgaagttacaggcagactccaattatttactgtccaaggaatacgaagaacttaaagacgtgggcaggaatcagagttgcgatatcgccctcctaccggagaatagaggcaagaacagatacaataacattctgccttatgacgccacccgcgtaaagctgtctaacgttgatgacgacccctgtagcgattatatcaacgcttcttacatcccaggaaataactttaggcgcgaatacattgtcacccagggccctttgcccggtactaaagacgacttctggaagatggtgtgggaacagaacgtccacaacatcgtgatggtgacccagtgcgtcgagaaggggcgcgtaaaatgtgaccattattggccagcagaccaggattctctgtattacggagacttaattctccagatgctgtcggagagcgtgctcccggagtggactattagggagtttaaaatctgtggagaggagcagctggacgcccatcggctgatcaggcactttcactataccgtatggcctgaccacggcgtgcccgagaccactcaatctctaatccaattcgtgcggacagtgcgtgattatatcaacaggtctcccggcgccgggccgacggtcgtgcattgctctgccggggtaggccggaccgggacttttatcgcactggatcggatcctgcagcagcttgactcgaaggattcggtggacatatacggcgccgtccacgacctaagactccatcgggtgcatatggtccaaacggaatgtcaatacgtgtatctgcaccagtgcgtgagagatgtgttgagagcgagaaaactgcggagcgaacaagaaaaccccctctttccgatttatgaaaacgtgaaccccgagtaccaccgcgatccggtgtatagtcgccactag

SEQ ID NO: 130913 - DNA, 621 bp, synthetic construct
  misc_feature 1..621: note = Description of Artificial Sequence: Synthetic coding sequence
  source 1..621: mol_type = other DNA
atggctctaccttgcaccctaggattaggcatgctgctggccctgcccggggcactaggcagtggcggctctgctgaggattcggtgggcagttcttctgtgacagtagttctacttctgctgctgctcctcctactcgctacaggtctcgcccttgcctggagacgtctttctcgtgatagtggtgggtattaccatccagctcgcttaggcgccgccctctgggggaggaccagaaggttgctgtgggcatcgccccctggccgttggctgcaggctcgcgctgaactgggaagcacggataacgacctggagagacaggaagatgaacaggataccgactacgatcacgtggccgatggcggtctgcaagcagatcctggggagggcgagcagcaatgcggggaggcctcctctccggagcaggtccctgttagggcagaggaagcccgcgactcagacaccgagggagatctcgtgctgggctctccagggcctgcctctgccggcggctccgccgaagccctcctgtctgacctgcatgcattcgctgggagcgcggcgtgggacgacagcgcacgcgccgccggaggccaagggctgcatgtgaccgccctgtag

SEQ ID NO: 130914 - DNA, 4152 bp, synthetic construct
  misc_feature 1..4152: note = Description of Artificial Sequence: Synthetic coding sequence
  source 1..4152: mol_type = other DNA
atggtacacgtcgcgaggctcttgctgcttctcctaacctttttcttgcgaactgacgctgagacgccccccagatttacacgaacaccagtcgaccagactggggtgagcggcggagtggcctcttttatttgtcaggctactggggacccccgcccaaagattgtgtggaataagaaaggcaagaaagttagtaaccagaggtttgaagtgattgaatttgacgacggatctggtagtgtcttacggattcagccactgcggacacccagagatgaagctatttatgagtgcgtggcctcaaacaacgtgggagagattagcgtgtctactcggcttacggtcctgagagaagaccaaatccctagagggtttcccacaattgatatgggtccacaactgaaggtggttgagcggaccagaactgcaaccatgctgtgcgccgcatcagggaacccagaccccgaaatcacctggtttaaggactttctgcccgttgatacttccaataataacgggcgcataaaacagctgcgctctgtcagtgtttgcgcaacttatcacactggtgccctgcagattgaacagtccgaggagtctgatcagggaaaatacgaatgcgtggccacgaactctgcagggacacggtacagcgcgcctgccaacctatatgtgagagtgaaccggaaggtaaggagagtccctccgcggttcagcataccacccacaaaccacgagataatgccgggcggatcggtcaacataacatgcgtggctgtcggatctcccatgccctatgttaagtggatgctgggggcagaggacttgacacccgaagacgatatgcccatcggtcgcaatgtcctcgaactcaacgatgtgcggcaatcggccaactacacttgtgttgctatgagcaccctgggggtaattgaagccatcgctcagatcactgtcaaagcacttcccaagccgccaggcacgcccgttgtaacagagagcaccgcgacttccattaccctgacttgggactcaggaaatcccgagccagtgtcctactatatcatacagcacaagccaaaaaattccgaggagctctacaaggagattgacggagttgctaccacccgctattctgttgccggattgtctccgtattctgactacgagttccgggtggtggctgtgaacaacatcggccggggccctccaagcgagccagtcctgactcagaccagtgaacaggccccatcttcagcccccagggatgtacaggccagaatgctaagttctacaaccattctcgtccagtggaaagagcccgaagagcccaatggccagatacagggatatcgagtttactatactatggatccaacccagcatgtcaacaactggatgaaacacaacgtggcggattcgcaaatcactaccattgggaacctggtgcctcaaaaaacttatagcgtcaaggtcctggcattcacaagcattggggacggcccgctgagcagcgatatccaggtgattacccaaacgggagtgcccggccagccactgaactttaaggccgagccagaatccgagacctctatcctcttatcctggactccgccgagaagcgacacaattgcaaattatgagctggtttacaaggacggagaacacggggaggagcaaaggatcacaattgagccgggaacttcttataggcttcagggattgaagcccaatagcctctattacttccgcctcgcagcgcgcagtccccagggccttggagcctctacagccgagatatctgccaggacaatgcagtcttccaagggttactacatcattattgtgcctctgaaaaagtcccgcggcaagttcattaaaccatgggaatctccagacgagatggagctcgacgaattgcttaaggagattagccgcaagcggcggagcattcgttatggaagggaggttgaactgaagccctacattgctgcacatttcgatgtgctgcctaccgagtttactcttggggatgataagcactatggagggtttacgaataagcaattgcagtccggccaggaatacgtgtttttcgtgcttgctgtgatggaacatgctgagtcaaagatgtatgccactagtccttacagcgacccagtagtgagcatggacctcgatccacaacccatcacagacgaagaggaaggcttgatctgggtcgtcggccccgtgctcgcagtcgtttttattatttgcattgtcattgccatcctgctctacaaacggaagagggccgaaagtgacagtcgcaaatcgagcatccccaacaataaagagatcccatcccatcatccaacggatccagtggaacttcgacggcttaatttccaaacacctgggatggcaagtcaccctcccatccctattctcgagctcgctgatcacatagagcggctcaaagctaatgacaatctcaaattttctcaagagtatgagagcattgatccgggacaacagttcacttgggaacacagtaacctggaggtgaacaagcctaaaaatcggtacgcaaatgtaatagcgtatgaccactcgcgagtgctgctgtccgctatcgagggcattccagggagtgactacgtcaacgccaattatattgacgggtacaggaaacagaacgcctacattgctacacagggcagcctcccagagactttcggcgatttttggcggatgatctgggaacagagaagcgccacagttgtcatgatgaccaagttggaggaaagaagtagggtgaaatgcgaccagtattggccgagccggggtaccgagacacacggcctggtgcaagtgaccctgctggacactgtcgagctggccacctactgtgttcgcacatttgctctgtacaagaacgggtcctccgaaaaacgggaggtgagacagtttcaattcaccgcgtggccagaccacggtgtacccgaacacccaactcctttcctggccttcctcagacgagtgaaaacttgcaacccaccagatgccggtccaatggtggtgcactgtagcgcgggcgtgggccggactggatgttttatagtcattgatgccatgcttgaaagaatcaaacatgagaagacggtcgacatttacggtcacgtaacactcatgcgagcacagcggaactacatggttcagacagaggaccaatatatattcatacacgatgccctgctggaggctgtcacctgcggcaatacagaggttcccgcacgaaatttatatgcctatattcagaagctcacacagattgagacaggcgagaatgtgacaggcatggagctggagtttaaaaggctggcttcctcaaaggcacacactagcaggtttatcagtgcaaacctgccttgcaacaaattcaaaaaccgcctagtgaacatcatgccatatgagtctaccagggtatgcctgcagccaatcagaggagtggagggaagtgactacatcaacgcgtctttcatcgatggttatcgacagcagaaggcatatatagctactcaagggccattagcggagactaccgaagatttctggcggatgctgtgggagcacaattccaccatagtggtcatgttaacaaaactacgagagatggggagagagaagtgtcaccagtattggcccgccgagaggtcggcacggtaccaatactttgttgtagacccaatggctgagtataatatgccacagtatattctacgagagttcaaggtgaccgacgcccgagacggacagagccgtaccgtgcggcagttccagttcacagactggccggagcaaggcgtgccaaagagcggagagggattcatcgattttattggtcaggtgcacaagacaaaagagcaattcggtcaggatggacctatatccgtgcattgctccgccggcgtgggtcgtacaggtgtgtttattacgttgagtatcgtgctcgagcgcatgagatatgagggcgtcgtagacatatttcaaaccgttaaaatgcttcggacccagcgtcctgccatggtacagaccgaagatcagtatcagttcagttatcgggcggccctagagtacctggggtccttcgatcactatgcaacctag

SEQ ID NO: 130915 - DNA, 4521 bp, synthetic construct
  misc_feature 1..4521: note = Description of Artificial Sequence: Synthetic coding sequence
  source 1..4521: mol_type = other DNA
atggtccatgtggcacgcctgctgctccttctactcacttttttcctgaggaccgatgctgagacacccccaaggttcacgaggaccccagtcgaccagaccggagtgagcggaggcgttgccagctttatctgccaagccaccggcgatcctagacccaagatagtctggaacaagaaaggaaagaaagtgtccaaccagagatttgaggtgattgagtttgatgacggttcaggctcagtgctgcgaatacagcctctccggaccccccgagatgaggcaatatacgaatgcgtggccagtaacaacgtcggggagattagcgtgtcaaccaggttaaccgtgctaagagaggatcagatcccaaggggatttcctactatcgacatgggtccccagctcaaggtagtggagagaactaggaccgctactatgctgtgtgccgcttccggcaatcccgatccagaaatcacctggttcaaagacttcctcccagtggacacgagcaataacaacggtcggataaagcagttaaggagcgaatccataggcggaacccccatccgcggcgcgctccaaattgagcagagtgaggaaagtgaccaggggaaatatgaatgcgtggctacgaacagcgcaggcactcggtacagcgcacctgcgaatttatatgtgcgggaactgcgcgaggtgcgcagagttccacctagattcagtatccctcccactaaccatgaaataatgcctggaggtagtgtcaacatcacatgtgtcgctgtgggcagtcctatgccatatgtcaaatggatgttgggagcggaggatctgactcccgaagatgacatgccgatcggacgcaacgtcttggagctcaacgacgtaaggcagtccgctaattacacttgtgtcgctatgagcactcttggcgtgatagaggccatagctcagataaccgtgaaggctctgcccaagccccccggcacacccgtagtgactgagtcaactgcgacatcaattactctgacctgggattcaggtaaccctgaacctgtgtcatattacatcatccagcataagccaaagaactctgaggaactctacaaggagatagacggggtggctaccacaagatatagcgtcgcgggcttgtctccatacagcgattacgaattcagggtagtggcagttaataacataggcagaggacccccttctgagcctgtgctaacacagaccagcgagcaggcaccttcttccgccccccgggatgtgcaggcaagaatgctcagctccaccacaattctcgttcagtggaaggagcctgaggagccaaacggacagattcagggctaccgagtatactacaccatggaccctacccagcacgtaaataactggatgaaacacaatgtggcagacagccaaataacaacaattggcaatctggtacctcagaaaacgtacagcgtaaaggtcttggcttttaccagcatcggcgacggtcctcttagctctgatatccaggtgatcacacagacgggagtccccggccagcctctgaattttaaagcagagcccgagagcgaaacctccatcctgctttcatggaccccccctcggtctgacacaatcgctaactatgagctcgtatataaagatggcgagcacggagaggagcagaggattaccatcgaacctggaacgtcctatcggcttcaagggctcaagccaaactccctctattactttcgccttgccgcccggtcaccacaaggactgggcgcctctacagccgaaatctccgccagaacaatgcagtctatgttcgccaaaaacttccatgtgaaggccgtgatgaaaaccagcgttctcctgtcatgggaaattcccgagaactacaattccgccatgcccttcaagatcctatacgatgatggtaagatggtggaagaggtggacgggcgggcaacacagaaactcattgtgaatctcaaacccgagaagtcctacagttttgtgttgacaaatagaggtaacagtgcaggcggacttcagcaccgcgtaacggccaagaccgcaccagatgtgttgcgcactaagcccgcatttattggaaaaaccaatctggacggaatgataaccgtccagctccctgaggtacccgctaacgagaatatcaagggatactacattatcatcgttccactcaagaaatctcggggcaaattcatcaagccatgggagtcaccagacgagatggagctcgacgaactgctgaaggagatatccaggaagaggagaagtattcgatacggcagggaggtggaactcaagccatacatcgcggcacactttgatgtcctgcctactgaattcacgctgggcgatgacaagcactatggcggatttacgaacaaacagttacaatcaggacaggagtatgtattcttcgtcctcgccgtcatggaacacgccgagagcaagatgtatgctaccagcccatactccgatcccgtagtctccatggacctcgaccctcaaccgatcaccgacgaggaggagggactgatttgggtggtcggacctgtgctggccgtggtgttcattatttgtatcgtgattgccatattgctgtacaaatcctccaaaccagatcgaaagcgagcggaatccgatagccggaagagctcaatccctaacaacaaagagataccgtcccatcatcccactgatcctgtagaactcagacgcttgaacttccagaccccaggtatggctagtcacccccccatccctattctggagctggccgaccatatcgagcgtcttaaggctaacgacaatcttaagttttcccaggagtacgagtccatcgacccaggacaacagttcacctgggagcatagcaatctggaagtcaacaagccgaagaacaggtatgccaatgtaatcgcatacgatcactcgagggtcctcttatcagccatagaaggtatccctggttcagattacgtgaacgccaattacatcgatgggtaccggaaacagaatgcatacatcgccacacaaggaagcttaccagaaacgttcggcgacttctggagaatgatctgggaacagcggagtgcaaccgtggttatgatgaccaagctagaggagaggagtagagttaagtgcgatcaatattggccatcgagaggcacagagactcacggtctcgtgcaagttaccctcctggacacggttgagctggccacctactgtgtgagaacatttgctttatacaagaatggtagcagcgagaaacgcgaagtgaggcagtttcagtttactgcctggccggatcacggggtgcctgagcatccaaccccgttcttggcgtttctcagaagagttaaaacctgtaatccgcctgacgccggcccaatggttgtgcactgttctgcaggggtaggccgaaccggttgtttcatcgtgatagatgccatgctcgaacggattaagcacgagaaaacagtggatatctatggtcacgtcaccctgatgcgcgctcaaaggaattacatggtccagacagaggatcagtacatctttatccacgacgcactgctagaagcagtgacctgcggaaacacggaagttccagctcgtaatttgtatgcttacatccaaaagctgacacagatagagaccggtgaaaatgtcacaggaatggaactggaattcaagaggctggcttccagcaaagcccatacctcccgattcatcagtgccaacctgccttgtaataaattcaaaaatagacttgtgaacattatgccttatgagagcactagagtctgccttcagcctatccgaggtgtcgaggggagtgactatatcaatgcaagctttatagacggttataggcagcagaaggcctacatagcaacacagggtccactggccgaaacaaccgaggacttctggcggatgctgtgggagcacaacagtacaatcgtggtaatgcttactaagttgcgagaaatgggccgagaaaagtgccaccagtactggcccgcagagcgaagcgcccgttaccagtactttgtggtcgatccaatggccgagtataacatgccccagtatatcctacgagaatttaaggttactgatgccagggacggacaatcacggacagtgcggcagtttcaatttactgactggcccgagcaaggcgtgcctaaatccggagagggctttatcgattttatcggacaggttcataagactaaggaacagtttggacaagatggccccatcagcgtgcattgcagcgctggggtggggaggacaggggtgttcattacgctcagcatcgtgttggaacgcatgaggtacgaaggagtggtcgacatttttcagaccgtgaagatgctaagaactcagcgccccgctatggtgcagacagaagaccagtaccagttttcttaccgcgctgccttggaatatctgggtagctttgaccattatgctacctag

SEQ ID NO: 130916 - DNA, 5739 bp, synthetic construct
  misc_feature 1..5739: note = Description of Artificial Sequence: Synthetic coding sequence
  source 1..5739: mol_type = other DNA
atggtgcatgtagcccggctcctgctgctcctgcttacattttttctacgaacagatgccgaaacaccccccaggtttacccggacaccagtggaccaaaccggtgtttcaggtggagtggcttccttcatctgccaggcgaccggcgatcctcgccccaagattgtctggaataagaaaggcaagaaagtgtccaatcaacgcttcgaggtaattgaattcgacgatggctctggctccgtcctccgcatccagcctctcaggacgccccgagacgaggctatatatgaatgtgttgcctccaacaacgtgggcgaaatttcagtgtctacccgattgacagtgctgcgggaggaccagatccctcgcgggttccccaccattgatatgggcccacaacttaaggtggtggaacgcacgcgcaccgctactatgctgtgtgcagcatccgggaaccccgacccagaaataacttggttcaaagacttcttacctgtagatacttccaataacaacggccgcattaaacaactgaggagcgagtctatcggggggacccctattaggggagcccttcagatagagcaatcagaagaaagcgatcagggaaagtatgaatgcgtggccaccaatagtgctgggacccggtactcggccccagctaacctctatgtacgcgaattacgggaggtgaggcgagtgcctccccggttttccattcccccaactaaccatgagattatgcctggcgggtcagtgaacattacttgcgtggcagtcgggtcaccaatgccttatgtgaaatggatgctcggcgccgaagacctgactcccgaggacgacatgccgataggtaggaacgttcttgagctgaatgatgtccgtcagtctgctaattacacttgtgttgcaatgagtacgctgggcgtgatagaggcaattgcccagatcacagtaaaagctctgccgaagcccccgggaaccccggtcgtgaccgagtccactgccaccagcatcaccctcacatgggacagtggcaatcccgagcctgtgtcatactacatcattcagcataagcctaaaaactctgaggagctctacaaagaaatcgatggggtggctaccacacggtatagcgtcgcaggcctgtcgccatactccgattacgagtttagggtggttgctgtgaacaacataggcagagggccccccagcgaacccgtgctcactcagacatccgagcaagccccttcctctgcaccacgcgacgtgcaggccaggatgctgagttccactactattctggtccagtggaaagaaccggaagagcccaacggccagatccagggttatcgcgtctactacaccatggatccaacccagcacgttaacaattggatgaaacacaacgtggcagactcccagataaccacaatcgggaatctagtgccacagaagacgtactcggtaaaagtcctcgccttcaccagcatcggtgatggccctctgagtagcgatatccaggtgatcactcaaaccggcgtgcctgggcaacctctaaattttaaagccgaaccggagtctgaaacctccatcctcctgagttggacgccccctcggtctgacacaattgccaactacgagctggtttacaaagacggggagcacggagaagaacaacgaattaccattgagccggggacctcttatcgcctccagggactcaagcccaactcgctttactattttcgcctcgctgctcgctccccccagggtctcggtgcttcaacagcagagatatccgcacggacaatgcaaagtaaaccttcagcccctcctcaagatatctcatgtacttcccctagctctaccagtatcttggtgtcatggcagccccccccagtggagaaacagaacggcattattactgaatatagcattaagtatacagccgtcgacggtgaagatgacaaacctcacgaaattctcggcatccctagtgataccactaaatatttattggagcagcttgaaaagtggactgagtatcgcattaccgttaccgctcataccgacgtcggaccaggccccgaaagtctttccgttttgatacgaacaaacgaggatgtcccctcaggtccgcctcggaaagtcgaggtagaggctgtgaactctacatctgtcaaggtcagctggcgctctccggtcccaaacaagcagcacgggcagatacgcgggtatcaggtccactatgtgcggatggaaaacggcgaacctaaaggccagccgatgctgaaggacgtcatgcttgcggatgcccagtgggaattcgacgacactactgaacatgatatgatcatttccgggctacagcccgaaaccagctatagccttaccgtgactgcttacaccactaaaggtgacggcgccaggagtaagccaaagttggtatctactactggagcagtgccaggtaagccccgtctggtcatcaaccatacccagatgaatacagcactgatccagtggcacccgcccgtggacacctttgggcccctccaaggctatcggctgaaatttggtcggaaggacatggaaccgttaacaaccctggaattctcagaaaaagaggaccattttaccgccaccgacattcataaaggcgcatcttacgttttccgactctctgcacggaacaaagtgggctttggcgaggaaatggtcaaggaaatttccataccagaggaggtgcccactggctttcctcagaatctgcatagtgagggaaccacttctacgtccgtacagctctcatggcaacctcccgtgctggccgagagaaatggcatcatcaccaagtatactctcctatatagggacatcaatatccccctgctcccgatggagcaacttatcgtccctgcggatacaacgatgactctgacaggtctaaagccggataccacatacgatgtaaaagtgcgggcccatacctcaaagggaccgggtccttattcgccaagcgtccagttccgcaccctcccggtggatcaggtgtttgctaagaattttcacgtcaaggccgtcatgaagacttcagtcctgctgagttgggagatcccagagaattataattccgccatgccctttaagatactgtacgatgatgggaagatggtggaggaggtggacggaagagccacacagaaactgatcgtcaacctcaaacctgagaagtcgtacagtttcgtcctgaccaaccgcgggaacagtgctggtgggctccagcatagagtgacagcaaagacagctccagacgtactccgaacaaaaccagcctttatcgggaaaacaaatttagacgggatgataacagtgcagctcccagaagtccctgcaaacgaaaatataaagggttattacattataatcgtcccgctcaagaagtcacgagggaaattcattaaaccatgggagtcgcccgacgagatggaactggatgagttgttaaaagagatctctagaaaaaggagatcgattaggtacggtcgggaagtagaactcaaaccctacatagctgcgcactttgacgtccttccaaccgaatttactctcggagacgacaaacactacggcggtttcacaaataagcaactgcagagtggacaggaatacgttttcttcgtgctggcggtcatggagcatgccgagagtaagatgtatgccacctccccgtactctgacccagtcgtctcaatggatcttgatccacagccaattaccgatgaggaagagggattgatttgggtagtcggtccggtgctggccgtggtatttataatctgcattgttatcgcgatcctgttgtataaacgcaaacgggcagagagcgactcgcggaagtcttcaatcccaaataacaaggagatcccctcacatcaccccactgatccagtggagttgagacgcctgaacttccaaacccctggcatggctagccacccgccaatccccatcctggaactggccgaccacatcgagcggctcaaagcgaacgataatcttaaattctcacaagaatatgagagcatcgatccaggacaacaattcacatgggaacattccaatctggaagtgaacaagcctaaaaacaggtatgccaatgtgatcgcctatgaccacagccgagtcctactttctgctattgaaggcatcccaggtagcgactacgtgaacgcgaattacatcgatgggtaccggaaacagaatgcctacatcgcaacccaaggtagcttgccagaaacgttcggcgatttctggcgcatgatttgggagcagcgttcagcaaccgtggtaatgatgactaaattggaggagaggtcccgtgtgaagtgcgatcaatattggcctagtaggggcaccgaaactcatggccttgtgcaggtgaccttgctggatacggtggaactcgccacttattgcgtcaggaccttcgcactttacaagaatgggagctccgagaagcgggaggtcagacagtttcagttcacagcatggccagaccatggagtgcctgaacaccccactccctttctggcattcctcagacgcgtgaaaacgtgtaatccacctgacgctggcccgatggtagttcattgcagcgcaggcgtgggcagaacaggatgctttatagttatagacgctatgctcgaacggatcaagcatgaaaaaacagtggacatttatggacacgttacgctgatgagagcacagcggaattacatggtgcagaccgaagaccaatacattttcatccatgacgcactgctagaggcagtgacttgtggcaatacagaagtgcccgctcgaaatttgtacgcttatattcagaaacttacccagatcgagacgggcgaaaatgttactggaatggagctggaatttaaacgactcgctagctcaaaagcccacacatcgagatttatctcagccaatctcccctgtaacaagttcaagaatcgccttgtgaatataatgccctatgaatccaccagggtctgcctgcagcccattcgaggggtggaggggtccgattatatcaacgcgtcattcattgatggctacagacaacagaaagcctatatcgccacgcagggtccgctcgccgaaactaccgaggacttctggcggatgctatgggagcacaattctaccatcgtggtgatgctgaccaaacttagagaaatgggacgcgaaaaatgccaccaatactggccagccgagcgctctgcccgttaccagtactttgtggtagacccgatggccgaatacaacatgcctcagtacatcttacgtgaatttaaagtgactgacgcaagagatggtcagtccaggaccgtgcgtcaattccaatttacagattggcccgaacagggggttccaaagagtggggagggcttcatcgattttattgggcaagtgcataaaaccaaggagcagttcggtcaggacgggccaatcagcgtccattgcagcgctggagttggcaggaccggagtgttcattactttatcaattgtgcttgaaaggatgaggtatgaaggcgtcgtcgacattttccagaccgtgaagatgctgaggactcaaagaccagctatggtccaaactgaggaccagtaccaattttcgtatcgagcagctctggaatatctgggatctttcgatcactacgccacatag

SEQ ID NO: 130917 - DNA, 5673 bp, synthetic construct
  misc_feature 1..5673: note = Description of Artificial Sequence: Synthetic coding sequence
  source 1..5673: mol_type = other DNA
atggtccacgttgctaggctgctcctgctgctacttacgttcttcctcagaacagacgcagagacgccacctaggttcacaaggacgccggtggatcaaaccggggtttccggcggagtggcgagcttcatctgccaagccaccggcgatcctagacccaagatcgtctggaacaagaagggcaaaaaggtcagcaatcaaagatttgaagtgatcgagtttgatgatggctcagggtcagtgctgcgtatccagcctctgaggacaccccgcgacgaagccatatatgagtgtgtggcatccaataacgtgggcgaaattagcgtttcaacacgcctgacagtcttgcgtgaagaccagattccccgtggatttcctaccatcgacatgggaccccagctgaaggttgtagaacggacgaggacagccaccatgctgtgcgcagcttcaggcaatcccgaccccgagataacttggttcaaggatttcctgcctgtcgacacctctaacaataatggcagaatcaaacagctaaggtcaggagctctccagatcgagcagtccgaagaaagtgatcaaggcaagtacgagtgcgtggctacaaattccgccggcacacgatattctgccccagctaatctctacgtgagggtgaggagagtcccgccaagattctctatccctccaacaaaccatgaaataatgccaggtgggagtgtaaatattacatgcgtcgccgtgggatcgcctatgccttatgtgaaatggatgctaggcgccgaggatctgacacccgaggacgatatgcccatcgggaggaatgtcctggagctcaacgacgttcgacagagtgcgaactacacgtgtgtagccatgtcaaccctcggagtcatagaggcaatcgcccagataacagttaaagccttgcctaagccaccgggtacacccgtggttacagagagtacggccacaagcataacacttacctgggattccggtaaccccgagcccgtgtcctattacattattcagcataaaccaaagaattcggaggagctctataaggaaatcgatggggttgccacaaccagatattctgtggccggactgtcaccttactccgattatgagttccgcgttgttgccgtgaacaacatcgggcgaggtccacctagtgaaccggtgctaacacagacatcggagcaggccccgtcgtctgccccgcgtgatgtccaagctcggatgctgtccagtacaaccatcttggttcagtggaaggaacctgaggagccaaatggccaaatccaggggtacagggtctattacactatggacccaactcagcatgtgaacaattggatgaagcacaacgttgctgactcccagatcactaccataggcaatctagttccccaaaaaacgtactcggtgaaagtgctggccttcaccagcatcggagacggtccactgtcaagtgacattcaggttattacacagacgggcgtgcccggtcaaccactcaacttcaaggccgagccagagtcagaaacttccatcctattgtcctggacgccaccaaggagtgacaccatcgcaaactatgagctagtctacaaagacggagaacacggcgaggaacaacgtattactatcgagccgggtactagctatcgactccaggggcttaaaccgaatagtttatattactttaggcttgctgcaaggtcacctcaaggtcttggagctagtactgcggagatatctgcacggacaatgcagtctaagcccagcgcccccccccaagatatctcatgtaccagccctagcagcacctccattttagtgtcttggcagcctcctcctgtggagaaacaaaatggcataattaccgagtatagcatcaaatacactgccgttgacggagaggatgacaagccacatgaaattcttggaattccaagcgatactaccaaatatttactagagcagttggagaagtggactgaatataggatcactgtgaccgcacacaccgatgtaggccccgggccggagtccctgtcagtcctgattcgcaccaatgaggacgtcccgagtggccctcctcgtaaggtggaagtggaggccgtgaacagcacctccgtgaaggtgagctggagatcacccgtgcccaacaaacagcatggccagatcaggggatatcaagtgcactatgttcgcatggagaatggcgagccaaagggacagccaatgctgaaggacgttatgcttgccgacgcacaggacatgatcattagtggtctccagcctgagaccagctattcattaactgttaccgcatacaccactaagggcgatggtgctaggtcaaaacctaagctcgtttctacaactggagccgtgcccggcaagccacggctggttatcaatcacacacagatgaataccgcccttatccaatggcacccccctgttgatacctttggcccactgcagggttatcgactgaagtttggcaggaaagatatggaacctctgaccacactggagttcagtgaaaaggaggatcatttcacagccacggacatccataagggggcctcctacgtcttccggctgagtgctaggaacaaagttggatttggcgaagaaatggtgaaggaaatcagtatccccgaggaagttccaacaggattcccgcagaaccttcattcagaaggcactacctcaacgagtgtacaactttcctggcagcccccagtgcttgctgagcgaaacggtatcatcactaaatatactctgttgtacagggacattaatatcccactgcttccaatggagcaattgattgttcccgccgacacaacaatgacgcttactggcctgaagcccgacaccacatatgacgtcaaggtgagggctcacacatccaaaggccctggtccatacagtcctagcgtgcaattccgcacgctgcctgtggaccaagtctttgcaaagaattttcatgtaaaggcggtgatgaagacgtccgtgctactcagctgggagatccccgaaaactacaactctgctatgccattcaaaatcctgtacgatgatggcaagatggtggaggaagtagatgggcgagccacacagaagctgatcgtgaatctcaagccagaaaaatcctactccttcgtgttgacaaacaggggtaacagcgctggagggctccagcacagagtcacggccaagacagccccagatgttctgcgtaccaagcctgctttcatcgggaagaccaacttagacggaatgatcactgtccagttgcccgaggttcccgcaaacgagaatatcaagggctattacattattattgtgcccctgaaaaagagtaggggaaagttcatcaaaccatgggaatcgcctgacgagatggaacttgatgagctgctaaaagagatttcccggaagagaaggtccattcggtatggtagagaggtggaactaaagccatacatagcagcacactttgacgttttacctactgagtttaccctgggagacgacaaacattacggcggcttcaccaacaagcagctgcagtccggccaagagtatgtattcttcgtgctcgccgtgatggagcatgcagagtccaagatgtatgctacttccccctactctgacccagtagtttccatggatctcgacccccaacctataactgatgaagaggaaggactgatctgggtcgtaggacctgtactggccgtggtgttcatcatttgcattgtgatcgcaatcctgctgtataagaggaagcgcgccgaaagtgattcccgaaagagttctatacctaacaacaaagagatacccagccaccaccccacggatcctgtggaacttagacgcttgaatttccagacccccggcatggcctcccaccctccaatcccaatcctggagctcgcagaccatattgagcggttgaaagctaacgataacctgaaattcagtcaggagtacgagtccatagatcccggacagcagttcacctgggaacactccaatttggaggtgaacaagcccaagaaccggtacgctaacgtgatagcttacgatcacagtcgagtcctgctttctgcaatcgaaggcataccaggatctgattatgtcaatgccaactatatcgatggctatcgaaagcagaatgcctacatcgccacacagggctctctgccagaaacctttggagacttctggaggatgatttgggagcagaggtccgcaaccgtcgtaatgatgacaaaactagaggagcgatcccgggtaaagtgcgatcagtactggcctagcagggggacagagactcacggacttgttcaagtcacacttttagataccgttgaactcgctacctactgcgtgcgcacattcgctttgtacaagaatggctcttccgagaagagggaggtccggcagttccagttcacagcttggcctgaccatggtgtgccggagcacccaactccattcctggcattcctccggagggtcaaaacctgcaaccccccggatgccgggccaatggttgtacactgttccgccggtgtaggccgcacgggatgcttcattgtgattgatgcaatgcttgaacgaataaagcacgagaagaccgtcgacatatacggacacgtgacactgatgagggcacagcggaattacatggtccagaccgaagatcagtacattttcattcacgatgccctgcttgaggcggtcacatgtggcaataccgaagtgccggcgcgtaacctgtacgcgtacattcagaaactgactcagatcgaaacaggcgaaaacgttacaggtatggagctggaattcaagcgacttgcatcctccaaagcccataccagtcggttcatctccgccaacctcccctgcaataagtttaagaacaggctggtgaacattatgccgtacgagtcaacacgggtctgtctccaacctattcggggtgtggaggggtcagactatattaatgcgtctttcatcgatggttacagacagcaaaaggcttatattgccacacagggaccactcgcagagactacagaagatttttggaggatgctttgggaacataattctacaattgtcgtgatgttaactaagctacgtgagatgggccgagagaaatgccatcaatactggcccgcagaaaggtccgcccgctatcagtatttcgtcgttgaccccatggctgagtacaatatgccccaatacatcttgcgcgaattcaaagtgaccgatgctagagacggtcaatcaagaaccgtgagacaatttcagtttactgattggccagagcaaggcgtccccaaatccggtgaaggctttatcgatttcatcggacaagttcacaaaaccaaggagcagttcggacaggacggccctatcagcgttcattgttcagctggagttggccgcaccggagtgtttattactctcagtattgtcctggagagaatgcggtacgagggggtggtggatattttccaaacagtgaagatgcttcgaacacagcgccccgctatggtccagacggaggaccaatatcagttttcttatagggccgccttggagtacctaggctccttcgaccattatgctacatag

SEQ ID NO: 130918 - DNA, 5700 bp, synthetic construct
  misc_feature 1..5700: note = Description of Artificial Sequence: Synthetic coding sequence
  source 1..5700: mol_type = other DNA
atggtgcatgtcgcaaggcttttgctcctgctgctaacattttttctccgcacagatgcagaaaccccaccaaggtttacgcgtaccccggtggaccaaacaggcgtgtcaggaggagtggcttcattcatctgtcaggctactggagaccctcgaccgaagatcgtctggaacaaaaaagggaagaaggtgagtaaccagcggtttgaggtcattgaatttgatgacgggagtggttccgtgctgagaatccaacctttgagaactccgagggacgaagcaatttacgagtgcgttgcttctaataacgtgggtgagatatcagtctctacccgccttacagtgctgcgggaagatcagattccccgaggttttccaactatcgacatggggccccagcttaaagtggtcgaaagaacaaggaccgccacaatgttgtgcgctgcaagtggaaacccagacccagagattacatggttcaaagatttcctgcccgtggatactagcaacaacaacggccgcataaagcagctacggtctggagcactccagattgaacaatctgaggaaagcgatcagggcaaatacgagtgtgtggccacgaactcggctggcactcggtatagcgctccagctaatctgtacgtgagagttcggcgtgtccctccacgcttttccattcctccaacaaaccatgagattatgccggggggcagcgtgaatattacgtgcgtggccgttggaagtcctatgccctatgtcaaatggatgttgggcgcagaagatctgacacctgaagacgatatgcccatcgggcggaacgtgctggagttaaatgacgttcgtcagagtgccaactacacgtgcgtcgccatgagcacactcggagtgatcgaagccattgcccagattactgtgaaagctttgcctaaacctccgggcacacccgttgtgacagagtctacagctactagcataactctgacttgggacagtggcaatccggaaccagtcagctattatatcatccagcacaagcccaagaactccgaagagctgtacaaagaaattgatggtgtggccacgactcgatattcagtggcaggcctcagcccctactccgattatgagttcagggtggttgccgtcaacaacataggccggggtccgccatctgaacccgtcctgacgcagaccagtgagcaggcaccatcttctgcgccgagagatgtacaagcacggatgctgtcatccacgaccatactagtgcaatggaaggaaccagaagaacccaacggacagatacaaggttatcgggtgtactacactatggatcccacccaacacgtcaacaattggatgaaacacaacgtggcagacagtcaaattaccaccatagggaatctcgttccccaaaaaacgtattcagtcaaagtgcttgcattcacatccatcggagacggacctttgagtagcgacattcaggtgatcacccagactggtgtgccaggccaacctctcaactttaaggcagaacccgagagcgagacttccatcctgctgtcatggactcctccacgttctgacaccatcgcaaactatgagctagtttacaaagacggcgagcacggggaggagcagaggattaccatcgaaccgggaacttcttacaggctgcaggggctgaaaccaaattcattgtattactttcgactcgccgcacgttctccacagggcctcggcgccagtaccgcggaaataagcgcaagaaccatgcagtcgaaaccttctgctccccctcaggacatctcttgcactagcccctcatccacaagcatccttgtttcctggcaaccgccccctgtggaaaagcaaaatgggataataaccgagtactctattaagtatacagccgttgatggtgaagatgataaaccccacgagatattaggaattccctccgatacaactaaatacctgctggaacagctcgagaaatggacggagtatcgtataactgtcacggctcacaccgatgtgggcccagggccagagtcattgtccgtgctaatccgtacaaatgaagatgtcccaagcggacctcccaggaaagtggaggtcgaggcggttaactctacatccgtgaaagtttcctggagatccccggtccctaacaaacagcacggccagatccgggggtaccaagttcattacgtccgcatggaaaacggcgaaccaaagggacagccaatgttgaaagacgtaatgttggctgatgcccagtgggaattcgacgacacaacagagcacgatatgatcatctctgggctgcagccggagacttcctacagcctgacggtgaccgcatatacaactaagggggatggcgcacgctcaaagcctaaactggtgagtactactggggctgtccctgggaaaccacgcctggtgatcaaccacacacagatgaatacagcactaattcaatggcatccccctgttgacacatttggcccattgcagggctacaggctgaaattcggcagaaaagacatggaaccacttactactttagagttctccgagaaggaggatcacttcacggccacggatatccacaagggcgcctcctacgtgttcaggttgtctgccagaaacaaagtcggatttggcgaggagatggtgaaagaaatatcgattcccgaagaggttcccaccggcttccctcagaatctgcattcagaggggacaacaagcaccagtgtgcagctcagttggcagcctcctgtcctggcagaacgcaacgggattatcaccaagtacacattgctttatcgagacatcaacatccctctgctacccatggagcagctgatagtacctgcagatactacaatgacactgactggcttgaagcctgatacaacttacgatgtaaaggttagggctcacacaagtaaaggcccaggcccctacagcccgtcagtgcagtttcgaacactgcctgtggaccaggtgttcgcaaagaacttccatgtgaaggctgttatgaagacaagtgtactgctgtcgtgggagattcctgagaattataactccgcaatgccctttaagatactctatgatgacggcaaaatggttgaagaggttgacggtcgggctacccagaagctcatagttaatcttaaacctgagaagagctattcattcgtcctgacgaacaggggaaatagtgcaggtggcttacaacaccgggtgaccgcaaagacagcacccgatgtcctgcggaccaaacctgccttcattgggaaaacaaacctggacggcatgatcacagttcagctgcctgaagtgccagcaaacgaaaatataaaggggtactatatcatcattgttcctctaaagaaatcacggggcaaattcattaaaccatgggaaagccccgatgagatggaactggacgaacttctgaaggagatatccaggaagaggaggagcatcaggtacggtcgggaagtcgaacttaaaccctatatagccgcacatttcgacgtgctccctactgagtttacactcggggatgacaagcactacggaggcttcactaacaagcagctccagagtggacaggagtacgtgttcttcgtgttggcggtgatggaacacgcagaaagcaaaatgtatgcaacgtccccgtacagtgatccggtggtgtcaatggatctcgacccacagcccattacggacgaagaggagggtcttatatgggtggttggcccagtccttgcggtggtattcatcatctgcattgtcattgccatattactttataaacggaagagggcagaatccgattctcgcaagtcaagtatcccgaataacaaggagattcccagtcaccatccaacagacccagtcgagctgagaagactgaactttcagactccagggatggcttcccacccgccaatccccatcttggagctggccgatcacatcgagaggctgaaagccaacgataatttgaagttttctcaggaatacgaaagcattgaccccggccagcagttcacatgggagcactcaaaccttgaagtgaacaagcccaaaaatcgatacgcaaatgtcattgcttatgatcacagcagagtgttactgagcgcaattgagggcatacctgggagcgattatgtgaatgccaattatattgacgggtatcgtaaacaaaatgcctacatagctacccagggctcattacccgagacctttggagatttctggaggatgatctgggagcagagaagtgctacagtggtgatgatgaccaagctggaggaaagatctcgagttaaatgtgatcaatactggccaagtagaggtacagagactcacgggctggttcaggtcacacttctggatactgtcgaactggctacctattgtgtgagaaccttcgctctgtacaaaaatggctctagtgagaaacgagaggtaaggcagttccagttcaccgcctggcctgatcacggcgtgcctgaacatccaactcctttcctggcatttctaagaagagtgaaaacctgtaatccacctgacgctggcccgatggtggtgcactgctctgccggagtaggccggacaggctgttttatcgtgattgatgccatgctggaaaggattaagcacgagaagacagtcgatatttatggccacgtgacgcttatgcgggcacaaaggaattacatggttcagaccgaggatcaatacatcttcattcatgatgctctcttggaggccgtgacttgcggcaatacagaagtgccagctcgcaacctttatgcctatatccagaagcttacgcaaatcgagacaggtgagaatgtgacaggcatggagctcgagttcaaaaggctcgcttcctctaaagctcacacaagcaggtttatctcggccaatttgccatgcaacaaatttaagaacaggcttgtgaatatcatgccctatgaatctaccagggtgtgcctgcaaccaatacgcggggtcgaaggatccgactacattaatgcttcttttattgacgggtatcggcagcagaaagcgtatattgccacgcaggggcccctggcagagactacagaggatttttggcgtatgctgtgggaacacaactccacaattgtggttatgctgaccaaattgcgggagatggggcgcgagaaatgccaccagtattggcctgctgagcggagcgctagataccagtattttgtggtggatcctatggcagagtacaatatgccccagtatatcctgcgcgagtttaaagttacagatgcacgagatggccagagccggacagtccgccaatttcagttcacggattggcccgagcaaggcgtccctaagagcggagagggcttcattgacttcatcgggcaggtgcacaagaccaaggagcagtttggacaggatggacctatctcagtccattgctccgccggggtggggagaacgggggtttttataactttgagcatcgtgctggagcgaatgcggtacgagggagtggtagacattttccagactgtgaagatgctgagaacacagcggcctgccatggtgcagactgaggatcagtaccagttcagctaccgcgccgctctggagtatctcggatccttcgaccattatgcgacctag

SEQ ID NO: 130919 - DNA, 5739 bp, synthetic construct
  misc_feature 1..5739: note = Description of Artificial Sequence: Synthetic coding sequence
  source 1..5739: mol_type = other DNA
atggtccacgtggcccgtctcctcctgctgctgctaacgtttttccttaggacagacgctgagacgcctccaaggttcaccagaactcctgtagaccaaaccggggtttctggcggggttgcgagcttcatctgtcaggcgacaggcgacccacgacctaagatcgtatggaataagaagggaaagaaagtttcaaatcaacgattcgaagtcattgagttcgacgacggatctggatccgtgctgcgcatccaacctctgaggaccccacgagacgaggccatctatgaatgtgtggcttccaataacgtgggagagattagcgtctcaactagactgactgtgcttcgggaggatcagattccaaggggattccccacaatagacatgggccctcagctgaaagtggtggagcgtacacgtacagccaccatgctctgtgcagcctccggaaatccagacccggagatcacgtggttcaaggattttctccccgtggacactagcaacaacaacggcaggatcaaacagctgagaagtgagagtataggcggtacacccattagaggtgctctacaaatcgagcagagtgaagagtccgatcagggcaagtacgaatgtgtcgctaccaattccgccggtacacgctacagcgcacccgccaacctgtacgtccgagagcttcgcgaagtgaggagagtaccaccgagattctctatacccccaactaatcatgagataatgcccgggggctccgtgaacataacttgtgtggccgtaggctctccgatgccatatgttaaatggatgttgggggctgaagatctgacccccgaggatgatatgccaattggtcggaacgttctggagcttaacgatgtacgtcaatccgccaattacacctgcgtcgcaatgtcgaccttgggtgtcattgaagccatagcccaaattacagtgaaggctctgcccaagcccccagggaccccagtggtgaccgaaagcacagccaccagtatcaccctgacatgggattctggaaaccccgaacctgtttcctattatattatccagcataaaccaaaaaactctgaagagctgtacaaggagatagatggcgtcgcaacaacacggtatagcgttgccggcctttcaccttactctgactatgagttccgggtggtcgcggtgaataatattggaagggggcctccatctgagcccgtgctgacacagacatccgagcaggctccgagcagtgcgcctcgagacgtccaggcacgcatgctctcttctaccaccatcctggtacagtggaaagaacctgaagagccgaatggacagattcagggatatagggtctattacaccatggatccaactcagcacgtgaacaactggatgaagcataacgttgctgactctcagataacaacaatcggcaacctcgtgcctcagaagacttactccgtgaaagtgcttgcattcacatctataggagatggtccgctgtcttccgatatccaagtgatcacccaaacaggggttccagggcaacctctgaactttaaggccgaacccgaaagcgaaacgtcaatcttactgtcatggactccccctcggtccgataccatcgccaattacgaactggtgtataaagatggagagcatggcgaggagcagcgtattacaatagagccgggaacatcatatcggctacaggggttgaaacctaacagcttatattacttccggttggcagcccggtctcctcaaggactgggcgcatcgacagccgagatcagcgcgcggaccatgcagtccaaacccagcgcccccccccaggatatttcctgcacctcacctagcagcacaagcatcctcgtgagttggcaaccaccccccgttgaaaagcagaacggaataattacggaatactctattaaatatacagccgtagatggagaagacgataaaccccacgagatcctcggcatcccaagcgacaccaccaaatacctcctggaacaactcgagaagtggaccgagtatcgtattaccgtgacagcccatacagacgttggtccaggcccagaatcactatctgttcttataagaaccaacgaggatgttccaagcgggccgccccggaaagttgaggttgaagcggtgaattcaacatctgtcaaagtgagctggagatcgcccgtcccaaacaaacagcatggccagatcagaggctatcaggtgcattacgtgcgaatggagaatggtgagcctaaagggcaacccatgctgaaagatgtgatgttagccgatgctcagtgggagttcgatgacaccacagagcacgacatgatcatcagcggcctccaacccgaaacttcttatagccttactgtgaccgcttatactacgaagggagatggcgccaggtccaagcctaaactggtgtctacaactggcgccgtcccaggtaagcccagacttgttattaatcacactcagatgaacactgcactcattcagtggcatccacctgtggataccttcgggcccctccaggggtaccgcctaaaatttggaagaaaagacatggagccactcaccaccctggagttttccgagaaggaggatcatttcacagccaccgacattcacaagggcgcctcttatgtttttagactgtcagcgcggaacaaagtggggttcggggaagagatggtgaaggagatatccatccccgaggaggttcctaccggcttccctcagaaccttcactcagaggggacaaccagcactagcgtacagctgtcttggcaaccgcctgtgttggctgaacgtaacggtattataacaaagtacaccctcctttatcgcgatattaatatccctctactccccatggagcaattgatcgtcccagcggacacgactatgaccctgaccggactgaagcccgacacgacttatgacgtaaaagttcgggcgcacaccagtaagggcccagggccatactcaccatcagtgcaattcagaacgttacctgttgaccaggtctttgccaaaaattttcatgtcaaggccgtaatgaagaccagtgtgcttctctcttgggagatcccggaaaattacaacagcgcaatgccctttaagatcctctacgatgatggtaaaatggtggaagaggtggatggcagggccacccaaaaactcattgttaacttgaaacctgagaaatcttacagcttcgtgttaacaaataggggaaactctgcgggggggctgcagcatcgggttaccgccaagaccgcgccagatgtacttcgcacaaagccagctttcatcggaaagaccaaccttgacggtatgatcactgttcagctccccgaggtaccagcgaacgaaaatatcaagggctactatattatcattgtgcccctaaagaagagtagaggtaagtttataaaaccttgggaatctccagatgagatggaactggacgaactacttaaggagatctctaggaaacgacggagcattcggtacgggcgagaggtggagctgaaaccttacatagccgcacactttgatgtgcttccgacggagttcacacttggagatgataaacattacggcggtttcaccaataaacagttgcagtccgggcaggaatacgtgtttttcgtgctcgctgtaatggaacatgctgagtcaaagatgtacgcgacctcgccttacagcgacccagtggtatcgatggatctagatccacagcccatcaccgacgaagaagagggactgatatgggtagtcggaccggtgctcgccgtggtattcataatctgtattgtcatcgccatccttttatacaagcgaaagagagcagaaagtgactcacgcaaatcatcaatccctaacaataaagaaattccttcacaccatccaaccgaccccgtggagcttaggagactgaattttcaaacacccggcatggcttcacatccacctatacccatcttggaattagccgatcatatcgaaaggctgaaagcaaatgataatctgaaatttagtcaggagtatgagagcattgacccaggccaacagttcacatgggagcacagcaatctggaggtcaacaagcccaagaatagatacgccaacgtgattgcttatgatcattcacgcgtgcttctgagcgctatagagggaataccgggttctgattacgtcaacgcaaactatatcgacggctacaggaaacagaatgcttatatagcaacacaaggaagtctacctgaaacatttggggatttttggagaatgatctgggagcaaaggagcgctactgtggtcatgatgactaagctggaggagcggtctcgagttaagtgtgatcagtattggcccagccgcggcaccgagacacacggcctagtccaggttacgttgttggacacagtggaattggctacttactgcgtccggacattcgctttgtacaaaaacggctctagcgagaaacgcgaggttaggcaattccagtttacagcttggccagatcacggggtccctgaacaccccacccccttcctcgcttttctgaggcgagttaagacctgtaaccctcccgatgcagggccaatggtcgtgcattgctccgcaggagtgggaagaacgggttgttttatagtcatcgatgcaatgctcgagagaataaagcacgaaaagacagtagacatttacgggcatgtcaccctgatgcgagcccagagaaactacatggtgcagaccgaggatcagtatatattcatccatgatgcactcctcgaagcagtgacctgtgggaatacagaagtgcccgcccgaaacctgtatgcctatatccagaaacttacacagatagagacaggagaaaatgtgacaggtatggagctggaattcaagcgcctggcctcgtccaaagcacatacttcacggttcatcagtgcgaatctcccatgcaacaagtttaagaatcgcctcgttaatattatgccctacgaatcgacgcgcgtgtgcttacagccaattcgcggcgtggaggggtcagactatatcaacgctagcttcatcgatggatacagacagcagaaggcatatatcgccacccagggcccattggctgagaccactgaagacttttggaggatgctgtgggaacataacagcactattgtggtaatgctgaccaaattgcgcgaaatggggcgggagaagtgccaccaatattggcctgctgagagatcagccaggtaccagtactttgtggtcgatcctatggccgagtacaatatgcctcaatacatcttaagagaatttaaagtcacagacgccagagatggccagtctcgcaccgtgcggcagtttcagtttaccgattggccagagcaaggcgtgccaaaatcaggcgaaggatttattgatttcattggccaggtgcacaaaaccaaagagcaattcggtcaggatggccctatctctgtgcattgctcagcaggagttggccggacaggagttttcataacattgtcaatagtgttagagcgaatgagatatgagggagtggttgatatcttccagactgtgaagatgctcaggacacagcggccggcaatggttcagactgaggatcagtatcaattcagttatcgcgctgccctagaatatctcggcagcttcgatcactacgccacatag

SEQ ID NO: 130920 - DNA, 4509 bp, synthetic construct
  misc_feature 1..4509: note = Description of Artificial Sequence: Synthetic coding sequence
  source 1..4509: mol_type = other DNA
atggtgcatgtggctaggcttctccttcttttactcacgttcttcttgagaactgacgctgaaacaccaccacgctttaccagaacacccgtggatcaaactggagtgtctggaggagtcgccagttttatctgccaggccacgggtgatccgcggcccaagatcgtgtggaacaagaaggggaagaaggtgagcaatcaaaggtttgaggtcatcgaattcgacgatggttccggttcagttttacgaatccaacctctccggacaccgagggacgaggcgatttacgagtgcgttgccagtaacaacgtcggtgaaatctcagtttcaacaagattgacagtgctgagggaagaccagatccccaggggttttcctactatcgatatgggaccccaactgaaagtggtggaacgaactaggacagctacaatgttgtgtgctgcatcaggcaatcctgaccctgagatcacatggtttaaggacttcctgccagtggatacatctaacaataatggcaggatcaaacagctccgttccggtgggactcccattagaggcgccctgcagatcgagcaaagtgaagagagtgaccagggcaagtacgagtgcgtggccaccaacagcgcagggactcgatatagcgccccggctaacctgtatgtgcgcgagctcagggaggtgagaagagtcccgcctcggttcagcattcctccgaccaatcacgagattatgcctggcggatccgtcaacattacgtgcgttgccgtgggctccccaatgccttacgtgaagtggatgctgggagccgaagacctaaccccagaggacgatatgcccatcggacgcaatgtcctcgagttgaacgatgttaggcagtccgccaattatacctgtgtcgctatgtccacccttggcgtgattgaggccatcgcccagattaccgtgaaggccctcccaaaaccccctggcactcctgtggtcacagaatccaccgcaacatctatcactctcacctgggattcaggcaatcccgaacccgtatcctattacataatacagcataaacctaagaactctgaggagctctataaggagatagatggggtcgcaacaacaaggtactccgtggccggtctgtccccttacagcgattacgaattccgagtcgtggcagtgaacaacattgggcggggtcccccttctgagcctgtcctcacccagacgtcagagcaggccccgtcttccgctccacgggacgtgcaggccaggatgctgtcttctaccacaattctagtgcagtggaaggaacccgaggaaccaaatggacaaatccagggttacagggtctactacactatggaccccacgcagcacgttaataattggatgaagcacaacgtcgcagactcccagattaccactatcggcaacctcgtgccgcagaagacttacagtgtgaaggtgcttgcatttacaagcattggagacgggccgctgagctctgatattcaggtaataacgcagaccggtgtccctgggcaacctctcaacttcaaggctgagccagagagcgaaacgagtatcctgctcagctggacccctccgagatctgatacaattgccaattacgagctggtgtataaagacggcgaacatggcgaagaacaacgtataacaatcgaacctgggacttcttacaggttgcagggcctcaagcctaattcactctattactttagattagccgcgagatcacctcaaggcctgggtgcctctacggccgagatctccgccaggacaatgcagagcatgttcgcaaaaaatttccatgtgaaagctgttatgaaaacgtctgttttgctctcttgggagatacctgagaattataatagcgcaatgccctttaaaattctctatgacgatggcaaaatggtggaggaagtggacggaagggccacccaaaaactcatcgttaaccttaaacctgaaaagtcttactcgttcgtgctcacgaacagagggaacagcgcaggaggactgcagcacagggtcactgcaaaaaccgcacccgacgtgctccggaccaagcccgcattcatcgggaagacaaacctagacgggatgatcaccgttcagcttccagaggtgcctgcaaacgaaaacattaaaggctattacattataattgttcccctgaagaagagtcgtgggaagttcatcaagccttgggagtcacctgatgagatggagctggatgaactactgaaggaaatctcaagaaagcggcgatccatcagatatggaagggaagtggagctgaagccgtatatcgccgcccattttgacgtcttgcccaccgaattcactctgggggatgacaagcactacgggggttttactaacaagcaactgcagagtggtcaagaatatgtattcttcgttctggccgtgatggagcatgcagaaagtaagatgtacgctaccagtccgtactccgatcctgtcgtgtcgatggacctggatccccaacctatcacggatgaggaagaaggcttgatctgggtggtcggtccagtcttggccgtggtgtttattatttgtatagtaattgctattctcctctataagtctaagcctgatcgcaagcgtgccgagtccgatagccgaaagagtagtatcccaaataacaaagaaatcccaagtcaccaccccacagaccctgttgaacttcgccggttgaatttccagactcccggcatggccagccacccgccaataccaatcctggaattggccgatcacattgaacggctgaaagccaacgacaacctcaagttttctcaagaatatgagagtattgaccctggccaacagtttacctgggaacattcaaacttggaagttaacaagcccaagaatcggtacgccaatgtgattgcctacgatcacagccgagtgctcctctcagccatcgagggcatccctggtagtgactatgtgaacgcaaactacattgacggatatagaaagcaaaacgcctacattgctacccagggatccctcccagagacctttggggatttttggcgcatgatctgggaacagcgatctgccacggtggtaatgatgaccaagttggaagagaggagccgcgtgaagtgcgaccagtattggcccagtcgcggcactgaaacacacggtctggtccaggtcactctgttggacacagtggagctcgctacttactgtgtccggacttttgcgctctataagaatgggagttctgagaaacgggaggtgagacagtttcaattcaccgcctggcctgaccatggggtgcccgagcacccaactccttttttggcctttctgcgaagagttaagacctgcaaccccccagacgccggacctatggtggtgcattgctctgccggcgtgggaaggacaggttgtttcattgtaattgacgcaatgctggagaggatcaagcatgaaaagacagtggacatctatgggcacgttacactcatgcgggcacagcggaattacatggtgcaaaccgaagaccagtatatttttattcacgatgccctgttggaggccgtgacatgtggaaatacggaggtgccggccaggaacctctatgcttatatccaaaagttaactcagatcgagacaggggaaaatgtaaccggtatggagctggagttcaagcgcctggccagcagtaaggctcacacatcccgattcatctccgctaatctgccttgtaacaagtttaagaaccggttagttaatattatgccgtatgaatccaccagagtttgtctccagcccatccgaggcgtggagggctccgattacattaatgcctcctttatcgacggataccggcagcagaaagcgtacatcgcaacacaaggcccgctggcagaaacgacagaagacttttggaggatgctctgggagcacaacagtacgattgtggtgatgctgaccaaactgagagagatgggacgcgaaaagtgtcaccaatactggcccgctgaacgttctgcacgttatcagtacttcgtggtggatcccatggctgagtacaatatgcctcagtacatcctgagggagtttaaagtgaccgacgctcgcgatggacaatctcgaactgtccgacagtttcagttcaccgactggccagagcagggcgtgccaaagagtggagaggggtttattgattttatcgggcaggtgcataaaacaaaggagcagttcggacaggacgggcccatttccgtacactgttcagccggcgtgggtcgaactggtgtgttcattacacttagtatagtcctggaaagaatgcgatatgaaggagttgtggatatctttcagacagtgaaaatgttacgaacgcagaggcctgccatggtccagacggaggatcagtatcagttctcgtatagggctgccctggaatatctggggtcttttgaccactacgcaacatag

SEQ ID NO: 130921 - DNA, 4518 bp, synthetic construct
  misc_feature 1..4518: note = Description of Artificial Sequence: Synthetic coding sequence
  source 1..4518: mol_type = other DNA
atggttcatgtcgcacgactgctcctgctgctcctcaccttcttccttcgaactgatgctgaaacaccaccgagatttacaaggactcctgtcgaccagaccggtgtctccggtggggtcgcgtcttttatatgccaggccacgggcgatccaagaccaaagattgtgtggaacaaaaagggcaaaaaggtgtctaaccagaggtttgaagtgattgagtttgatgacggctccgggtcggtcctcaggatacagccgctcaggactccccgcgacgaggccatctacgaatgcgttgccagtaataacgtaggcgaaatcagtgtttccacacgtctcacagtcctgcgcgaggaccagattccacggggattccccacgatagacatggggccacaactaaaagttgttgaaaggactagaacagccacgatgctctgcgcggctagtggaaaccctgacccggagatcacgtggttcaaggactttctgccagtggatacatccaataataatggcagaattaaacagctgaggagcgtgagtattggcgctcttcagattgagcagagcgaagaaagtgaccagggcaagtacgagtgtgtcgccacgaactcagcggggacaagatatagtgctccggctaacctctacgttagagttagacgggtgcccccgcggttcagcattccgcccactaaccatgagatcatgccaggtgggagtgtgaacattacgtgtgtcgccgttgggagcccgatgccctacgtgaaatggatgcttggcgcagaagacctaactcctgaggacgatatgccaattggccggaatgtcttggagctgaacgatgtccgccaatccgctaactacacctgtgtggcaatgtctaccctgggagttatagaagccattgcacagatcacagtgaaggctttaccaaagccccccgggacaccggtcgtaaccgaatccaccgccacgtccataaccttgacttgggacagcgggaatccggaaccggtatcctattacattatacagcacaaaccgaagaattccgaggaactatacaaagagatcgatggagtggcgaccactcgctattccgttgcagggctaagtccttacagtgactacgaatttcgcgtcgtcgccgtgaataacatcggacgcggaccgccctctgagcccgtgctcacgcagacttctgaacaggcaccctctagtgcacctcgagacgtgcaggcgcggatgctgtcgtcaaccaccatacttgttcagtggaaggagcctgaagaacctaacgggcagattcagggctatcgcgtttactataccatggaccctacacagcacgtaaacaattggatgaaacacaatgtggcggacagccagatcaccacaataggcaatctggtgccccaaaaaacttattcagttaaggtcttggctttcacgtccatcggggacggacccctatcgagcgacattcaagtcatcacccaaactggcgttcctggacagcctttaaattttaaggcggaacccgagagcgagaccagtatccttctgtcctggactcctccgagaagtgacaccatagctaactacgaactggtgtacaaggacggcgaacatggagaggagcagcggatcacgatcgaaccgggtaccagttaccgcttgcaaggattgaagcctaatagcttgtattattttagactcgctgctagatcaccacagggcctgggagcatctacagcagaaatatctgcccggaccatgcagtccatgtttgccaaaaattttcatgtaaaggccgtcatgaaaacctcagtgctgttgagctgggaaatcccagagaattataactcggccatgccattcaagatcctctacgacgacggaaagatggtagaggaggtggatgggcgcgccactcaaaagctcatcgtgaatttaaagccagagaagtcatacagcttcgtgctcacaaaccgaggcaactctgccggcggcctgcagcacagggtcactgctaagacagcaccggacgtgctgagaacgaaacccgctttcataggcaaaaccaacctcgacggcatgatcaccgtccagctgccagaagtccccgcgaacgaaaatattaaaggctactatattatcatcgttcccctcaagaagtcgcgcggcaagtttatcaaaccctgggaaagtccagacgaaatggagctcgatgaactcctaaaggagataagtcggaagcgccgcagtatccggtatggaagggaggtggaactgaaaccttacatcgcagcccacttcgatgtgctccctaccgaattcacacttggggatgacaagcactacggcggcttcactaacaaacagcttcaatcgggccaggaatacgtctttttcgttctggccgtgatggagcacgccgaaagcaagatgtatgcaacctccccttacagtgacccagtggtgtctatggacctggatccccagcccatcactgacgaggaagagggcttaatctgggtggtgggcccagtgctggcagtggtgtttattatatgtatcgttatcgcaatccttctgtataaacgcaaaagggcggagagcgatagcagaaaaagctcaatcccaaacaacaaagaaatacccagtcaccaccccaccgatcccgtcgagctgagaagattgaattttcagaccccaggatctgatgactcggggtaccccggtaacctgcatagttcatctatggcatctcatcctcccatccccatcctcgagctggccgaccacattgagaggctgaaggcgaacgataacctgaaattctctcaagaatacgaaagcatcgacccaggccaacaatttacttgggaacacagcaatctagaggttaacaaacctaaaaatagatacgcgaacgtaattgcttacgaccattctcgggtgttgctgtctgctatcgaaggcattcctggatcagattatgtaaatgccaattatattgacgggtatcggaaacagaacgcgtatatcgctacacagggctccctgcctgaaacctttggagacttttggagaatgatctgggagcaaagatcagcaacagttgtgatgatgacaaagttggaggaacggagccgcgtgaagtgcgatcagtactggcccagcagaggcacggagacacatgggttggttcaagtgaccttgctggacacagtcgagctggctacctactgtgtgagaacatttgccttatacaaaaacgggtcaagtgaaaaaagagaagtacggcagttccagttcactgcgtggcctgaccacggagtccccgaacaccctaccccatttctcgctttcctgcgcagagtgaaaacttgcaaccctccggatgcgggaccaatggtcgtccattgctcagcaggtgtcggcagaactggctgtttcatcgtgatcgatgccatgctggaaaggatcaaacacgaaaaaaccgtggacatctatggccatgtgaccctcatgagggcccagaggaactatatggttcaaactgaggaccagtatatcttcatacatgacgccctgctcgaggccgttacatgcggtaacactgaggtgccagcacggaacctgtatgcatacatccagaaattgacacagatcgagactggggagaacgtgactggcatggagctggaatttaagaggctcgcctcctctaaggctcatacaagcaggttcatcagtgcgaatctcccatgtaacaagttcaaaaaccgactggtaaacatcatgccttacgagtctaccagggtgtgtctccagccaattcgaggcgtggaagggtcagattatataaatgcatccttcatcgacggctatcgccagcagaaggcttatatcgccactcagggacctttggcagaaacaaccgaagatttttggaggatgctgtgggaacataattctactatcgttgtcatgcttaccaaactccgtgagatgggccgggagaaatgccatcaatattggccggccgagcggtctgcacgctaccagtacttcgtcgtggatccgatggcagaatataatatgccccagtacatcttgcgcgaatttaaggtaaccgatgcaagggacggccagtccaggaccgtgagacagttccaatttaccgattggcccgaacagggagtccccaagtccggcgaaggctttattgactttattggccaggtccataagacaaaagagcagttcggacaagacggacccatttcagtgcattgttcggcaggagtgggccgaacaggcgtgttcatcaccctcagtatcgtgttggaacggatgaggtacgagggggttgtcgacattttccagacggtaaagatgttacggacacagagacccgctatggtgcaaaccgaggatcagtaccagttctcttaccgtgcagccctggaatatctgggaagcttcgatcattacgctacctag

SEQ ID NO: 130922 - DNA, 282 bp, synthetic construct
  misc_feature 1..282: note = Description of Artificial Sequence: Synthetic coding sequence
  source 1..282: mol_type = other DNA
atggtgcacgtggcgcggctactgctcctgctcttgactttcttcctccgaacagatgctgagacccctccacggtttactagaacccccgtggatcagactggtgtctcaggtggcgttgcttccttcatttgtcaagccactggagaccctagacccaaaatcgtgtggaataagaaaggtaaaaaagtgagcaaccaaaggtttgaagttattgagtttgacgacggttccgggtctgtgctcaggatccagccactgagaactcccagagatgaatag

SEQ ID NO: 130923 - DNA, 4518 bp, synthetic construct
  misc_feature 1..4518: note = Description of Artificial Sequence: Synthetic coding sequence
  source 1..4518: mol_type = other DNA
atggttcatgttgcacggctactgctgcttcttctgaccttcttccttaggactgatgccgaaacccctccgaggttcaccaggactcctgtggatcaaaccggagtctccgggggtgtcgcctccttcatttgccaggcaaccggcgatccacgcccaaagattgtatggaacaaaaagggcaaaaaagtgtcaaatcagagattcgaggtaattgagttcgatgatggttccgggagtgttctcagaattcagccgctgagaacaccacgagatgaggcgatatatgaatgcgtcgctagtaacaacgttggcgagatcagcgtcagcacacgactgaccgtgctgagggaagatcagattccacgcggctttcccacgattgacatgggaccacagttgaaagtggtggagcgaacacgtacggccacgatgttgtgtgccgcgtccggcaatccggaccccgagataacctggtttaaggatttcctgcctgttgacacatccaataataatggccggatcaaacagctgcgaagcgagtcaatcggggggacccctattcgtggcgcattacagatcgaacagtcagaggagtcggaccagggtaagtacgaatgcgtggccaccaattctgcaggcacccgttatagcgccccagcgaacctgtatgtccgcgaactcagagaggtgaggcgcgttcctccccgtttttcaattcctcccacgaaccacgaaatcatgcctgggggaagcgtgaatatcacctgcgtcgccgttggcagtcccatgccatatgtgaaatggatgctgggtgctgaagatttaacacctgaggatgatatgcctattgggaggaacgttctggaactcaacgatgtccggcagagcgctaattatacctgtgtagccatgtctaccctcggcgtgatcgaggccatagcccagatcacagtgaaagccctccccaaaccaccagggacccccgtggttactgaatctacagccacgagtatcactctgacatgggacagcggcaatcctgagccagtgagctattatattattcagcacaaacccaagaattcagaggaactgtacaaggaaatcgatggcgtggccacaaccaggtatagtgttgcaggactctccccgtattcagactacgaatttcgggtggtggcagtaaataatatcggcagaggtcccccctcagagcctgtgctgacacagacctccgagcaggcgccttccagtgctccacgcgatgtgcaggctcgaatgctgtcttcaacgacaattttagtgcagtggaaggaacctgaggaaccaaatggccagatccagggctatcgtgtctattatacgatggaccctacccagcacgtgaataactggatgaagcacaacgtcgccgatagtcaaatcactacaatcggaaatctcgtcccccaaaagacctatagcgtcaaagtgttggcatttacctctatcggcgacgggcccttgtctagtgacatccaagtgattacccaaaccggggtacccgggcaaccgctgaatttcaaggccgaacctgagtcagaaactagcattctgctcagttggactccacctagatcagataccatcgcaaattacgaactggtctataaagatggcgagcatggcgaagagcagaggattacaattgagcccgggacatcgtatcgcctccagggactgaaaccaaacagcctgtattacttccgtctggctgcgcggagtccccagggcctgggggctagcacggccgagatttccgctagaaccatgcagagcatgtttgcaaaaaatttccacgtgaaggcagtgatgaagacctccgtgcttttgagctgggaaattccggagaactataactctgctatgccgttcaagattctgtacgatgatgggaagatggtagaggaagtggatggtagagcaacccagaaactaattgtcaacctcaagcctgagaaaagctacagtttcgtccttaccaacagaggcaacagcgctgggggcctccagcaccgtgtcacggcgaagacagctccggatgtgctccggacgaaaccggccttcatcgggaagactaatctggatggcatgataaccgtgcagctgcctgaggttcctgccaatgagaatattaaaggctattacatcataatcgttccactgaagaaatctcgcggcaaattcataaagccctgggagagtccagacgaaatggagcttgacgaactgctgaaggagatttcacgaaaacggaggtcaatcaggtatggaagggaagtagagttaaagccttatattgcagcccattttgatgtgctccccaccgaattcacactaggcgacgacaaacattacgggggattcacgaataagcagctccaatccggccaggagtacgtcttcttcgtcctggcggtcatggaacatgccgaatccaagatgtacgctacttctccctacagcgacccagttgtcagcatggatctggacccccagcccatcaccgacgaagaagaaggcctgatctgggtggtcgggccggtgttagcagtcgtgtttataatttgtatcgtaattgcgattctgctgtacaagagtaagcccgaccggaagagggctgagtcagatagccgcaagagttctattccgaacaataaagagatcccttcgcaccaccctaccgaccctgtagagctcaggcggctgaatttccagacccctggaatggcaagccaccctccaatccccatactcgaattggccgaccacatcgaacgtctcaaggctaatgataatctcaagttctcacaggaatatgaaagcattgatcctggtcaacagttcacatgggaacattcaaacctagaggtgaacaaacccaaaaaccggtatgcaaacgtgatcgcgtacgatcatagcagggttctcctgtccgcgattgaaggcattcccggatctgactacgtaaacgccaactatattgacggctacagaaagcaaaacgcatacattgcgacacagggctctttgcccgagacatttggtgatttctggagaatgatctgggaacagcgctccgctacagtggtcatgatgacgaagctcgaggaacgcagtagagtgaaatgcgaccagtactggccaagcagaggaactgaaacccacggacttgtgcaggtgaccctgctggatacagttgaactagccacctactgtgttagaaccttcgcactctataaaaacggttcctccgagaaaagagaggttaggcagtttcagttcaccgcttggcctgatcatggcgtgcctgagcaccccactcccttccttgcatttctccgccgagtgaagacgtgtaatcctcctgacgcgggtcccatggtggtccattgttctgccggcgtggggcgcactggatgcttcattgtcatcgatgcaatgttggaaaggatcaaacacgaaaagacagtggatatttacggccacgttacccttatgagggcccagcgcaattacatggtgcagactgaggaccagtatatttttattcacgacgctctgctcgaagccgtgacctgcggaaataccgaagtccctgcacgaaatctgtacgcatatatccagaaactcactcagatcgaaactggcgaaaacgtcactggaatggaactcgagtttaaaaggctggcttcaagcaaagcacacacatctcgcttcatttcagcaaacctgccatgtaataaatttaaaaaccgcctagtgaatattatgccatacgaatccactagggtgtgccttcagccgatcaggggtgtggaaggtagtgactacattaacgcgtcgttcattgatggctatcggcagcagaaggcttatattgcaactcaggggcctctcgccgaaacaactgaggatttctggaggatgctgtgggagcacaattcaacgattgtggtgatgttgactaaactccgcgaaatgggccgagagaagtgtcatcagtactggcccgccgagcggtccgctcgctatcagtactttgtcgtagatccgatggcggagtacaacatgccccagtatatcttgagagagttcaaagtgacggatgcgagagacggtcaatctcgaacagtccgccaatttcagttcacagattggcccgagcaaggcgtgccaaagtctggcgagggatttattgatttcattggccaggtccataagaccaaagaacagtttggccaggatggccccatcagtgtccactgctctgccggcgtagggagaacgggcgtctttattacactaagcatcgtccttgagcggatgaggtacgagggcgtggtagacatctttcagaccgtcaagatgctgcgcacacagcggccggccatggtgcagaccgaagaccaataccagttctcataccgggccgcgcttgaatacctgggaagcttcgatcactatgccacctag

SEQ ID NO: 130924 - DNA, 4509 bp, synthetic construct
  misc_feature 1..4509: note = Description of Artificial Sequence: Synthetic coding sequence
  source 1..4509: mol_type = other DNA
atggtccacgtggcgaggctgctgctgctgctgctcaccttcttcctgagaacggatgccgaaacaccccctcgtttcacgcgcactcccgttgatcagaccggagtgtccggcggggttgcatcttttatctgtcaggcaacaggagaccctaggccaaagattgtatggaacaaaaaaggcaagaaggtaagcaaccagagattcgaagtgatcgagttcgacgatgggagcggcagtgttctcaggattcagcccctgcgtacccctcgggatgaggcaatctatgaatgcgtggcttccaacaatgtcggcgaaatctctgtctcaactagacttaccgtgctgagggaggatcaaatacctcgaggattccctacaatcgacatgggcccccagctcaaagtcgtggagagaacgagaacagccacgatgctgtgcgccgccagcggcaatccggaccctgaaattacctggttcaaggactttctgcctgtcgatacaagcaataataacggaaggatcaagcaactgcgctcggggcgtgtgttccacacaggcgccctgcagatcgagcaatccgaggagtccgatcaaggaaagtacgaatgcgtcgctactaattctgccggcacccgctattcagcccccgctaacctttatgtgagagtcaatcggaaagttagacgcgtgcctcccaggttctctataccccctacaaatcacgagatcatgcccggaggctcagtgaatattacatgtgtcgcggtggggtctccgatgccatacgtcaagtggatgctaggtgctgaggatctgacaccagaggatgatatgccaattgggagaaatgtgctggagctgaatgacgtcagacagtcagctaattatacctgcgtcgcaatgtctacactcggtgtaattgaggcaatcgcccagataaccgtgaaggcgttaccgaaacctccaggcactcctgttgtcaccgagtctacagctacttctattaccttgacctgggactctggtaatcctgagcctgtgagttactacattatccagcataaaccaaagaactcagaagaactttacaaagagatcgacggggtggccacaacacgatattctgtcgctggcctgagcccctactccgattacgagtttcgggtggtggccgtgaacaacatcggtaggggcccccccagcgagcccgtcctaacacagacatccgagcaggccccctcttctgcaccgcgcgatgtgcaggcccgcatgctctcatcgacaacaatcctggtccagtggaaagagccagaggagcctaatgggcagatacaaggctatcgggtgtactacacaatggaccccacccaacacgtcaataactggatgaagcataatgttgcagatagtcagataacaaccataggcaacctggtcccacagaaaacatactctgttaaagtactggcattcaccagtataggagatgggcccttgtctagcgatattcaggtgatcacgcaaacaggagtgccaggacaaccacttaactttaaggccgaacccgagagcgaaacatctatcttgctttcctggaccccccccagatctgataccatagcaaattacgagctcgtgtataaggacggtgagcacggcgaagaacaaagaattaccattgagccgggaacctcctaccgcctgcagggcctgaagcccaattccctctactatttccggctcgctgctcgatcgccccaaggtctgggggcctccaccgccgagatcagtgcgcgcacaatgcagagtatgttcgccaaaaatttccatgtgaaggctgttatgaagacgagtgtgctcctgtcatgggagattccagagaactacaatagcgccatgcccttcaaaatcttatatgacgatggtaagatggtagaagaagtcgacggacgggccacacagaaactgatagtgaatcttaagccagagaagtcgtactcatttgtgctgaccaatcggggcaattccgcgggtggcttgcagcaccgcgtgacggccaagacggcacctgacgtgctgagaacgaagccagctttcatcggtaaaaccaacctggatggcatgatcacggtccaactgcccgaggtccctgcgaatgaaaacattaaaggatactacattataatagtgcccctcaaaaaatcaagaggcaagtttatcaagccctgggagtctccggatgagatggaattagacgagctgttgaaggagatcagccggaagcgccgctccatccgctatgggcgggaagtcgaactcaagccatatattgctgctcacttcgatgtactgcccactgagtttaccctcggggacgacaagcactatggagggtttaccaataaacaactgcagtcaggccaagaatacgtgttcttcgtattggccgtcatggaacacgcagaatctaagatgtacgccacaagcccatactctgatccagtggtaagcatggacttagacccgcaacctataacagatgaagaagaaggactgatatgggtggtgggtccagttctggccgtggttttcattatatgtattgtgatagcgattctcctctacaaaaggaaaccatatagaaaaagagcggagtccgactcccggaagtcatcaatccctaataataaggagatccctagtcaccacccgaccgatccagtagagcttaggaggttaaatttccagacacctggcatggcttcacatcctcccattccaattctggaactggccgaccatattgagaggttaaaagctaacgataacttgaagttttcacaggagtatgagagtatagatcctggacagcagtttacatgggaacatagtaacctcgaggtgaacaaaccaaagaataggtacgccaatgtgattgcgtacgatcactctcgggtgctgttgtccgccatcgagggaatcccaggctctgactatgtcaatgcaaattacattgatggataccgcaaacagaacgcctacatcgccacgcagggctcactccctgaaacctttggtgatttttggcgcatgatatgggaacaaaggtctgcaacggttgtaatgatgacaaaacttgaagagagaagtagggttaagtgcgaccaatactggccatcacgcggcaccgaaacccacggtctggtgcaagtgaccctgctggatactgtagagcttgctacctactgcgtaagaacattcgcactgtacaaaaatggctcaagcgagaagcgagaggttaggcagttccaatttaccgcttggcctgatcacggagtgcccgaacacccaacaccattcctcgcattccttcgccgtgtgaaaacttgcaacccacccgatgcggggccgatggttgttcactgttcggctggggttggacggacaggctgctttatcgtcattgacgccatgctggaaagaatcaaacatgaaaaaacagtagacatatatggccacgtgacactgatgagagcccagcgcaactacatggtccagacagaggatcaatacatcttcatacacgacgccctgctcgaggccgtcacctgtgggaacacagaggtgcccgcccgcaacctctatgcctacatccagaaactgactcagatcgaaactggggaaaacgtgacaggcatggagctggaatttaagcgcctcgccagttctaaggctcatacaagcaggtttatcagtgcgaacttgccttgtaataagtttaagaacaggctggttaacatcatgccatacgagagcaccagagtgtgccttcaaccaatccgtggcgtcgagggaagcgactatatcaatgcttccttcattgatgggtatcgccagcagaaggcatacatcgcgacgcaggggccattggccgagaccacagaagacttctggcggatgctatgggagcataatagcaccattgtggtcatgcttaccaaactgagggaaatgggaagggagaagtgccatcagtattggccagcagaaagaagcgcccggtatcagtactttgtggtggacccaatggccgagtacaacatgccccagtatatactacgggagttcaaagtgacagacgcaagggatggacagtccagaaccgttaggcagtttcagttcacagactggccagagcagggcgtccctaaatccggagaaggcttcattgacttcatcgggcaggtgcacaagacaaaagagcaatttggacaggatggacctatttctgtccactgcagcgccggggtggggaggacaggcgtctttattacattgagtatagtgctggagcgcatgcgatatgaaggtgtggtggatatttttcagacagtcaaaatgctccgtacccagcgacctgctatggtccaaactgaggaccagtaccagttcagctatcgcgccgcactcgagtatttaggatcttttgaccactatgccacttag

SEQ ID NO: 130925 - DNA, 5739 bp, synthetic construct
  misc_feature 1..5739: note = Description of Artificial Sequence: Synthetic coding sequence
  source 1..5739: mol_type = other DNA
atggtgcatgtggccagattactactcttactgctaacattcttcctacggactgatgctgagacacccccccgttttaccagaaccccagtggatcaaacgggggtgtctggtggggtggcttcgttcatctgccaggccaccggggacccacgccccaaaatcgtctggaacaagaagggtaaaaaggtctcgaaccagcgttttgaggtgatcgagttcgatgatggctccggatccgtcctgagaatccagccgctcaggacaccccgcgacgaagctatttatgaatgtgttgcatccaataacgttggtgagatttcggtgagcacacgtctgactgtgttacgcgaggaccagattccgagaggctttcccacaatcgacatgggacctcaactgaaggttgtggaacgcacacggaccgctactatgttatgtgccgcctcaggcaaccccgatccagaaatcacttggttcaaggatttcttaccagtggacaccagcaacaataatggacgaattaagcagctgcgctccgagagtataggcggaacccccattcgcggcgcgctgcagatcgaacagagcgaagagtctgaccaaggaaagtacgagtgtgttgctacaaattcagccggaacgaggtattccgctcccgctaacctgtatgtgcgcgaactgagagaggtgcggcgggtgccgcctaggttttccatcccccctacaaaccatgagatcatgcctggtgggagcgttaacatcacttgtgtggctgtgggatcccctatgccttacgtgaaatggatgcttggggccgaggatcttacacccgaggatgacatgccaatcggccgcaatgttctcgagttgaacgatgtgcggcagtcggcaaactacacctgcgtcgccatgagcacactgggtgttattgaggcaatagcccagatcaccgttaaagccctgccaaaaccgccaggtactcccgtcgtcactgaatcaaccgcaactagtatcaccctgacctgggactccggcaaccccgagcccgtatcctattatatcatacaacacaaacccaagaatagcgaggagctgtacaaggaaattgacggtgtggcaaccacccgctattcagtcgccgggctgtccccctattctgactatgagtttcgggttgtggcagtgaacaatatcggcagagggcctcctagcgaacccgtgctgacacagacaagcgaacaggccccatcctccgctccgagagatgtgcaggcgcgcatgcttagcagcacaaccattttggtgcagtggaaagagcctgaagagccgaatggacaaatccagggatacagagtttactacaccatggaccctacgcagcatgtgaacaactggatgaaacacaatgttgcggactcgcagattactaccatcgggaatctcgtgcctcagaagacatatagcgtaaaagttcttgcatttacatccataggagatggccccctcagttcagacattcaggttatcacccaaacaggggtccctggacagcctctaaacttcaaggccgaaccagagagcgagactagcatcttgctatcgtggacacctccacgcagtgatacaattgccaattatgaactcgtatataaagatggcgaacacggcgaagaacagagaattacaatcgagcctggtacatcatataggctgcaggggctcaaacctaatagcctgtactactttcgccttgcagccaggtcacctcagggcctgggcgcctcaaccgccgagatcagcgctagaacaatgcaaagtaaaccctccgccccaccacaggacatttcttgcacatcaccttcttccactagtatcttagtttcgtggcagcctccccctgttgaaaaacagaatggaatcatcactgaatattctattaagtacaccgctgttgatggcgaggacgataagccacacgaaatcttggggatccctagtgataccactaaatatttacttgaacaactcgaaaagtggaccgaatatcgaatcaccgtcaccgcccatactgatgtcggacccggaccggagtccttatcagttctgattcgaaccaacgaagacgtgcccagtgggccaccgagaaaggtcgaagtggaggcagtgaattccacaagcgtcaaagtctcttggcggagtccagtgccaaacaaacaacacggacagattcgcggctaccaggtgcactacgtccgtatggaaaacggagagccaaagggccagcctatgcttaaagatgtgatgctggctgatgcccaatgggagtttgacgatacaactgaacacgatatgatcattagtggtctccagccggagacttcttattctctgaccgtgactgcatataccactaaaggtgatggagcccgttctaagcctaaactcgtcagtactacgggcgccgtacccggtaagcccagacttgttattaaccacactcagatgaacaccgctctgattcagtggcaccccccagtggacaccttcgggccattgcagggctatagactgaagtttggaagaaaagatatggagcctcttactacactggaattctctgagaaggaggaccatttcaccgccactgatatccataagggcgcctcatacgtcttccgactttcagcccgcaataaggtcggttttggggaagagatggttaaagagatctcaatacctgaagaagttcccactggattcccccaaaatctgcattcagaagggacaacttccacctccgtgcagctgagttggcagcctccagttctcgccgagaggaatggaatcatcaccaaatatactttgctctaccgcgatattaacatccctctcctgcccatggagcagctgatagtaccagcagatactaccatgactctgactggcctgaaaccagataccacctatgacgtgaaggtgagagctcatacctctaagggaccaggtccctactcaccaagtgtgcaattccggacgctgcccgtggatcaggtgtttgcaaaaaactttcacgtcaaagctgtgatgaaaaccagcgtcctgctctcgtgggagatcccggaaaattacaactccgcaatgccatttaagattctgtatgacgatggcaaaatggtagaagaggtcgacggccgggcaacccagaaactgattgtcaatctgaaacccgagaaaagctattcatttgttctaacgaaccgcggtaactccgccggaggtcttcagcaccgcgttactgctaagaccgctccggacgtgctgcgtaccaaaccggcgttcatcggcaagacaaaccttgacggaatgattacagtgcagctcccagaggtcccagctaatgaaaatatcaaaggatattacatcattattgtgcccctgaaaaagtctcgagggaagtttatcaagccctgggaatcacctgatgagatggagctggatgaacttctcaaggaaatttctcgcaaaagacggtccatacgctacggcagagaggttgagctgaaaccctacattgccgcccacttcgatgtgctgccaactgagtttactctgggggacgacaagcactatggaggtttcaccaacaaacaactgcagtccggacaggaatacgttttctttgtcttagccgtcatggaacatgccgagagcaagatgtatgccactagtccgtactcagaccctgttgttagtatggatctggacccacagccaatcaccgacgaagaggagggactaatctgggtcgtgggccccgtcttggccgtggtcttcattatctgcattgtgattgccatcctgttatacaagaggaagcgcgccgaatcggactcaagaaaatctagcatccccaacaataaggaaattccctcacatcatccaaccgacccagtcgaattgagacggcttaactttcagacacctggtatggcttctcacccaccgatcccgattctcgaacttgccgaccacattgagcggctgaaagccaacgacaatctgaaattcagccaagagtacgaatcaatcgatcctgggcagcaatttacctgggaacactcgaatcttgaagttaataaaccaaagaaccggtacgcaaatgtgattgcctacgatcactctcgagttctcctaagtgcaatcgaaggcattcccggctccgattatgtgaacgccaactatatcgatggctatcgcaaacaaaacgcatacattgcaacccagggaagccttcctgaaacgttcggagacttttggcggatgatttgggaacagaggagcgccacagtggtgatgatgacaaagctagaagagaggtcacgcgtcaagtgtgaccagtattggcccagccggggcacagaaacccacggattggtacaagtgactctgctggacacagtggagctcgcaacctactgtgttagaacgtttgctctctataagaacggctccagtgaaaagagggaggtgagacagttccagttcacagcctggcctgaccacggtgtgccggagcatcctacaccctttcttgcctttctgcggagggtcaagacttgcaaccctcctgacgctgggcccatggtggtgcactgcagcgccggcgtcggcagaaccgggtgtttcattgtgatcgatgccatgctagaaaggattaaacatgagaagaccgtagatatttatggacacgtcacattgatgcgagcacagcgcaactacatggttcagactgaggatcaatacatcttcatacacgatgccctgctggaggctgtcacctgcggaaacactgaagtaccagccaggaatctgtacgcctatattcagaaactgacacagattgagaccggagagaatgtcactggtatggaactggagtttaaacgcttggcgtcctctaaggcacacacgtctagattcatatccgcaaatctgccgtgcaataaattcaaaaataggcttgtgaacattatgccatatgaatctacccgtgtttgccttcagcccatcagaggcgtggagggaagtgactatatcaatgcgtcttttattgatgggtatcggcagcagaaggcatacattgccacccaggggcctttggccgaaaccacggaagacttctggaggatgctttgggaacacaattctaccattgtggtcatgcttacaaagctgcgtgagatggggagagaaaagtgtcaccaatactggcctgcagaacggagcgcccgctaccaatacttcgtcgtggacccaatggccgaatataacatgccccagtacatcctgagagagtttaaagttaccgatgcgcgggacggacagtctaggacagtccgccagttccaattcaccgattggcccgagcagggagtacccaagtctggggaggggttcattgatttcatcggtcaagtgcataagactaaagagcaatttggccaagacgggcccatctctgttcattgcagtgccggcgtgggtagaacaggtgtgttcattaccctgtccatcgtcctcgaaagaatgagatatgaaggcgtggtggacatctttcagacagtcaagatgttaaggactcagagaccagcgatggtccagacagaggaccagtaccaattctcctatcgtgcagcgctggagtacctgggctctttcgatcattacgcaacgtag

SEQ ID NO: 130926 - DNA, 2103 bp, synthetic construct
  misc_feature 1..2103: note = Description of Artificial Sequence: Synthetic coding sequence
  source 1..2103: mol_type = other DNA
atggaaccactctgcccacttctgctcgtaggctttagtttacccctggctcgcgccctgcgtggaaacgaaactaccgctgatagcaatgaaacaacaacaacaagtgggccgcctgaccctggtgctagccagcctctactggcctggctcctattgccactgctattgctcttactggtcctactgcttgccgcctattttttcaggttccggaaacaaaggaaagctgtggtctccacctccgataaaaagatgcccaatggcatactagaagagcaggagcagcagagggtgatgctgctgtcccgtagccccagtggtcccaagaagtattttcccattcccgtggaacacctagaagaggagatccgaattcggtccgccgatgattgcaaacagtttcgagaggaatttaactctctcccatcaggtcacatccaaggcacttttgaattggccaacaaagaagaaaatagagaaaagaacaggtatcctaacatcctgccaaacgatcatagcagagtgattctttcccaactcgatggcattccctgcagtgattatattaatgcctcctatatcgatggctataaggaaaaaaacaagttcatcgcggctcagggaccaaagcaggagaccgtgaacgacttctggcgcatggtgtgggagcagaaatccgctaccatagtaatgcttacaaacttgaaagagcgcaaagaagagaagtgtcaccagtattggcctgatcagggatgttggacctacgggaatattagagtctgcgtcgaggactgtgtcgtgttagtggactacacgatccggaaattctgcattcaaccacagctgccagatgggtgtaaagctcccaggctcgtatcacagttgcattttacgagctggccagattttggggtcccctttacacctatagggatgctgaaattcctgaagaaagtgaaaaccctcaaccctgtgcacgcgggccccattgtagtgcattgcagtgctggggtgggacggaccgggactttcattgtgattgacgcgatgatggcaatgatgcatgcagagcaaaaagtggacgtcttcgaatttgtcagtcgcatccgtaatcagcggcctcagatggttcagacggatatgcaatacacctttatatatcaagccctcttggagtactacttatatggggacactgagcttgatgtgagttcgctcgaaaagcacctgcagaccatgcacggaaccactacccactttgacaaaatcggtttggaagaagaatttcggaaactcacaaacgtgcggatcatgaaggaaaacatgaggacaggcaatctgccggctaacatgaagaaggccagggttattcagataataccctatgattttaaccgcgtgatcctgagcatgaaacggggccaggaatataccgattatattaacgcttccttcattgacgggtaccgacaaaaggattactttatcgccacacagggccccctggcccataccgtggaggatttttggcggatgatctgggaatggaaatcccacacaattgtgatgcttactgaggtgcaagagagagaacaagataagtgctaccaatactggccaaccgaaggctcagtcacacatggggagattaccatcgaaataaagaatgatactctgagcgaggcaataagcatcagagattttttagtgactctgaaccagccacaggcacgtcaggaggagcaggtgagggttgtgcgacaatttcattttcatggatggcccgagattggaatcccagcagaaggtaagggaatgatcgacctcatcgccgccgttcaaaagcaacagcagcagaccggcaaccatcctatcacagtgcactgctcagctggcgccggccgcacgggaactttcatcgcactcagtaatatcctggaaagggtcaaagcggaaggtttgctggatgtgttccaggccgtaaagtcactgcggttgcagaggccccacatggttcagaccctggagcagtatgaattttgttacaaggtcgtacaagactttattgatatcttttcagactatgccaattttaagtag

SEQ ID NO: 130927 - DNA, 1929 bp, synthetic construct
  misc_feature 1..1929: note = Description of Artificial Sequence: Synthetic coding sequence
  source 1..1929: mol_type = other DNA
atgtccaatagatcgagcttctccaggttaacttggtttcgaaaacagaggaaagccgtggtatctacatccgacaaaaagatgcctaacggaattctggaggagcaagagcagcagcgcgtcatgctattgtctcgaagccctagtggccctaaaaagtacttccccattcccgtcgaacatctggaggaggagataaggattagatcggccgatgactgtaagcaatttagggaggagttcaactctctcccgtccggtcacattcaagggacattcgaattggccaacaaggaggaaaatagggaaaagaatagataccccaatattctgccaaatgaccactctagagtcatactgagccagctggatgggatcccctgtagcgattacattaatgccagctacattgatggctacaaagaaaagaataagttcatcgccgcccagggacccaagcaggagacagtgaatgacttctggcggatggtctgggagcaaaagtctgccacaatcgtgatgctgaccaacctgaaggagcgcaaagaggagaaatgtcatcagtactggcctgaccagggatgctggacatacgggaatatacgggtttgtgttgaggattgtgttgtactggttgactatacgatccgaaagttttgcatccagccccaacttcccgacgggtgcaaggctccacgtctggtcagtcagctgcactttacctcgtggccagacttcggagtgccattcactcctatcgggatgttgaaattcctgaaaaaagtgaagaccctaaatcctgtacacgctgggccaatagttgtgcactgtagcgcaggcgtcggccggactggtaccttcatcgtgattgacgccatgatggcaatgatgcatgctgagcagaaggttgatgtgttcgagttcgtcagtcggatcaggaatcaacggccccagatggtccagaccgacatgcagtatacctttatctatcaggccctcctggagtactatctgtacggtgacacagaactcgacgtctcctccctggaaaagcacttgcaaaccatgcacggcactacaacccactttgacaagatcgggctggaggaggaattcagaaagctcacgaatgtcaggataatgaaggaaaatatgagaaccggtaacctgccagctaatatgaagaaggcccgggtcatccaaatcatcccttatgacttcaatcgcgtcattttgtccatgaaaagaggacaagagtacaccgattacataaatgcctcgttcattgacgggtatagacagaaggactacttcatagctacacagggcccactcgcacatactgtggaggatttttggaggatgatttgggagtggaagagccacactatcgtgatgctgaccgaagtgcaggagcgcgagcaggataagtgctatcagtactggcctaccgaggggtcagtcactcacggcgagatcactatagagatcaaaaacgatacacttagtgaggccatttccatcagggattttctcgtgactcttaaccagccccaggcccgtcaggaagagcaggtccgggtggtgaggcagtttcattttcatgggtggccagaaatcggcatccccgctgaaggaaagggtatgatagatctgattgccgctgtgcagaagcagcaacagcaaaccggcaatcatccaatcaccgtccattgtagtgctggcgcgggaagaactggcacttttatcgctctgagtaatattttggagagggtgaaagctgagggcctgctggacgtcttccaggctgtgaagtccttgcgcctccaaagaccccacatggtgcagaccctggagcagtacgaattctgttataaggtggtccaggacttcatcgatattttttctgattatgctaatttcaaatag

SEQ ID NO: 130928 - DNA, 2103 bp, synthetic construct
  misc_feature 1..2103: note = Description of Artificial Sequence: Synthetic coding sequence
  source 1..2103: mol_type = other DNA
atggaacctctttgcccactcctactcgttggtttctccctacccctggccagggcccttcgaggaaacgaaacaactgctgatagcaacgagactactacaacaagcggccctcctgacccaggcgcctcacaaccgctgttagcctggttgctgctacctctgctacttctcctgctagtgctcttactggcagcatacttctttcgatttaggaagcaacgaaaggcagtggtttctaccagcgataaaaagatgcccaacggcatactggaggagcaagaacagcaaagagtgatgctcctgagccggagtccgagtggacccaaaaagtactttccaattcccgtcgaacatttggaggaagaaattcggataagatctgcagacgactgcaaacaatttcgcgaagaattcaacagcttgcccagcggacatatacagggcaccttcgagcttgcaaacaaggaagagaacagggaaaagaaccggtaccccaacattctccctaacgaccacagtcgcgtgattctcagtcaactggatgggatcccatgctcagattatataaatgcaagttatatcgacgggtacaaagagaaaaacaaatttattgccgcccaaggtcctaagcaggagacggtcaatgacttttggcgaatggtctgggagcagaaatcagcaacaattgtcatgctgaccaacctgaaggagcggaaggaagagaaatgtcaccagtactggccagatcaggggtgctggacgtatggcaacatcagggtttgcgtagaagactgcgtggtgctggttgactacactatccgaaaattctgcatccagccccagttgcccgacggctgcaaggcgcccaggttggtttcccagcttcacttcacctcttggcccgactttggggtgccatttactcccattggcatgcttaaatttctgaaaaaagtcaaaactcttaacccagtccatgccggacctatcgttgtgcactgttctgctggggtcggacgaacaggcacttttattgtcatagatgccatgatggctatgatgcatgcggagcagaaggtagatgtgtttgagtttgtcagtcggatccgaaatcaaaggccacagatggtgcagactgatatgcagtatacttttatatatcaggcgctgcttgaatactatctgtatggggatactgaactcgatgtaagtagcctggagaagcacctgcagacaatgcacggaactacaactcactttgacaagataggactcgaggaagagtttagaaaactgactaatgtgagaatcatgaaggagaatatgaggaccggcaatctgcctgcaaatatgaagaaagctagagtcattcagatcatcccttacgacttcaatagagtgatcttatcaatgaagagaggtcaggagtatactgactacattaatgcaagcttcattgacgggtatcgacaaaaggactacttcatagcaacacagggcccactggcgcacaccgttgaagacttttggcgaatgatatgggagtggaagtcccacactattgtgatgctgacagaggtgcaagaaagagagcaggataagtgctaccaatattggcctacagaaggctcagttacccacggcgagattacgattgagattaagaatgatactctctccgaggcaatctccattcgcgactttctagtcacacttaaccagccacaggctaggcaggaagagcaggtcagagtggttcggcagtttcacttccatggatggcctgaaatcggtattcccgctgaagggaaaggcatgatagatctgatcgctgccgttcaaaaacagcagcagcagacgggtaaccaccctatcacagtgcactgttctgcgggagcaggtcggacagggacatttatcgctctgtcgaacatactcgagagggtcaaggccgagggcctcctcgatgtattccaggcggtcaagtccttaaggcttcagaggcctcacatggttcagaccctggaacagtatgagttttgttataaagttgtgcaagatttcattgacatcttttcagactacgccaatttcaagtag

SEQ ID NO: 130929 - DNA, 438 bp, synthetic construct
  misc_feature 1..438: note = Description of Artificial Sequence: Synthetic coding sequence
  source 1..438: mol_type = other DNA
atggagccgctatgtccgttattattggtcggcttcagcctcccactggcacgtgcgctgcgaggtaatgaaacgacagccgactccaacgaaacaaccacaacatccggaccaccagatccaggagcctctcaacctctgttagcctggctgctcttgccactgctgttactgcttctcgtgctgttgttggctgcctatttctttaggttcagaaagcagcggaaggcagttgtgtccacctctgacaaaaagatgccaaatggaattttggaagagcaggagcagcaacgcgtgatgttgctcagcagaagtcccagcggacccaagaaatattttcctattcctgtggagcatctggaggaggagatcaggatcagatcagctgatgattgcaaacaatttagggaggaattcaacatgactattttaggttag

SEQ ID NO: 130930 - DNA, 2010 bp, synthetic construct
  misc_feature 1..2010: note = Description of Artificial Sequence: Synthetic coding sequence
  source 1..2010: mol_type = other DNA
atggtgagccagagactgccccgtaagacaagggggcctccctggtccccttgcgtccacagctgttggtgggtgttagcgtgccggagccctggcctgagcggagccacccgccccctacctacagcgacccgccagccacgacctcaggctctgcgcacccgcgctccgccttcaaggtgttggcccggatgctactgccgctgttgcagcagttcaagctgttcattctccccacccaccagtagcggttcaggcccaaagaagtacttccccattccagttgagcatttggaggaggagattcgcatcaggtctgctgatgactgtaagcagtttcgcgaagagttcaatagtctcccctctggccacatccaaggtaccttcgagttggcaaacaaggaagaaaacagagagaagaatagatatcctaacatattgccgaacgaccactcacgggtcatcctctcccagcttgatggcattccctgttctgattacatcaatgcctcctatatcgatggctacaaagagaagaataaattcattgcagcccagggtccaaagcaagaaacagtgaacgatttctggagaatggtgtgggagcagaaatccgccaccatcgtgatgctgaccaacctgaaggagcgcaaggaggagaagtgccaccaatactggccagatcagggctgctggacctatggcaacatcagagtctgcgtggaggattgtgttgtgctcgtggactacactatacggaagttctgcatccagccacagttaccggatgggtgcaaagcacctaggctggtgtcacagctccacttcacttcctggcccgatttcggggtgccttttactccaatcggcatgctcaaattcctgaagaaagtcaagactcttaacccagtccacgccggccctatcgttgtgcattgctcagccggtgtgggccggacagggactttcattgtcatcgacgccatgatggcaatgatgcacgcggaacagaaagtcgacgtgttcgaattcgtttctcgcattagaaaccagaggccacagatggttcaaaccgacatgcagtatacctttatctaccaggccctgctggagtattatctctacggggatactgagctcgatgtgagtagtttggagaagcatcttcaaacgatgcacgggaccaccactcacttcgacaaaataggcctcgaagaagagtttcgaaaattgacaaacgtccggatcatgaaagaaaatatgcgcacgggcaacctacccgccaatatgaaaaaagctagagttattcagattatcccttatgatttcaacagagttatcctgagcatgaaacgcgggcaggaatacacagactacatcaacgcgtcatttatagatgggtatagacagaaggactactttattgccacccaaggtcccttggctcacacagtggaggacttctggcgcatgatatgggaatggaagagccatactatagtcatgctcaccgaagtccaagagcgggagcaagataagtgttaccagtactggcccacagaaggtagtgtcacacacggtgaaataaccattgaaatcaaaaacgatactctttctgaagccatatcaatcagagatttccttgtcactttgaaccagcctcaggctagacaggaagagcaggtgagagtggtgagacagtttcactttcacgggtggccagagattggcatacccgcagaagggaaagggatgattgacttaatagcggctgtgcagaagcagcagcagcagacaggcaaccatcctatcactgtgcactgccgcaacagcatgaactcagccacaaaatggtacaagatattgctcatctactttcttataatgctcatctccaatgaagacagctgcctgaaaatctttttcaatttgatggagcaacgcagaagccacttcccccaggatgctcggctgtccccacccctgtcaggtaccgcatttgccctatag

SEQ ID NO: 130931 - DNA, 423 bp, synthetic construct
  misc_feature 1..423: note = Description of Artificial Sequence: Synthetic coding sequence
  source 1..423: mol_type = other DNA
atggaacccctgtgtcctttgttgcttgtgggtttctcccttccactcgcaagagctttgagggggaatgagaccactgccgacagcaatgagaccactacaacaagcggtcctcctgaccctggggctagtcaacccctcctggcatggctgctgcttcccctgctcctgcttctgttggtactgctcctagcagcctatttcttcaggttcagaaagcaacgcaaggctgtcgtaagtacttcggacaagaagatgcccaacggaatacttgaggagcaggagcagcagcgagtaatgttgttatctaggtccccctcaggccctaaaaagtactttcccatcccagtcgagcacttagaggaggagatcaggatcaggtctgcagacgattgcaaacaatttagggaggagtttaattag

SEQ ID NO: 130932 - DNA, 465 bp, synthetic construct
  misc_feature 1..465: note = Description of Artificial Sequence: Synthetic coding sequence
  source 1..465: mol_type = other DNA
atggaaccactttgcccactgctcctcgtgggcttttcactgccactagctcgggcgctgagaggaaatgagacaaccgctgattctaatgagaccacaacgaccagtggtcctcccgaccccggggcgagtcagccgctgttagcttggctactacttcctttgcttctcctgctcctagtattactgcttgccgcctatttcttccggtttcggaaacaaaggaaggctgtggtgagcacatccgacaaaaaaatgccgaatggaatcttggaggagcaggagcagcagcgtgtcatgttgttatctagatcaccttcagggccaaaaaagtacttccctattcccgtggagcacctagaagaggagataaggataaggagcgcagacgattgcaagcagtttagggaagagtttaattctttaccttccgggcacatccagggcaccttcgagctcgcgtag

SEQ ID NO: 130933 - DNA, 5724 bp, synthetic construct
  misc_feature 1..5724: note = Description of Artificial Sequence: Synthetic coding sequence
  source 1..5724: mol_type = other DNA
atggccccagaaccagcgcctggccgcacaatggtgccactcgtgcctgctctggtgatgctgggacttgtggccggagctcatggggactctaagccggtgtttatcaaagtacctgaagaccagaccggtttgtctggcggggtggcctcatttgtctgtcaggcaacgggcgaacccaagccacgcattacctggatgaaaaagggcaaaaaagtgagctctcagcgcttcgaggtaatagagttcgacgacggggctggaagcgtgctgaggattcagccccttagggtccagcgggatgaggctatctacgaatgcaccgccactaactcactgggcgagatcaacacatcagccaaactgtcagtactggaggaggaacagctgcccccgggctttccttcaatcgacatgggacctcagcttaaggtggtagagaaggctcggacagcaaccatgctttgcgcagctggcggcaaccctgatccggagatctcatggtttaaggattttcttccggtggaccccgccactagcaatggaagaattaaacagcttcgctccggcgcactacagattgaatccagcgaggaatctgaccaaggcaaatacgagtgtgtggctactaactccgcgggcacccgctattccgcccctgccaatctgtacgtgagagtgcggagggtagcccctcggttttcaataccccctagctcacaggaggtcatgccaggcggaagcgtcaacttgacatgcgtggcagtgggtgcacccatgccctatgtaaaatggatgatgggggccgaagagcttaccaaagaagacgaaatgcccgtggggcggaatgttttggagttatcaaacgtggtccgctctgccaactacacatgtgttgcaatcagcagccttggcatgatcgaagccaccgcccaagtgacagttaaggcactcccgaagccacctatcgacctggtggttacagagaccaccgccacatcagtgacacttacctgggattccgggaatagcgagcccgtgacttattacgggatccagtaccgggctgcaggcacagaaggacccttccaggaggtggatggcgttgccaccacgcgatactccatcggaggcctatctcccttttcagaatacgcatttagagtcttagcagtaaactcaattggccgtggaccaccgtctgaggccgttcgagcaagaactggcgagcaggctccttcctcccccccacggcgagttcaagcaagaatgctgtccgcctcaaccatgctggtgcagtgggaaccaccggaagagcctaacgggctcgtgagagggtaccgcgtctactacaccccagactctaggagacccccaaatgcatggcacaaacacaacaccgatgccgggcttctcactaccgttggtagcctcctacccggtatcacctactcgctgcgggtgctggcctttaccgcggttggggacgggccaccctcacccaccatccaggtcaagacacagcagggggtccctgcccaacccgcggacttccaggctgaggtagagtccgacacgcggatccagctgagctggctgctaccacctcaagagcggataattatgtacgaattggtgtactgggccgccgaagacgaggaccaacagcataaagtaaccttcgaccctacatcaagctatacactggaggacctgaaacccgataccctgtacagatttcagcttgcggcccggagcgacatgggtgtgggcgtgtttacgcctacgatcgaggcacgtacagcccagagcactcctagcgctccaccgcagaaagtgatgtgcgtgagcatgggctccaccaccgtgagagtgagctgggtaccccctcctgcagattcacgcaatggggttataactcaatactcagttgcgtacgaggccgtggatggtgaagacagaggacgacacgttgtggatggcatatctcgggaacacagcagttgggacttggtggggctggagaaatggacagaatacagagtgtgggttagagcccataccgatgtgggcccgggaccagagagtagtcctgttttggtgcggaccgacgaggacgtgccttcggggcctcctcgtaaggtggaggtggaacccttgaactccaccgccgtgcatgtttactggaaactgcccgtaccctccaaacaacacggtcagatccggggatatcaggttacctacgtacggcttgagaatggggagccaagaggcctgcccatcatacaggacgtgatgctcgctgaagcacagtggcggccagaggagtccgaagattatgaaaccaccatcagcggcttaactcccgaaaccacttacagcgtgacggtcgcagcatacaccaccaaaggcgacggcgcaagaagtaagcccaagatcgttaccaccaccggagccgttcccggaagacccacgatgatgattagcaccacagccatgaacacagctcttcttcagtggcacccacccaaggagctgcctggtgaattactgggctatcgactccagtactgtcgagcagatgaggctcgccccaatacaatcgatttcggcaaggacgatcagcatttcacagtaacaggcttacataagggaaccacttacatctttcgactcgctgccaagaatagagctggcctgggtgaagagttcgagaaagaaatccggactcctgaagatctgccctcagggttcccccagaacctgcacgtgactggactgacaacttctactacagagttggcctgggatccccccgtcctcgccgaacgcaatggtcgcatcatctcatacacggtggtgtttagagatattaactctcagcaggagctgcagaatataaccacggatacgcggttcacactcacaggattgaagcctgacacaacctacgacatcaaagttcgtgcctggacttcgaaagggtccggccccctgtcccctagcatccaaagcaggacgatgcccgtggagcaggtgttcgccaagaatttcagagtggccgctgccatgaaaaccagcgtgctgctatcatgggaagtaccagatagttacaagagcgccgttccgttcaaaattctgtataacggacagtcagtcgaggtggatggccattccatgagaaagctgatcgctgaccttcagcctaacactgaatattcatttgtcttgatgaacagagggtccagcgctgggggactacagcatctggtgagcattagaacggctccggacctactgccacacaagcccttaccggctagcgcctacatcgaagacggacggttcgacctctctatgccccatgtacaggacccttctttagtgaggtggttttacattgtggtggtcccaattgaccgcgtaggcggatccatgctaacaccgaggtggagcacgccggaggagctggaactggacgagctccttgaggcaatagagcaggggggagaggaacaacggcggcggcgcaggcaggccgaacgtcttaagccttacgtggcagcccagctcgatgtcttgcccgagactttcaccctaggagataaaaagaactatagaggtttctataaccgccctctgagcccagaccttagttatcagtgcttcgtactagcttcattgaaggagcccatggatcagaagcgctatgcttcctctccttatagtgacgagatcgttgtccaagtaactcccgcccagcagcaggaggaaccggagatgctctgggtaaccggcccagtgctggccgttattctcatcattttaattgttatcgccatcttactgtttaagagaaagcggacccactctccctctagtaaggatgaacagagcatcgggctcaaggacagtctgttagcccacagcagtgatcctgttgaaatgcgccggttgaactaccagacacctggcatgcgcgatcatccacctatcccaatcaccgatttggccgacaatatagaacggcttaaagcgaatgacggcttgaagttcagccaggagtacgagtctatagacccaggtcagcagttcacttgggagaattccaatctggaggttaataagcctaagaacagatacgctaatgtgatcgcctacgatcactcccgggtcattctgacttctatcgacggggtgccgggcagcgactacattaatgctaactatatagacggatatcgtaagcagaacgcttatatcgcaactcaggggccactgccagagaccatgggagacttctggaggatggtctgggaacaaaggacagcgactgttgtgatgatgacacgcctggaggagaagagtagggtgaagtgcgaccagtattggcctgcaaggggaacagagacctgtgggctcatccaggtcacactgcttgacaccgtggagctggccacttacacggtgagaacttttgcactgcacaaaagcggctcgtcagagaaacgagaactgaggcagtttcaatttatggcatggcctgatcacggtgtaccagaatacccaacccctatcctggctttcctgagacgtgttaaggcctgcaaccctttggatgccgggcccatggttgttcactgctctgcaggtgttggcaggactggctgctttatcgtgatcgacgctatgcttgagagaatgaagcacgaaaagaccgtagatatctatgggcacgtgacctgcatgcggagtcaaagaaattacatggtgcagaccgaggaccagtacgtgttcattcatgaggcgctgctggaagccgcaacctgtggccacaccgaggtgcccgctcgcaacctgtacgctcacatacagaagttgggccaggtcccaccaggtgagtctgtcaccgccatggaacttgagttcaagttactggcctcgagtaaggcccatacatcaagattcatatcagcaaatctgccatgcaataaatttaagaacagactcgtgaacattatgccgtacgagctgaccagggtatgtctgcagccaattcgcggagtggagggcagtgattatatcaatgcctccttcttagacggatacaggcagcagaaggcgtacatcgccactcagggtcctttggccgagagcacggaggatttctggaggatgctctgggagcacaattctactatcattgttatgctcacaaaattgcgggaaatgggccgtgaaaagtgtcaccagtattggccggccgagagaagcgcaagataccagtacttcgttgttgatccgatggcagaatataacatgccacagtacattctgcgcgaattcaaggtgacagacgcacgagatggacaatcccggactattcgccagtttcagtttactgactggccagaacagggtgtacctaaaaccggtgaggggttcatcgacttcattggtcaggtgcacaaaacgaaagaacagtttggccaagatggacccattacagtacattgcagtgctggggtgggtcgtaccggagtctttatcactctgtccattgtcttagaacggatgaggtacgagggggttgtcgatatgtttcaaacagttaagactttaagaacccaacgcccggccatggtacaaaccgaagaccaataccagctatgttatcgggcggcgttggaatatctgggcagcttcgatcactacgcgacgtag

SEQ ID NO: 130934 - DNA, 5697 bp, synthetic construct
  misc_feature 1..5697: note = Description of Artificial Sequence: Synthetic coding sequence
  source 1..5697: mol_type = other DNA
atggcacctgagcccgcccccgggcgaacgatggtgccgctggtccctgcactggtgatgttgggcctagtcgccggggctcacggggactcgaaaccagtcttcattaaggtgcccgaggaccagactggtctgtcaggaggagtagctagtttcgtctgtcaggccactggcgagcctaagccgagaatcacctggatgaagaaagggaaaaaggtttccagccagcgcttcgaggtgattgagttcgacgatggagctggctctgtgctgcggattcagcctctccgcgtgcaacgtgatgaggccatctacgaatgcacagccaccaactccctgggcgagatcaatacatccgcgaaactgtctgtgctggaggaggagcagctcccacccgggttcccttcaatagacatggggccacagctcaaggtggtggaaaaagcacgcactgcaacaatgctgtgtgcagcgggaggaaatccagaccccgaaatatcctggttcaaagactttctgccggtggatcccgccacgtccaatgggagaatcaagcagctgcggtcaggggcgcttcagatcgagagctctgaagagtccgatcagggtaagtatgagtgtgttgcgacgaactccgcaggaactcgctatagcgcacctgctaatctgtatgtgcgtgtgcggagagtggccccccggttttccatacccccatcatcacaggaagttatgcccgggggcagtgtgaaccttacctgtgtggccgttggggccccgatgccatacgtgaagtggatgatgggcgctgaagagcttaccaaagaagacgaaatgccggtggggaggaatgtgctggagctgagcaacgtggttcgatctgcaaattacacgtgcgtggccataagtagtttaggcatgatcgaagctactgcccaggtcacagtgaaagctctacccaagccacccatcgaccttgttgtgacggagactactgctacatccgtgacccttacctgggattctggcaatagcgaacctgttacttattacggtattcagtacagagccgctggaacagagggcccgttccaggaagtggatggagtggccaccactaggtattcgattggcggcctcagtcccttttctgaatatgccttcagggtgcttgcggtcaatagcatcggccgcggacctccatcagaggcagtccgtgcccgtactggggaacaggcccccagctcaccacctaggagggtgcaagcccgcatgctctctgccagtactatgctagttcagtgggagcctccggaggaacctaacggtctggtccggggttacagagtttattacacccctgactcccgtcggcccccaaatgcctggcataagcacaacacagacgccggcctgctaacaactgtggggtctctgctgcccggaataacctactccttaagagtgctggcttttaccgccgtgggggatggtccaccttcaccaaccattcaagtgaaaacacagcaaggagtgcctgcccagccagccgacttccaggcagaagttgagagcgacactaggattcaattgagttggctgcttccaccccaagagagaataatcatgtatgagcttgtgtattgggcagctgaagacgaagatcaacaacacaaggtgacctttgaccctacgtcatcctatacactggaagacttaaaaccagacaccttgtaccgctttcagctcgccgctagatccgatatgggtgttggcgtgtttacaccaacaattgaggctcggacagctcagtcaaccccatcagctccaccacaaaaagtgatgtgtgtgagcatgggctcaactaccgtgcgagtatcctgggtgccacccccagccgacagcaggaatggggtgattacccagtatagtgtggcgtatgaagctgtggacggtgaagatcgggggcggcatgtggtggacggcatctccagggagcacagctcatgggatctggtcgggctggagaaatggacagaatatagagtatgggtcagggctcacaccgatgtcgggcctgggccggagtcctcacccgtcctggtccgtacagacgaagacgttcctagcggaccgccaaggaaagtggaggtggagccattaaacagcacggccgtccatgtttattggaagcttccggtcccatccaaacagcacggccagatccgaggttaccaagtgacatacgtgcggttagaaaatggggaacctaggggactcccgatcattcaggatgtgatgctcgctgaagcccaggaaaccaccataagcggcctcactcccgagacaacatattctgttactgttgccgcctacaccactaaaggcgatggcgccaggagcaaacccaagatagtgaccaccacaggcgcagtgcctgggagacctaccatgatgatctctaccacagccatgaatactgctcttctccagtggcacccccccaaagagttacctggcgaattgctgggatatcggttgcaatattgtagggcagatgaagccagacccaacacgattgacttcgggaaggacgatcaacatttcaccgtcactggtctgcataaggggacaacatacatatttaggttagccgcgaaaaatcgggctggccttggagaggagttcgagaaggaaatccgcacccccgaggatctgccatctgggttcccccaaaacttacacgtgacagggctgacaaccagcaccaccgagcttgcctgggatcccccagtcctggctgaacgaaatggcaggatcatcagctataccgtcgtcttccgtgacatcaattctcagcaggaactccagaatattactacagacacccgcttcacgcttacaggcttaaagccagataccacttatgatattaaggtgcgcgcttggacctctaaaggctctggtcctctttcgcctagcatccagtcaagaacaatgccagtggagcaggtgtttgcaaagaactttcgcgttgccgccgccatgaagacctcggtgctgttgagttgggaagtcccagactcatacaagtctgcagtcccttttaaaatcttgtacaacggacaaagcgttgaagtggacggacatagcatgcgcaagctgatcgccgacctgcaacctaacactgagtattcctttgttctaatgaaccggggaagtagtgccggaggtctccaacatctcgtgagcatccggactgcccccgacctgctgccccacaaaccgctcccggcatcagcctacatagaggatgggcgattcgacctgtccatgcctcacgtgcaggaccctagcctggtccgctggttctacattgtggtggtacccatagaccgcgtggggggatccatgcttactcctagatggtctactccagaagagctggagcttgatgagcttctagaagcaattgaacaagggggtgaggagcaacggcggagaaggaggcaagctgagcggctgaagccctatgtggccgcccaactggacgtgctgccagaaacattcacattgggtgacaaaaaaaactatcgtggcttctataacaggcccctcagccccgatctgtcttatcagtgtttcgtcctggcctccctgaaagaacctatggaccagaaacggtatgcgtcctccccttattcggacgagatcgtggtgcaggttacccccgcccagcagcaggaagaaccagaaatgctttgggtgaccgggccagttcttgcggttatcctgatcatcctcatcgtcatcgcaattctactgtttaaaaggaaaagaacacattcgcccagtagcaaagacgagcagtcgatcggacttaaggactctcttcttgctcattccagcgaccccgtcgagatgcggaggcttaactaccagaccccgggaatgagagatcacccaccaattcccattaccgacctcgccgataatattgaaaggctgaaggcaaacgatggcttgaagttcagtcaagagtacgagagcatcgacccaggtcagcagtttacctgggagaatagcaacctagaggttaataagccaaaaaatcgttacgctaacgtcatcgcatacgatcactcccgtgtgatcctcacctccattgatggtgtgcctggcagtgactacattaatgctaattatatcgacgggtacagaaaacaaaacgcctacatagcaactcagggacctctccccgaaacaatgggcgacttttggcggatggtgtgggagcaaagaaccgcaacagttgttatgatgaccaggctggaggaaaaatcacgcgttaaatgcgaccagtattggcccgccagagggacagaaacctgcggtctcatccaggtgaccctgctggataccgtcgagttggcaacctacaccgtacgcactttcgccctccacaaatccggatcctcagaaaagcgcgagcttaggcaatttcagtttatggcctggccagatcacggcgtaccagagtaccccacgccaatcctcgcatttcttaggagggtgaaggcatgcaaccccctggatgcaggacccatggtcgtacactgctccgcaggtgtgggccgtaccggatgttttatcgtcattgatgctatgctagagcgtatgaaacatgaaaaaacagtcgatatctacggccatgtaacatgtatgcgctcccaaagaaattacatggtgcaaactgaagaccagtatgtattcattcacgaagccctgctggaggcggccacttgcggacatacagaggttccagcgcgtaatttgtacgcccatattcagaaacttggacaggtgccgccaggagaatctgttaccgcaatggagcttgaattcaaattgctcgccagtagtaaagcacacacatcacgctttatatctgccaatcttccctgcaataagttcaagaacaggctcgtgaatataatgccatacgaattaactcgcgtatgtctgcagcctattcgaggggtggagggaagcgattacattaatgccagcttcttggacggctaccgccagcagaaagcgtacatcgctacgcagggacctcttgctgaatcaacggaggacttctggcgtatgctctgggaacacaatagcaccatcatcgtgatgctgacgaagctcagagagatgggccgggaaaaatgtcatcagtactggccagcagagcggtccgcccggtatcaatattttgttgtcgatcccatggccgagtacaacatgcctcagtacatcctccgtgagttcaaagttacagacgctcgggatgggcagtcccgaacaattcggcagtttcaatttacagactggccggagcagggcgtcccaaagacaggcgagggtttcatcgactttatcgggcaggtccacaagacaaaagagcagttcggacaagacggcccaataacagtacactgttctgccggggtcggaaggactggcgtttttataacactctcaatcgtgcttgaaaggatgcgctatgagggcgtggtggatatgttccagacagtcaaaacgcttaggacacagaggcccgccatggtacaaacagaagaccagtaccaactttgttacagagctgccctggaatatctgggctcctttgatcactatgcaacatag

SEQ ID NO: 130935 - DNA, 5724 bp, synthetic construct
  misc_feature 1..5724: note = Description of Artificial Sequence: Synthetic coding sequence
  source 1..5724: mol_type = other DNA
atggctccagaaccggcccctggacgcaccatggtaccactcgtgccggcccttgtgatgttggggctggtggcaggagcccacggagatagtaagcctgtgtttatcaaagttcctgaagaccaaaccggtttgtctggcggggtggccagtttcgtgtgccaggctaccggagagccaaaacccaggatcacctggatgaaaaaagggaaaaaggtatctagtcaacgcttcgaggtcatcgagttcgatgacggcgccgggtcggtgctgcgcatccaaccactgcgggtgcaaagagatgaggctatttacgaatgtaccgccaccaatagcctcggggagattaatacgtctgccaagcttagtgtcctagaagaggagcagctgcctcctggattccccagcatcgacatggggcctcagctgaaggttgttgaaaaggccaggactgcaaccatgctgtgtgccgctggcggcaaccccgaccccgaaatctcttggttcaaggatttcctgcccgttgaccctgccacctccaatggcaggatcaagcagctccgcagcggggcgctgcagattgaatcctctgaggagagtgaccagggtaagtacgagtgtgtagccaccaacagtgccggtacacggtattccgcccccgcaaacctttacgtgcgagttcgccgagttgcaccccgatttagcatccctcccagctcccaggaagtgatgcccggcggctctgtcaatctgacctgcgttgcggtcggcgccccaatgccatacgttaaatggatgatgggcgccgaagagcttaccaaggaggacgagatgcccgtgggacgaaatgtcctggaattgtcgaacgtggttcgctctgcgaattacacatgcgtggccatctcctccctaggaatgatagaagcgaccgcccaggttaccgtgaaggctctccccaaacccccaatcgacctcgtggtcaccgagacaaccgccacatcagtgacactgacgtgggactcaggcaactccgagcccgttacttactatggaatccagtatcgcgcagccggaactgagggcccatttcaggaagtcgacggggtcgctactacaaggtattcaattggtggcctgagcccattttccgagtatgcattcagagtattggccgtgaacagcatcggaagaggtcctccctccgaggccgtgagagcccgtacaggcgaacaagcaccaagcagccccccccgcagagttcaggcgcggatgttgtctgccagcactatgctcgttcagtgggaaccgcccgaggaacctaatggacttgtgaggggctatcgcgtatactatacgcccgattcgcgccggccacccaatgcttggcataagcataatactgacgccgggctgctgaccaccgtgggctcgctgctccccggaatcacttattctctccgggtactagcattcacagcagtgggagacgggccaccctctccaaccatacaagtgaaaacccagcagggtgtgcccgcacagccagccgacttccaggcagaagttgaatccgataccagaatccagctgtcttggctgctcccaccacaggagcgcatcattatgtatgagctagtttactgggcggcagaagacgaagatcagcaacataaggtgacctttgatcctacaagtagctacacactcgaggaccttaaacccgacacactctaccgctttcagctagctgcaagaagcgatatgggggtgggcgtgttcacaccaaccatagaggcccgcactgcccaaagcactccttccgctccccctcaaaaggtgatgtgcgttagcatgggcagcacaacagttagggttagctgggtgcctcctccagccgatagtagaaatggagtgatcacccaatacagcgtggcctacgaggcggtagacggtgaggacaggggacgacacgtagttgatggcatctcaagagaacactcttcatgggacctggtaggcctcgagaaatggacggagtaccgggtttgggtaagggctcacaccgacgtggggcctggacccgagtcatcacctgtcctggtgagaacagatgaagacgtgccgtcaggtccaccgcgcaaggtagaagttgagccacttaattccacggcagttcacgtttactggaaactgccagtgccctccaagcaacatggtcagattcgcggttatcaggtgacgtacgttcggttggaaaacggagaaccacgcggtctgcccataattcaagatgtgatgctggctgaggctcagtggaggcctgaagagagcgaagactacgaaactacgatttcaggcctcacccctgagaccacgtacagtgttacagtcgccgcctacacaaccaagggggacggagccaggtcaaagcctaagatcgttactaccactggcgctgtccctggacgcccaacaatgatgatcagcacaacagccatgaacacagcccttttacagtggcatcctccaaaagaactccctggagagctcctcggttaccggcttcagtactgccgcgccgacgaagcgagaccgaacaccatagattttgggaaggacgaccagcattttacggtgaccggtctgcataaagggacaacctacatctttcggctggccgcaaagaatagggcagggctgggggaggaatttgaaaaggaaattcgcaccccggaggaccttccttctggatttccgcaaaacctccacgtgactggcctgacgacaagcaccacggagcttgcatgggacccacccgtcctcgccgaacgcaatgggcggatcatcagctacaccgttgttttccgggatattaattctcagcaggagctgcagaatattacaactgacacgcggtttacactaacaggtctaaaaccagacacgacctacgatattaaggtgagagcgtggactagtaaaggctccgggccactgtccccatccattcagtcacgaactatgcccgtcgaacaggtgtttgccaaaaactttcgagtggccgctgccatgaaaacatctgtgctgctatcttgggaggtacctgacagctataaaagcgcggtacccttcaaaatcctgtacaatggacaatcagttgaagtcgatggtcatagtatgaggaagcttattgccgatctccagccaaatacagaatacagcttcgtcctgatgaatcgcggcagtagtgcaggaggcctccagcatctggtgagcattaggacagcacctgacctgctaccacacaaaccccttcctgcatccgcgtacatcgaggacgggcgctttgatctttccatgccgcacgttcaggaccctagtctggtaagatggttctatatcgtagtggtccctattgatagagtaggcggttcaatgctcacacctcgctggtctacgccggaagagctggagttggatgaattgcttgaggcaatagaacaggggggggaagaacaaaggcggcgccgccggcaggctgaacgcctcaaaccatatgtggcggctcagttggacgtgctgcccgaaacttttacgctaggcgacaagaagaattatcggggcttttataatcgccctcttagtcccgatctgtcctaccagtgttttgtgctggcctccttaaaagagcccatggatcagaaacgatatgctagctccccatacagcgatgagattgtggtgcaggtgacccccgctcaacagcaggaagaaccggaaatgctttgggtgacggggcctgtcttggccgtgattctgattattctcatcgtcatagcgatcctcctctttaagagaaagaggacacactcccctagttctaaagatgaacagagtatcgggctgaaagatagcttgctggcccacagttccgacccggtcgaaatgcgacgccttaactatcagactcccgggatgagagatcatcctcctatccccattactgacctggccgacaacattgaaaggcttaaagctaatgacggattgaagtttagccaggagtacgagtctatcgaccctgggcagcagttcacctgggaaaatagtaatctggaagttaacaagcccaaaaacagatatgctaatgttatcgcttacgatcactcaagagttattctgacttcaatcgacggtgtgccagggagtgattatatcaatgcaaattatatcgacggatacagaaaacaaaacgcgtatattgctacccagggtcctctgcctgagacgatgggtgatttttggagaatggtctgggagcagaggactgcgactgtcgtgatgatgactcgtctcgaagagaagtcaagggtaaagtgtgatcaatactggcctgctcgcggcaccgagacctgcgggctgatccaggtgaccttgctcgacactgttgaactggcaacatacaccgtcaggacattcgccttacataaatccggctcctccgaaaaaagggaattgcggcaatttcaatttatggcatggcccgatcacggagttcccgaatacccaactcccattctggcgtttctgcgcagggtcaaagcttgtaatcccctcgatgccggacccatggtcgttcactgctccgctggcgtgggtcgcaccggatgctttatcgttatcgatgctatgctggagaggatgaaacacgaaaaaaccgttgacatctatggccacgtcacctgtatgagatcccagagaaattatatggtgcagacagaagaccagtacgttttcatccacgaggctctgctcgaagccgccacttgtggccatacagaggtgcccgcccggaacctttacgcacatatccagaaactaggacaggttccccctggtgagtccgtaaccgcaatggaactggaatttaagctactcgccagctcaaaagctcacaccagcagattcatcagtgccaatctgccatgcaacaagtttaaaaaccgtttagtgaacatcatgccctacgaactcactcgcgtgtgcctgcagcccatccgcggggtggaagggtctgattatatcaacgccagctttctggacggctatcgccagcagaaagcatacatcgccactcagggccccctggcagagagtactgaagacttttggagaatgctgtgggagcacaactcaaccataattgtcatgttgacaaaacttcgtgagatgggaagggagaaatgccatcagtactggccagcggaacgaagcgctagataccagtattttgttgtggaccctatggccgagtacaatatgccccagtatattctcagagagtttaaggttacagatgcgagagatggacagagcaggacaattcgccagttccaattcacagattggcctgagcagggcgtgcctaagaccggtgaggggttcattgactttattgggcaagttcacaagacaaaggaacagttcggacaagacggacccatcaccgtccactgcagcgccggggtcggtcgcaccggagtgtttatcacgctgagtatagtcctggagcgcatgagatacgagggtgtggtggacatgtttcagactgtcaagacattgcgtactcagaggccggccatggttcagactgaggaccagtaccagctgtgttacagggctgcgcttgaatacctggggagctttgatcactacgccacctag

SEQ ID NO: 130936 - DNA, 3801 bp, synthetic construct
  misc_feature 1..3801: note = Description of Artificial Sequence: Synthetic coding sequence
  source 1..3801: mol_type = other DNA
atgtatgagttagtgtactgggcagcagaagacgaggatcaacagcacaaggtgacattcgacccgaccagctcctacacactggaggacctgaagccagatacactgtaccggtttcagctcgcagcaaggagtgacatgggagtaggcgtgttcactccaacaatagaagctagaactgcccaatctatgccaagtgggcctcctagaaaagtggaagtcgaacctctgaactcaacagctgtacacgtgtattggaaattacccgtaccgtctaagcagcatggccaaatcaggggctaccaggtcacttatgtgcggttagagaatggagagcccagagggttaccaataatccaagacgtcatgctggctgaagcacaagaaacaacaatatcgggacttacacccgagaccacatattctgtgacagttgccgcctataccaccaaaggagacggagctagatcaaaaccaaaaatagtcactacaacaggagccgtccccggccgacctactatgatgatctctaccaccgccatgaatacagccctgctgcagtggcatccccccaaggaacttccaggggaactgttgggataccgtttacagtattgcagggctgatgaggcccgccccaatacaatcgactttggcaaggatgaccagcattttacagtgaccgggctccacaagggaaccacatatatctttagattagcggccaagaatcgggcaggtctaggggaggagtttgaaaaggaaatcaggacgcctgaggatctgccctcaggctttccccagaatctgcacgtgaccgggctaactactagcacaaccgaactggcgtgggacccccccgtgttggcagagcgcaatggaaggataatctcatacacagtggtgttcagagacatcaattctcagcaggagcttcagaatatcacgaccgatacacgtttcacactcacaggactgaagccagataccacatatgatattaaagtccgtgcgtggacatcgaaaggctctggccctctcagcccgtcaatccagtctagaaccatgcctgtggagcaagtttttgccaagaatttcagagtggctgccgccatgaaaacttccgtgctcctgtcttgggaagtccccgattcttacaagtcagccgttccattcaagatcctgtataatggacagagtgttgaagtggacggccacagtatgcgaaagcttatcgccgatcttcagccgaacacagaatattcattcgtccttatgaaccgcggcagcagcgccgggggtctacagcacctggtttctatcaggacagcccctgacctgctgcctcacaaacccctcccagctagcgcctacattgaggatggaaggttcgacctctccatgccccatgttcaggacccatcactcgtccggtggttctatattgtggtggttcccattgatcgcgttggtggctctatgctcacccctaggtggagcactccggaggagctcgaactggatgagctgcttgaagcaattgagcaaggcggcgaggaacagagacgtaggcgccgccaggcagagcggttgaagccttacgttgcagcccagctcgatgtgttacccgagaccttcaccttgggagacaaaaagaactaccgcggattttacaaccgcccactgtcacccgacctgtcttaccagtgtttcgtgctggcctcactgaaggagcccatggaccagaagcgctacgcaagtagcccatattctgacgaaattgtggttcaggtgacccccgctcagcaacaggaagagccggaaatgctctgggtgactggaccagttctggctgtgattcttatcattctcatcgtgatcgccatcttgctgtttaagagaaagcgtacccactccccctcttccaaagatgagcagagtattggcctgaaagactctctcttggcgcactcgagtgatcctgttgaaatgcggcgcttgaattatcagactccagggagctctgtgccctcttgtccaaatacttccagtatgcgcgaccatccgcccatcccaattacggatctggctgacaatatcgaaaggctgaaggccaatgatgggctcaagtttagccaagagtacgagtctatagaccccggacagcaattcacttgggagaacagtaacctggaggtcaataaacctaagaaccggtacgcaaacgttatcgcttacgaccactcacgagtaatcctgacttcaatcgacggcgtcccagggtccgactacattaacgcgaattacattgacggctatcggaagcagaacgcgtatatagctacacagggccctcttccagagacaatgggagatttctggcgtatggtatgggagcagagaactgcaacagtcgtgatgatgacacggctggaagaaaagagccgcgtgaagtgtgaccaatattggcccgcccgaggtactgaaacctgcggtctcattcaagtgaccttgctggacacagtggagctcgcaacgtataccgtccgcacttttgccctccacaaatctggctctagtgagaagagagagttgcggcaatttcaatttatggcttggccagaccacggagtgcctgagtaccccacacctattctcgcttttcttcgcagagtcaaggcctgcaatccgcttgatgccgggccaatggtggttcactgctccgcaggagttggtcgtaccggttgctttatcgtgatcgacgccatgctggagaggatgaaacacgaaaaaaccgtagacatctacgggcacgtcacatgcatgcggagccagaggaattacatggtgcagaccgaggaccaatatgtttttatccacgaggccctgctggaggctgcgacctgtggacacaccgaggtgcccgcccgcaacctgtatgcccacatccaaaaactcggacaagtgcctccaggcgaatcggtgacagccatggaacttgagtttaagctgttggctagctcgaaagcacatacctcaagattcatctcagcaaatctcccatgtaacaagttcaaaaataggcttgtgaacataatgccatatgaattgacaagagtctgcctccaacccatacggggcgtggagggcagtgactacatcaacgccagcttcctagatgggtaccgtcagcaaaaagcgtatattgctacgcaaggccctctcgcagaatccaccgaggacttttggagaatgctgtgggagcataacagtacaataatcgtgatgcttactaaactgcgggagatgggacgcgagaagtgtcaccagtattggcccgccgagaggagtgccaggtatcagtacttcgtggtggaccctatggccgaatataatatgccgcagtatatcttgcgggagttcaaagtcaccgacgccagggatggccagtcaagaacaatcagacagttccagtttaccgattggcctgagcagggggtgccaaaaaccggcgaaggtttcattgacttcatcgggcaggtgcacaaaacgaaggagcaattcgggcaagacggaccaatcactgtgcactgtagcgctggagtggggcggactggggtctttatcaccctatctatcgtgctcgagcgcatgcgctacgagggggtagtcgatatgtttcagacagtcaagaccctgcgcactcaacgccccgccatggtgcagaccgaagatcagtaccagctctgctatagagctgccctggaatatcttggatctttcgatcactatgcgacatag

SEQ ID NO: 130937 - DNA, 5697 bp, synthetic construct
  misc_feature 1..5697: note = Description of Artificial Sequence: Synthetic coding sequence
  source 1..5697: mol_type = other DNA
atggccccggagcctgccccaggaagaacaatggtgccgcttgttcccgccctggtgatgctcggactggtagctggcgcacatggagactcaaaaccggtgttcatcaaagtgccagaagatcagaccggcctaagcggaggcgtggcctcgttcgtatgccaggcaacgggcgagcctaagcctaggatcacgtggatgaaaaagggaaagaaggtctcctctcagaggttcgaggttatagagtttgatgatggcgctgggtccgtgttgcgtatccagccactaagagtccagcgagatgaagcgatttacgagtgcactgccacaaactcgcttggcgagattaatacatccgccaagctgagtgtgttggaagaagagcagctgcctcccggattcccctctattgacatgggcccccaactgaaggtggtcgaaaaggcgcgaacagccacaatgctctgtgctgccggcggaaatcctgatccagagatttcgtggttcaaggacttcctgcctgtggatcccgctaccagcaatggacgaataaagcagttgaggtccggagcactgcagattgagagcagtgaggagtctgaccagggcaagtatgagtgcgtcgccacgaactcagctggtacccggtactccgctcccgcaaatctgtacgttcgcgtgcgcagagtggcaccccggttctcaatacctccttcctcccaggaagtgatgccaggtgggtccgtgaaccttacatgcgttgctgtgggagccccaatgccctacgtcaaatggatgatgggtgccgaggagctgaccaaggaagatgaaatgccagtcggccggaacgtgctggaattatccaatgttgtgaggtccgccaattatacttgtgtagccatttcctcattagggatgattgaagccaccgctcaagttaccgtaaaagccctgccaaaaccacccatagacctggttgtcacagagactacagcaactagtgttactctcacatgggatagcggaaacagcgagccagtgacctattacggcatccaataccgagctgcgggcaccgagggtccctttcaggaagtagacggtgtggctacaacccgttatagtatcggtggtctgtctccgttttctgaatatgccttcagagtgctggccgttaactccatcggtcggggaccccccagtgaggcagtgcgcgctcgcaccggcgaacaggcaccgtcttctcctccacgaagagtgcaagcacggatgctgagcgcatccactatgctggtacagtgggagcctccagaggaacccaacggtcttgttcgggggtacagagtctactatacacctgatagccgacgccctcccaacgcctggcacaagcataatacagacgccggtctgctgactactgtcgggtctctgctcccaggcataacttatagcttgcgtgtcctggcattcactgctgtcggcgatggtcctccctcacccactattcaggttaaaacgcaacagggagtccccgcacagcctgccgatttccaggcagaagtggaatctgatactagaatccagctctcttggctgcttccacctcaggagaggattatcatgtatgagctggtttactgggccgcagaggatgaggaccagcagcataaggtaactttcgatccaacgagctcatatactctcgaagacctgaaaccggacactctctacagatttcagctggccgcccgctctgacatgggcgtgggggttttcactcccactatcgaggccaggaccgcgcagtcgacacctagtgctccacctcaaaaagtgatgtgcgtcagtatgggctcaactactgtgagggtgtcctgggtaccaccaccagccgattccaggaacggggtaattacacagtacagtgtcgcatatgaagctgtcgatggagaggatcgggggagacacgtggtggacgggatcagcagagaacacagcagctgggatcttgtaggcctggaaaagtggaccgagtatcgcgtgtgggtgagggcccacactgatgtgggtccaggtccagagagcagcccagtgctggtgcggacagacgaagacgtgcctagcggccccccccgcaaggtggaagtagagccactgaattctaccgccgttcatgtgtattggaaactccccgttccatcgaaacaacacggacagataaggggatatcaggtgacgtatgtgaggcttgagaacggagagcccaggggcctccctatcatccaggatgttatgctagctgaggcacaagaaacgacaatttccggtcttacacccgagacaacctattcagtgaccgtggccgcctatactacgaagggggacggcgcaagatcaaaaccaaaaatcgttacaactaccggagccgtcccaggccggcccactatgatgatctccactacagcgatgaacaccgccttattacagtggcatccgccaaaggagttgcctggggagttattgggatacagactgcaatactgccgagcagacgaagcacgaccgaatacaatcgattttggcaaggatgatcagcattttaccgtcactgggttgcacaagggcaccacatacattttccggctggcagctaaaaatcgggcaggcctgggagaggagttcgagaaggaaatccggactcctgaagacctaccatccggttttccacagaatctgcatgtaacggggcttacaacgtcaacaaccgagttggcctgggatcctcccgtgctagctgagagaaacgggcgaattatcagctacactgtcgtcttccgagacataaattcccagcaggaactccagaatataaccacagacacacgattcacactcactgggctgaagccagacaccacgtacgacataaaagtgagggcatggacttcaaagggcagtggacccctatctccaagcatccaaagccggacaatgcctgtggaacaggtctttgcgaagaactttcgcgtggccgctgccatgaaaacttctgtactgctgtcttgggaagttcccgattcatacaaatcagccgtgcccttcaaaattttgtacaatggtcagagcgttgaagtggacggacacagtatgagaaagctaattgcagacctccagcctaacactgaatacagttttgtcctgatgaaccgcgggtcctcagccggtggcctccagcacctggtaagcatcaggaccgcacccgatttgttgccacacaagccccttccagcgtctgcttacatcgaggacgggaggtttgacctctcaatgccccatgttcaggatccgagcctcgtacgatggttttacattgtggtggtgcccattgaccgagtgggtgggtcaatgttgaccccgcgctggtctacacccgaagagttggagctggatgagctactggaagccatcgagcagggtggtgaagagcagaggaggaggcgcagacaggcggagcgactaaaaccgtatgtcgccgcccaactggacgtgctccctgagacgttcacactcggagataaaaaaaattatagagggttttacaatcgtcccctcagccccgatttgagttatcaatgctttgtgctggcaagcctgaaggagcccatggatcagaaacggtacgcctcttctccgtatagcgatgagatagtcgtccaagtgacaccagcacagcaacaggaagaaccggagatgctatgggtgaccggacccgtgctggccgtgatacttatcatcctgatcgtgatagctattctgcttttcaagcgaaagcggacccattcaccctccagcaaagacgaacagagcataggcttaaaggacagccttttagcacatagctcagaccctgtcgagatgagaaggcttaattaccagacacctgggatgagggaccacccccccatcccaataactgatctcgccgacaacatcgaacgcctcaaagccaacgatggcctgaagttttcacaggaatacgaatcaatagatcccgggcaacagttcacgtgggaaaatagtaacctggaggtcaacaaaccgaagaatagatatgcaaacgttatcgcttatgaccatagtcgcgtgatcttgactagtattgatggagtgccaggatcggattacataaatgctaactatatcgatggttaccggaagcaaaacgcatatattgcaacacagggacccctgcccgagactatgggggatttttggcggatggtgtgggagcagcgcactgcaaccgtcgtaatgatgacacgcctcgaagagaaatcacgcgtgaagtgcgaccagtactggcccgctcgtggtaccgagacctgcggcctcattcaggtgacccttctcgacaccgtcgaactagcgacctatacggttaggaccttcgctctccacaagtcaggctcctctgagaaacgtgaacttagacagttccaattcatggcttggccagaccatggcgtaccggagtatcctaccccaatcctggctttcctcagacgcgtgaaagcctgcaatcccctcgatgctggcccaatggtggtgcactgtagcgccggcgttgggcgtaccggatgtttcatcgtaatagatgcaatgctggagcggatgaagcacgaaaaaacagtagacatttacggccacgtcacgtgcatgcgatctcagcgtaactacatggtgcagactgaagatcagtacgtattcatccatgaagccttactagaggcggccacttgcggccatactgaggtccctgcgcggaatttgtacgctcatattcagaagctggggcaagtgccacctggggaatccgttacagcaatggagctcgagttcaaactgctggcctctagtaaagcgcatactagtcgatttatctctgcaaacttaccatgcaacaagttcaagaatagactggtcaatatcatgccatatgagttgacacgcgtctgcctgcaacccatacgcggcgttgagggctctgactacatcaacgcttcgtttctggacgggtacagacagcaaaaggcctacatcgcaacccagggccccctggcggagagcactgaggatttttggagaatgctttgggagcataattctacgataatcgtcatgctgaccaagctcagagaaatgggcagggagaagtgtcaccagtattggcccgctgaacgcagcgcccggtaccagtacttcgtggttgatccaatggccgagtacaatatgccccagtatatacttcgtgagttcaaggtaaccgatgcgagggacggccagtccaggacaatccgtcagttccagttcactgattggccggagcagggtgtccctaaaacaggtgaagggtttattgatttcattgggcaagttcacaaaaccaaggagcagttcggtcaggacggccccataacagtacactgcagtgctggggtcggacggacgggcgtgtttatcacactctctatcgtgttagagcggatgaggtacgaaggagtggtagacatgtttcagacagtgaagacactaagaacacagcgacctgccatggtccaaaccgaggatcagtatcagctctgttatagagcggctctcgagtacctcggatctttcgaccattacgccacttag

SEQ ID NO: 130938 - DNA, 3609 bp, synthetic construct
  misc_feature 1..3609: note = Description of Artificial Sequence: Synthetic coding sequence
  source 1..3609: mol_type = other DNA
atgatgtgcgaagtgatgcctactatctccgaagcagagggtccacctggagggggaggcgggcatggatccggttctccctcacaacccgatgctgattcccactttgaacagctcatggtgtctatgctggaagaacgtgatcgacttctcgatacactccgggaaacacaggaaacgttggccctaacacagggcaagcttcatgaagtcgggcatgaaagggattcccttcagagacagctaaataccgcattaccgcaggaatttgctgcccttactaaggagctgaatgtttgccgggagcaactgctggaaagggaggaggaaattgcagaactgaaagcagaacgcaacaacacaaggctccttcttgagcatttggagtgcctcgtgagccgccatgagagatcactccgaatgacagtcgttaagcgccaggcccagtcccctgccggtgtaagttcagaggtggaagtgcttaaggcattgaaatccctgttcgagcaccacaaggctctggatgagaaagtgagggagcggctgcgcgtggctctagaaaggtgctctctgctggaggaagaattgggggccacacataaggagctgatgattttgaaagagcagaataatcagaaaaagacactcaccgacggtgtcctagacatcaatcacgagcaggaaaacactccatcaacgagtgggaagagatcgtctgacggatctctcagccacgaagaggacttggccaaggtcatcgaactgcaggagattatatctaaacagtcgagggagcagtcccaaatgaaagagcgccttgcttctttgtcaagtcacgtgacagagttagaggaagatctggatactgccagaaaagatctaatcaaatctgaagagatgaatactaagctccagagagacgtacgcgaagctatggcccaaaaggaagatatggaggagcgcatcacaacgctggagaaaaggtacctggccgctcagcgcgaagctacctctgtgcatgacttaaacgataaactagaaaacgaaattgcaaataaggactcaatgcacaggcaaaccgaggataaaaacaggcaacttcaagagcgcctggagctggccgaacaaaaattacagcagacccttcgcaaggccgagacactccctgaggtcgaagccgagttagctcaacgcgttgccgcgttgtccaaggccgaggaaaggcacggtaatatcgaggagcgtttacgccagatggaggcacagctcgaggaaaagaaccaagaactccagagagcgagacagagggagaagatgaacgaggagcacaacaagagactgtcagacaccgttgacaaactcctaagcgaatccaacgagcgactgcagctgcaccttaaggaaaggatggctgctctcgaagataagaactccctgttgcgcgaagtggagtcagctaagaaacagttggaggaaacccagcacgataaggaccaactggttctaaacatcgaagcccttcgggcagagttggatcatatgcgcttgagaggcgcgagcctccaccacgggaggcctcatctcggttcggtgccggactttcggtttcccatggcagatggtcacacagactcctatagcacgtctgcagtcctgagacgacctcagaaaggtagactcgccgccctgagggacgaacctagcaaggttcagacccttaacgagcaggattgggagagagcacagcaggcctcagtgctggccaacgtggctcaggcttttgagtctgacgccgacgttagtgatggagaagatgatagagataccctgttgagtagtgtggaccttctttcaccctcgggccaggccgacgctcacacattggctatgatgctgcaggaacaacttgatgccataaataaggagattcgcctgatccaagaggagaaagagaacactgagcagcgggcagaggagatcgaatctagggtaggcagcggttcgctagacaacctgggcaggttcaggagcatgagttccataccaccatacccggccagctccctcgcgtcctcctctcccccgggcagcggacgctctactcccaggcgcatcccacactcacctgcgcgcgaggttgaccggttaggtgtcatgacactacttcctccatctagggaggaggtccgcgatgacaaaacaacaattaaatgtgagactagccccccgagtagcccacgtgcactgcggctggacagactgcacaagggagcactgcatacagtgtctcatgaagacattcgagacatccggaattcaaccggctcgcaagacggccccgtcagtaatccatcctcctcaaatagctcacaggactcgctccacaaagcccctaagaaaaaaggcatcaagtcctccatcggtagactgttcggcaagaaagaaaagggacgaccaggccagaccgggaaggaggccttaggccaagcgggcgtgagcgagacagacaactcaagccaggacgcactgggcctctctaagctgggcggccaggccgaaaaaaatcggaagctacagaagaagcacgagctgctggaggaggcccgcaggcagggccttccgtttgctcagtgggatgggccaacggtcgtggtgtggctcgagctctgggtgggcatgcctgcctggtacgtcgccgcctgcagggcgaatgtcaagagcggagcaattatgtctgccctgtccgatacagaaattcagcgagagattgggatttcaaacccactgcacaggctcaagcttcgcttagccattcaagagattatgagcctcacttcgccttccgcgccccctacaagtcggacaaccctggcctatggggacatgaatcacgagtggatcggaaacgagtggctccctagccttggtttacctcagtacaggagctatttcatggagtgtctggtcgatgccaggatgttggaccacctgacgaagaaagacctgcgaggccagcttaagatggtggactctttccatcgaaacagcttccagtgcgggatcatgtgcctcagaaggctcaattacgataggaaagagctggagcgtaaacgggaggagtcgcagtccgagattaaagatgttctggtgtggtcaaacgaccgggtgattaggtggatcctcagtattgggctcaaagagtacgctaataatttaatcgaaagcggtgtgcacggcgcgctgctagcactcgacgagacattcgactttagcgccttggcgctgttattacagattcctacacaaaacacgcaggcaagggcagtgctcgagagagagttcaataatcttttggtcatgggcactgaccgaagattcgacgaggacgacgataagagcttccgtcgtgccccttcttggagaaagaagtttcgacccaaggacattagagggctggccgctggctctgcggaaacgttgcccgccaacttcagagtgacctccagcatgagctcccctagtatgcaacctaagaaaatgcagatggacggcaatgtcagtggcacccagcgtctggattcagcaacagtgagaacatactcttgctag

SEQ ID NO: 130939 - DNA, 3558 bp, synthetic construct
  misc_feature 1..3558: note = Description of Artificial Sequence: Synthetic coding sequence
  source 1..3558: mol_type = other DNA
atgatgtgtgaagtaatgcccacaatctccgaggcggagggacctccagggggcggcgggggacacgggtctggatcgccctcccaaccagatgccgatagccacttcgaacagctgatggttagcatgctcgaggagcgcgacagactgctggacaccctcagggagacgcaggagacactggctttgactcagggcaagcttcacgaggtgggccatgagagagattctttacagagacagctaaacactgcacttccacaggagttcgccgccttaacgaaagagttgaacgtctgccgcgaacagctgcttgaacgggaggaggagatcgccgagctgaaagcagaacgcaacaacacgagattactgttggaacacctggagtgtctcgtgtccaggcacgaacgttcactccgaatgaccgtggttaagcggcaggcccagagccctgctggggtgtcctccgaagtggaggtcctcaaggcactgaagagcttattcgagcaccacaaggcactggacgagaaagtcagagagaggctccgcgttgctttagaaaggtgttctctgctcgaggaggaattgggcgccacccataaagagctgatgatccttaaggagcagaataatcagaaaaaaactctcaccgacggagtgctcgacatcaaccatgagcaagagaatactccttctacttccggaaaacgatcatcagacgggtccctgagccacgaagaggacctggcaaaggtgatcgagctgcaggaaatcattagtaagcaatctcgagagcagagtcaaatgaaagagcggctcgcctctctgagttctcatgtgactgaactcgaagaggatcttgacactgccaggaaggacctgattaagagtgaggagatgaacactaaactacaacgtgacgttcgtgaagcgatggcccagaaggaggacatggaagaaagaattacgacattagagaaaagatatcttgccgcccagcgggaggccactagcgtgcatgacttaaacgacaagctggaaaatgagattgcaaataaggactccatgcaccggcaaacagaggataagaacagacagctccaagagcggctggagctcgctgagcagaaattgcaacagaccctgcggaaggcagagacgctgccggaggtggaagccgagctggcccagcgtgtggccgccttgtccaaggcggaggaaagacatggaaacattgaagagaggcttaggcagatggaggcccagctggaggaaaagaatcaagagttgcaacgggcgagacagagggaaaagatgaatgaggaacacaacaagcgactctctgatacagtagacaaactactgtccgagtctaacgagcgcctgcagctgcacctcaaggaaaggatggccgcacttgaggacaagaattcattgctacgcgaagtggagtccgctaaaaagcaactggaggagacgcagcatgataaggaccagttggtattgaatatcgaagctctcagggccgaacttgaccatatgcgcctacgaggcgcatcgcttcatcacggtagacctcacctcgggtcagttcctgactttcgattccctatggcagacggccataccgactcttattccacgtcagctgtgctgaggagaccccagaagggccggcttgccgctctgcgagacgaacctagcaaggtgcaaacgcttaacgagcaggattgggagcgggcccaacaggcatccgtcctggccaatgtggctcaggcttttgagtctgacgcagacgtaagcgatggcgaagatgatagggacaccctgctatcctcggttgatttactgagccctagtggccaagctgacgctcacacactggccatgatgcttcaagagcagctggacgccatcaacaaagaaatcagactgattcaggaggagaaagaaaacacagaacaacgagccgaggagattgaaagcagagtcgggagtggcagcctagataacctcggacgcttccgatctatgtcgagtatccccccctacccagcctcttccctggcatcgtcttctcccccaggctccggaagaagcacgccccgaagaattccacactctccagcccgcgaggtcgatcgattgggcgtcatgaccctgctccccccgtctagggaggaggtgagggacgataaaaccaccatcaaatgtgagacctcacctccttcctcaccccgcgctctgcgccttgatagactgcacaagggggcccttcacaccgtctcccacgaagatataagagacattcgtaattcgaccggcagtcaagatggtcctgtgtcaaacccttctagctctaattctagccaggacagcctgcacaaggcacctaagaaaaaagggatcaagagctcaatcggcaggctttttggtaagaaggaaaaaggccggcctgggcagactgggaaggaggccctcggccaggccggtgtatctgaaacagacaactcatcgcaagatgcacttggcctgtctaaactgggggggcaggccgagaagaatcggaagctccagaagaagcatgaattgctggaggaggcccgaaggcagggactgcctttcgcgcagtgggacgggcctacagtggtagtgtggttagagctctgggtcggaatgcccgcgtggtacgtagcggcatgtcgggcgaacgtgaaaagtggcgccattatgtctgcactaagcgacacagaaatccagagagagatcggaatctccaatccgttgcataggcttaagctgagactggctatacaggagatcatgtcactgactagcccatccgctccgccaacctcgagaaccaccttggcttatggggatatgaaccatgagtggataggaaacgaatggttgccgtccttgggactgccccaatatcgaagttatttcatggagtgcctggtggatgctcgcatgcttgaccacttaactaaaaaagatcttcgcggacagctgaagatggtggactcgtttcaccgcaatagcttccagtgtgggatcatgtgcttgagaaggctgaactatgatagaaaagagctcgagcgcaagagggaagagagccagagcgagataaaggacgtcctcgtgtggtctaacgatagggtgatcaggtggattctgtcaatcgggcttaaggaatacgccaataatctgatagaatcgggtgttcacggggccctcctggccctggacgagacctttgatttcagtgccttggcactactgctgcagattcccacacaaaatacccaggcccgagccgtcctggaacgcgagtttaataacctgctggttatgggcacagaccggaggtttgacgaggatgacgacaagagttttaggcgggctcccagctggcggaagaaatttcggcccaaggatattcggggcctggcagccggttccgccgaaacactgcccgcgaactttcgagtcacttcaagcatgtcctctccaagcatgcagccaaagaagatgcagatggatggcatgtag

SEQ ID NO: 130940 - DNA, 477 bp, synthetic construct
  misc_feature 1..477: note = Description of Artificial Sequence: Synthetic coding sequence
  source 1..477: mol_type = other DNA
atgatgtgcgaggtgatgcctacaattagcgaagctgaaggcccaccaggtggtgggggaggacacggatctggctctccctcccaaccggacgctgattcccacttcgaacagcttatggtgagtatgctagaggagcgcgaccggttgctggacaccctacgggagacacaagagactctggcactgactcaggggaaactgcacgaagttggccatgaaagagactcccttcagaggcagctcaacaccgcccttccacaggagtttgccgcgctgactaaggaactaaacgtatgtcgggagcagttgttagaacgagaggaggaaatcgccgaactgaaagccgagaggaataatacacgactgcttctggaacacctcgagtgtctagtaagtcgacatgagagaagtctccggatgaccgtggtaaagcgccaggctcaatctccagctggtgtatctagtgaagtctag

SEQ ID NO: 130941 - DNA, 300 bp, synthetic construct
  misc_feature 1..300: note = Description of Artificial Sequence: Synthetic coding sequence
  source 1..300: mol_type = other DNA
atgatgtgcgaagtgatgccaactatctctgaggctgaaggccccccgggaggcggaggcgggcacgggtccgggtccccctctcagcccgacgcagattcccatttcgaacagcttatggtatctatgctggaagagcgcgacagattattggacacgctccgggaaactcaggagacccttgcgctcacccaaggcaagctgcacgaggtgggccacgagcgtgacagccttcagaggcaacttaacaccgctctgccccaggagtttgctgccttgacgaaagaacttaatgtgtag

SEQ ID NO: 130942 - DNA, 2100 bp, synthetic construct
  misc_feature 1..2100: note = Description of Artificial Sequence: Synthetic coding sequence
  source 1..2100: mol_type = other DNA
atgcgcttgcgcggtgcttccttgcaccacgggcggcctcatttgggaagcgtacccgattttaggtttccaatggcagatggtcatactgactcatatagcactagcgcagtgttgcgcaggccccagaagggccgcctagctgctttgcgtgacgagccatcaaaggtgcaaaccttgaacgagcaggattgggagcgcgcccagcaggcctcggttctcgccaatgttgcccaggctttcgagagcgacgcagatgtgtcagacggggaagacgacagggacacactcctctcttccgtggacctgttgtctccttcaggccaggccgatgctcacacattggcgatgatgcttcaagaacagctggatgctattaacaaagaaatcagactgatccaggaagagaaagagaatacagagcagagagcagaagaaattgagtcacgcgtcggcagcggaagtttggataatctggggaggttccgcagcatgtcatccattccaccctaccccgcaagttctcttgcctccagttcccctccagggtctggcagatccactccgaggagaatcccgcactcacccgccagggaagtggaccgcctgggcgttatgacattgccttctgatctgagaaagcaccgccggaagttgccgccctcacgcgaggaggtccgagatgacaagactactatcaagtgtgaaaccagtccaccttcctcgccccgggctctgcggctcgaccggctacacaagggggctttacacacagtgtctcacgaagacatcagggacatcagaaactccacaggctcccaggatggccccgtatccaatccttctagctccaacagcagccaagactccctacataaagcccccaaaaagaaaggaataaaaagctctatcggccgcctgtttgggaaaaaggagaaggggcgccccggacagactggcaaggaggctctgggccaggccggcgtgagcgaaaccgacaacagttcccaggatgccctgggtctatctaagctgggcggacaggccgaaaaaaatcgcaagctgcagaagaagcacgaactactggaggaagcccgccgccagggcctccccttcgctcaatgggacggccctacagtcgtggtctggctggagctctgggtgggaatgcctgcatggtatgtggccgcttgccgtgctaacgttaagtcaggggcgattatgtctgctctgagcgatacagaaatccagagggaaataggtatcagcaacccattgcatcgattaaagctgcgcctcgctatacaggaaatcatgagtctgacatcccccagcgccccccctacatccagaaccactctcgcctatggcgacatgaatcacgaatggatcggcaacgaatggttaccaagccttggcctcccacagtatcgttcttactttatggagtgcctggtggacgcccgtatgctagatcaccttaccaaaaaagatctgagggggcagctcaagatggtggatagtttccacaggaattctttccagtgtggcattatgtgccttcgcagactgaactacgacagaaaggagctggagcgaaagcgcgaggagagtcagagtgagattaaagatgtccttgtgtggtcaaacgatcgcgtgatcagatggatcttatctatcggactgaaggaatacgccaacaatcttatcgagtcaggagtgcacggggccctgctagctctggatgaaacattcgactttagtgcgctggcactcctcctccagattcctactcagaacacacaggctagagccgtgctcgaacgtgaattcaacaatctcctcgttatgggcacagaccgaaggtttgatgaagacgacgacaagagttttaggcgcgccccaagttggcggaagaagttcaggccaaaggacatccgtgggcttgctgcggggtccgctgagactctcccagccaatttccgcgtcacgtcttccatgtcctctccttctatgcagcccaaaaagatgcagatggatgggaacgtatcaggcacacagcgactagactctgccacagtgcggacctacagttgctag

SEQ ID NO: 130943 - DNA, 3585 bp, synthetic construct
  misc_feature 1..3585: note = Description of Artificial Sequence: Synthetic coding sequence
  source 1..3585: mol_type = other DNA
atgatgtgtgaggtaatgcctacaattagtgaggacggacgccgtgggtccgccctcggccccgatgaggctggcggcgagctggagagactgatggtcaccatgttgactgaacgggagcggttgctcgaaacattgagagaggcacaggacggcctggctactgcccaactgcgactcagagagctaggccatgagaaggattctctacaaaggcagttgagcatcgcactcccgcaagagttcgccgcattgacaaaagaactgaacctatgcagggaacagctattggagcgagaagaggaaatcgcagaacttaaagccgaaagaaacaacactagactgttgctggagcaccttgagtgtctagtgtctagacacgagcgttcccttcgaatgaccgtggtgaagaggcaggcccaaagtccaggcggcgtcagcagcgaagtggaggtcttaaaagctctcaaatcactgtttgagcatcataaggctttggatgaaaaagtgcgggagagactgagaatggcactggaacgggtggccgtcctggaggaggagctggagctctcaaaccaggagaccctgaatctgcgggagcagctgtcgaggaggaggagtggcttagaggagcctggtaaggatggggacggtcaaaccctcgctaacggtcttggccctggaggcgattctaacagaagaacggccgaactcgaggaagccctcgaaagacaaagagctgaggtgtgtcagctgagagagagactagccgtattatgtcggcagatgtcacagttagaggaagagctggggacggctcatagagagctgggaaaagccgaagaggcgaacagcaagttgcaacgcgacctaaaggaggccctggctcagcgggaggatatggaagaacgcatcacaacgctcgaaaaacgatacctgtcagcacagagggaggcaacatccctccatgatgctaatgataagttggagaatgagttagcatccaaggagagtctctatcgccaatccgaagagaagtcccgacagctcgcggaatggctagatgatgccaaacagaagctgcagcagacccttcagaaggccgagacacttccagagatagaggcccagctcgcccagcgtgttgccgccctaaacaaagcggaggagaggcatggcaacttcgaggaaagactcagacagttagaggctcagctggaagagaaaaaccaggagttgcagcgtgctcggcagcgagagaagatgaacgatgaccacaataaacgcctgagtgagaccgtggacaagctattgtccgagtcaaacgaaaggctgcagttacatctcaaagagcgcatgggtgcactggaggaaaagaactcgctgtctgaagagatcgccaacatgaagaaattgcaggacgagctcctgctcaataaggagcagctcttagctgagatggaacgcatgcaaatggaaattgaccagctgagaggccgtcccccgtcaagctactcgaggagcctgccaggctcagcccttgagctgagatattcccaggcccccaccttgcctagtggggcgcatcttgacccttacgtggcaggcagcggtagagcagggaaaagaggcagatggtccggagtgaaagaggagcccagcaaagattgggaacggagcgccccagccggtagcattcctcccccctttccgggcgaacttgacggcagtgacgaggaagaagcagaagggatgtttggagccgaactcctttctccctccggccaggctgacgtacagactctggctataatgctccaggagcagcttgaggccattaataaggagataaagctgatccaagaggagaaagagaccactgagcagcgggcggaggagctggaaagcagggtgtccagctcaggtctcgattctctagggagataccggtcctcatgctctttgccgcctagtctcactaccagtactctcgctagtccaagcccacccagtagtggccatagcaccccacgacttgctccaccttcacccgcgagagaaggtacggacaaagcaaaccacgtgccaaaggaggaggctggggccccgcgtggtgaagggcccgcaatccccggggacacaccaccacccactccacggtcagcacgtctggagcgcatgacacaggctctggcgctgcaagcaggcagcttggaggacggcgggccgccccgggggtcagaggggacacccgattccttgcacaaagcacctaagaagaaatcaattaagagttctattggacggctattcggcaaaaaggaaaaggggcgcatggggccacctggcagggatagcagctctctcgccggcaccccatctgatgaaacactagccaccgacccactcggtctcgccaaactgacaggtccaggcgataaggatcgacgcaacaagcgtaaacacgaactgctggaggaggcttgtagacaaggcctcccatttgctgcatgggacggccctacggttgtgtcatggctcgagttgtgggtgggcatgcccgcttggtatgtggctgcttgtagggctaacgtgaaaagcggtgcaataatggctaacctgagcgacactgaaatacagagagaaattggaatttcaaatcccctgcataggctgaaactgcgcctggcaatacaggagatggtgagtttgaccagtccctcagcccctgcctcctcgcgaacttccaccggcaacgtgtggatgacccatgaggagatggagtccctgaccgcgacaacaaagccagagacaaaagagattagctgggagcagattttagcctatggagacatgaaccatgaatgggtggggaatgactggcttccttccctgggattgcctcagtaccgctcctatttcatggagtcgctcgttgatgcgaggatgctagatcacctgaataagaaagaacttagaggacagctgaagatggtcgacagtttccacagagtttctctgcactacggtatcatgtgcttaaagagactgaattacgataggaaggatctggaaaggcggcgggaggaatcacaaactcagatacgagacgttatggtctggtccaacgaaagagtcatgggctgggtgtcagggctgggtttaaaagagtttgcaaccaatttaaccgagtcgggagttcacggggcattacttgcacttgacgaaacgttcgattattcagacctggccctccttctacagattcccacccaaaacgcccaggccagacagttactggaaaaagaattcagtaatttgatcagtttgggaaccgacaggcgcttggatgaggattcagctaagagcttcagtaggtccccgagttggagaaaaatgtttagggagaaggaccttcgcggcgtgactcccgactcagcagaaatgctacctcccaactttaggtcggcagctgccggggccctcgggtctcccgggcttccccttcgaaagctgcagcctgaaggccaaacctcagggagcagccgcgccgatggggtcagcgttcgcacctactcctgctag

SEQ ID NO: 130944 - DNA, 1731 bp, synthetic construct
  misc_feature 1..1731: note = Description of Artificial Sequence: Synthetic coding sequence
  source 1..1731: mol_type = other DNA
atgtctggacaggaatttgctgcactcactaaagagctaaatttgtgtcgggaacagctactggagcgcgaggaagaaatcgcagagctcaaggcggaacgaaataacacaaggctgctactggaacaccttgagtgtctggtaagtagacacgagagatccctgaggatgactgtggtgaaaaggcaggcccagtcacccggcggcgtatcttccgaggtcgaagtgctgaaggctcttaagtccttgtttgaacatcataaggccctggatgagaaggtgcgagaacgccttagaatggcacttgaacgggttgccgttctggaggaggagctggaactgtccaaccaggagacgctgaatctgcgagagcagctttcccgccggagatcaggcctcgaagagccagggaaggatggcgacggacagacactggctaacggtttaggcccaggaggcgactctaacagacgcacagccgaactggaggaagcgcttgagagacaacgggcagaggtgtgtcagcttcgggagagacttgccgtattatgtcggcagatgagtcagcttgaagaggaacttggcacagcacatcgagaactcggaaaggctgaggaggccaattccaaactgcagcgggacttgaaagaagcgcttgcacagcgagaggacatggaagagaggatcaccactctcgaaaaacggtacctatctgcgcagagagaggcaacatcgttacacgatgcaaatgacaagctggagaatgagctcgcttctaaagaatccctttacagacagagtgaggagaagagcagacagctcgccgaatggctggatgatgctaaacaaaaactccagcagacgctgcaaaaggccgaaaccctacctgagattgaagcacagttggctcaaagagtggccgcactcaacaaagcagaagagcgccatggcaatttcgaggagagacttcggcagctggaagcacagctggaggaaaagaaccaggagctccaacgagcgcgtcagcgggagaaaatgaacgacgaccacaacaaacgcttatctgagaccgtggataagctcctctccgaaagtaacgagagactgcaactccacctaaaggagcgaatgggggctctagaagaaaaaaattcccttagtgaggaaatcgcaaacatgaagaagctccaggacgaattgcttcttaacaaagagcagctgctggctgagatggaacgcatgcagatggaaatcgatcagctgcgtggccgtcccccttcttcctacagccgctcactcccaggcagcgctctggagctacggtatagtcaagcccccaccttaccctctggggctcaccttgacccgtacgtggccggtagtggaagagccggcaagcgcggccgttggagtggggttaaagaagagccgtctaaagactgggagcggtctgctccagccggaagcattccacctccattccccggagagctcgatggatccgacgaggaagaggcagagggaatgtttggagccgagctgctgtccccatccggccaagctgacgtgcagacattggctatcatgctccaagaacagctggaggctatcaataaagaaatcaagattatgtcactacggcggaaactagagctacacgaaggccgcggaaggccaagccaggagactccccatcatcccttaccagctcttcccgtcctcagagagtag

SEQ ID NO: 130945 - DNA, 4338 bp, synthetic construct
  misc_feature 1..4338: note = Description of Artificial Sequence: Synthetic coding sequence
  source 1..4338: mol_type = other DNA
atgcgccggcttcttgagccatgttggtggatcctgtttctaaagattacaagctcagtactccactacgtcgtgtgtttcccagccctgactgagggctatgtgggagccttgcacgagaatcggcatggctctgccgttcagataagacgtaggaaagctagtggagacccctattgggcttattcaggcgcctacggacctgaacactgggtgaccagtagcgtgtcgtgcggcgggagacaccagtcacctatcgatatccttgatcagtacgcacgagtgggagaggagtatcaggagctgcagcttgatggttttgataacgaaagctctaataaaacctggatgaagaataccggaaagaccgttgcgattctcctgaaggatgactattttgtttccggagctgggctacctggtcgtttcaaagctgaaaaggtggaattccactggggccatagcaacggctcggccggtagtgaacatagtataaacgggcgtcggttcccagtggagatgcagatattcttctataatccggatgactttgattcctttcagaccgccatctccgagaataggatcattggagcaatggctatcttcttccaggtatcaccccgagacaatagcgcactggaccctataattcacggactcaagggagtggtgcaccacgaaaaggagacattccttgacccgttcgtgctgcgagatctactccccgcatccttagggagttactacagatacacaggaagtcttaccacaccaccatgctctgagatagtggagtggatcgtgttcagaagacctgtgcccatcagttaccatcaactggaggcattttattctatctttacaacagaacagcaggatcatgtgaagtccgtggaatacctgaggaataattttcgaccacaacaaagactgcatgatagagtggtgagtaagtccgcagtgcgcgactcttggaaccacgacatgaccgacttcctcgaaaaccccctgggaaccgaagccagcaaggtgtgctcatcaccacctatacacatgaaagtgcaacccctgaaccagaccgctcttcaggtgtcttggagccaacccgagacgatataccatcccccaatcatgaactacatgatcagttactcctggactaagaacgaagacgaaaaggagaagacctttaccaaagacagcgacaaggacttgaaggcgactatttcacacgtgagcccggattcactgtatttattccgtgtgcaggcagtctgcagaaacgacatgcgatccgacttcagccagacaatgctgttccaggcaaacaccacccgtatctttcagggtactagaattgtcaaaactggcgtgcccaccgcaagccccgctagctccgctgacatggctccaatttcctccggcagttccacgtggacctctagtggaatcccattctcattcgtctccatggccacgggaatgggtcccagcagcagcgggtcacaagccacggtggcctcagtggtgacctctactttgctcgctggtctgggcttcggggggggtggtatcagctcatttccctccactgtgtggccaacgcgactcccaacagctgcctccgcctccaaacaggccgctagacctgtattggccactactgaagccctggccagccctgggcctgatggagattcctcccccactaaagacggcgaagggaccgaagaaggcgagaaagacgagaagagcgagtctgaggacggagaaagggagcacgaagaggatggagagaaggattcagaaaaaaaagagaaatctggcgtgacccacgctgctgaagagagaaaccaaacagagcccagtccaacccctagtagccccaaccgtacggctgagggaggccatcagacgatccccggccacgaacaggatcatactgccgtacccaccgaccaaactggcggcagaagggacgccggaccaggcctggatccagatatggttacgtccacccaggtgccaccgaccgccacggaagaacagtatgcgggttccgaccccaaacggccagaaatgccgtccaaaaagcccatgtcaagaggggataggttctccgaggactccagattcatcactgtcaacccggctgagaagaatacctccgggatgatctcacggcccgctcccggacgcatggaatggattatccctctcatagtggtgagcgcattaacatttgtgtgtctgattcttcttattgccgtgctagtgtactggaggggctgcaacaagatcaaatccaagggattcccccgacgctttcgggaggtgcccagcagcggggaacggggagagaagggcagcaggaaatgtttccagacggctcatttttacgttgaggatagctcttccccccgtgtggtgcctaatgaatctatccccataataccaatacccgatgatatggaagccatccccgtgaaacagtttgtgaagcacattggcgaactgtattctaataaccagcacggattcagcgaagacttcgaagaggtgcagaggtgcacggctgatatgaatatcacagccgaacatagcaatcatccggaaaataaacacaagaacagatacataaatattctagcctacgatcattcccgtgtgaagctgcgcccattgcctggcaaagattcgaaacactccgactacataaatgctaattacgtcgatggctataacaaggcaaaggcctacatcgccacgcagggcccattgaagtctacgtttgaggacttctggagaatgatttgggaacagaacaccggtattattgtcatgataacaaatctcgtggagaaagggcggagaaagtgcgatcagtactggccaacagaaaattctgaggaatatggaaacataatcgtcacattgaaatctacaaagatccacgcgtgctataccgtccgccggttctccatacggaatacaaaagtgaaaaaagggcagaaaggtaatcccaagggcagacagaatgagcgggtggtgatccagtaccactatactcaatggccagatatgggcgttcctgagtatgccctgccagtcttaacgttcgtgagacggtccagcgcagcccgcatgccagagaccggccccgtcctggtccactgtagcgctggcgtgggcagaactggaacgtatattgttatcgactccatgctgcagcagattaaagacaaatcgacggtcaacgtactggggtttctcaaacacattagaactcaacgcaactacctggtccagactgaggagcaatacattttcatacacgatgcactgttagaagccatccttggaaaggagactgaggtcagcagtaatcaactacactcttacgttaatagcattcttatccctggggttggcggcaaaacacgcctggagaagcagttcaagttggtgacccagtgcaatgccaaatatgtggaatgcttctccgcacaaaaggagtgcaataaagaaaaaaaccggaatagttcggttgtgccttcagaaagggcccgggtaggtctggcccccctcccaggcatgaagggaacagattacatcaacgcctcttatattatggggtactacagatcaaacgagtttataattacccaacatccactgccccatacaaccaaggacttttggaggatgatctgggatcacaatgcccagatcatcgttatgctcccggataaccagagcttggccgaggacgaatttgtgtactggccatcgcgcgaggagagcatgaactgtgaagctttcaccgtcactctgatctctaaggatcgcttatgcctttctaacgaggagcagattatcatacacgattttatcttagaagcaacacaggacgattacgtcttggaagtgcgccactttcagtgccccaagtggcccaaccctgacgcacctatatcatccacattcgaactcatcaacgtaataaaagaggaagccctgactcgcgatgggcctactatcgtacatgatgaatacggagctgtaagcgctggaatgctatgtgcacttacaaccctgtcccaacaactggaaaacgagaatgctgtagatgtctttcaggtggcaaaaatgataaacctgatgcggcccggggtgttcactgatatcgagcaatatcagttcatatataaagcaatgctgagtctagtgtcaactaaggagaacgggaacgggcccatgacagttgacaaaaacggtgccgtgctgatcgcagatgagtccgatccagccgagtccatggaatccctggtatag

SEQ ID NO: 130946 - DNA, 309 bp, synthetic construct
  misc_feature 1..309: note = Description of Artificial Sequence: Synthetic coding sequence
  source 1..309: mol_type = other DNA
atgcgccgcttgttggagccgtgctggtggattcttttccttaagatcacatcgtcagtcctgcattacgtcgtatgcttccctgcattaacagaaggctacgtgggtgccctccacgaaaaccgacacggcagcgccgtgcaaatccggcgccgcaaagcctcaggagacccatactgggcttactcaggcaagagtagctgcagtaatggcgaccataccggccaactgacctcccattccacacatttaaaggcccacttcgagagcctcctgtgtctatcctctgtctgtagtaatctcagttag

SEQ ID NO: 130947 - DNA, 2814 bp, synthetic construct
  misc_feature 1..2814: note = Description of Artificial Sequence: Synthetic coding sequence
  source 1..2814: mol_type = other DNA
atggctggagcggggggcgggcttggtgtgtgggggaacctggtgctgctcggcctgtgtagctggaccggagctcgcgctcccgctcccaatccgggtaggaatttgacggtggaaactcagacaacttcctctatctcgctgtcatgggaggtgcctgacggtctagattctcagaacagcaattactgggtacagtgcacaggagacggaggcacaactgaaactcgcaataccactgccactaatgtgactgtggacggcttggggccaggatctctgtatacttgttcggtgtgggtggagaaagacggtgtaaactcgtctgtaggaacagtgacaacggcaaccgcccctaatccagtcagaaacctaacagtcgaagcccaaacgaattcatcaattgctctgacttgggaggtccccgatgggcccgaccctcagaattcaacctacggcgtggagtacactggcgacggcgggagggcagggacccggtcaactgcccacacaaatatcacggtagaccgcctcgaaccaggttgtctgtacgtgttctcagtctgggtgggtaagaacgggatcaatagctcgcgtgagacacgcaatgccaccacagcccctaatccagttcggaacctgcacatggagacacaaacgaattcctcaatcgctctctgctgggaagtgcccgacggcccctacccccaagactatacttattgggtggaatatacaggagacggcggagggacagagactaggaacacaaccaacacctcagtgaccgccgagagactggagccaggcacactgtatacgttttcggtctgggccgagaaaaatggggcacgcggctcccggcaaaacgtgagcatctcgaccgtcccaaatgcagtgacgtcactgtcaaagcaggattggaccaatagtaccatcgctctccgctggacagctccccagggtccaggacagtcatcatactcttattgggtttcctgggtgcgggagggtatgacagatccccgaacacagagcactagtggaacagatataacactgaaagaattagaagccggaagtttgtatcacctcacagtgtgggccgaacgaaacgaggtacgcggatataactcaactcttaccgcagccactgcccccaacgaagtgacggatcttcagaatgagacgcaaaccaaaaattcagtgatgctgtggtggaaagccccaggggaccctcactctcagctctacgtgtactgggtgcagtgggcctccaaggggcacccccggaggggacaagaccctcaagctaactgggtcaatcaaactagcagaactaatgagacctggtataaggtcgaagccctggaaccaggaacgctgtataactttacggtgtgggccgaacgcaacgacgtggcctcctccacccagtcactatgtgcctcaacttaccctgacactgtgaccatcacctcgtgcgtgtccactagcgctggctacggcgtgaatctaatttggagctgtccccagggcggatatgaggcgtttgagctggaagtcggaggccaaagagggagtcaggacagatcctcttgcggtgaggctgtgagtgtgctgggtctcgggcccgctagatcttacccggccactatcactactatttgggacggtatgaaggttgtgagccactccgtggtgtgtcatacagagtcagccggagtgatcgccggggcgttcgttggcattctgttattcctgatactggtcggacttctgatcttctttctgaagcgaagaaataagaagaaacagcaaaaacctgaattacgggacctggttttttctagtcccggagatataccagctgaagacttcgcagaccatgtgcgaaaaaatgaacgcgactcaaattgcggattcgcagataagtatcagcagctgtcgcttgtaggtcacagccagagtcagatggttgcctcagcatccgagaataatgctaagaaccgatatagaaatgtgctgccttacgactggtctagagttccactaaagcctattcatgaggagccaggctcagattacatcaacgcctctttcatgccaggactttggtctccacaagagttcattgccacccagggcccactcccccagaccgtgggcgacttttggcggctggtatgggagcaacagagccacacactcgttatgcttactaattgcatggaagccggccgagtgaagtgtgagcactattggcccctggacagccaaccctgtacacacgggcacctcagggtgaccttggtcggagaggaggtgatggaaaactggaccgtaagggaactcttactgctccaggtcgaggaacagaaaacgttgagtgtccggcagttccactatcaggcctggcccgaccacggcgtaccatcttctcccgacacactcttggccttttggaggatgcttcgacagtggttagaccagaccatggaaggaggccctccaatagtccattgctccgcaggcgtaggaaggacgggaacgctcatagcccttgacgtccttctgaggcagcttcagagcgagggtctgctcggtcctttcagcttcgtccgcaagatgagggaatcccgccccctcatggtgcagaccgaagcccagtatgtgttccttcatcaatgcattctgagatttctgcaacagagcgctcaggctcccgccgagaaggaggtcccctatgaagatgtggagaacctaatttatgagaatgtagctgcgatccaggctcataaactggaggtgtag

SEQ ID NO: 130948 - DNA, 3348 bp, synthetic construct
  misc_feature 1..3348: note = Description of Artificial Sequence: Synthetic coding sequence
  source 1..3348: mol_type = other DNA
atggcaggcgccggcggtggattgggagtgtggggtaaccttgtgttgttgggactatgctcatggaccggggcaagggcacccgccccaaacccaggacgcaacctaacagtggaaactcaaactacctcttcgatctccctcagttgggaggtgcctgatggactggattcccagaactctaattactgggtgcagtgcacgggtgatggggggacaacagagaccaggaacacaaccgccaccaacgtgactgttgatggcctgggaccagggtccctgtacacctgctcggtctgggtcgagaaggacggtgttaactcaagcgttggcaccgttactactgccaccgcccccaatcctgtgagaaatctgagagtcgaggcgcagacaaattcctcaattgcactgacttgggaagtgccagacggccctgacccgcagaatagtacttacggagtggagtataccggggatggcggccgagcaggaacacgaagtaccgcccatacgaacattacagtggatgggttggagccagggtgtctctacgcttttagcatgtgggtgggcaagaatggtatcaactccagcagggagacaaggaacgcaaccactgcgcacaaccctgtgcgaaatttacgggtggaggcccaaactaccagtagcatttctctgtcctgggaggtccctgacggaacagacccgcaaaactcaacttattgtgtccaatgcaccggagatggcggccggactgagactcggaacaccactgacacaagagtgacagtcgacggcttgggccccggcagtctctacacgtgcagcgtgtgggtggagaaggatggcgtgaattcttccgtggaaattgtcacttccgctacagcccctaaccctgtgcgcaacctgactgtcgaggctcaaaccaactcctcaattgctctgacatgggaagtccccgatgggcccgacccccagaacagtacctatggggtcgaatacaccggcgacgggggtagagcagggacgaggagtactgcccataccaacataacagtcgacaggctggagccaggttgtctgtatgtctttagtgtgtgggtgggcaaaaacggaatcaatagttcccgggaaacaagaaacgctaccactgccccaaatcctgttcgaaacctgcatatggagacgcagacaaattcttccatcgccctctgctgggaggtaccggacggaccctatcctcaagactatacatactgggtagagtatacaggcgacggaggtgggacggagactaggaacacaacgaatacttccgtgacagccgaacgactggagcccggtactctgtatacgtttagtgtctgggctgagaagaatggtgctcggggctccagacaaaatgtgtccatttcaacagttcctaatgcggtgacttctctcagtaaacaggattggacaaactccaccattgctctacggtggaccgctccacaaggcccgggccagtcttcctacagctactgggttagctgggtgagggaggggatgactgaccccagaacacagtcaacaagtggcacggatatcactctgaaggaactcgaggccggctcactttatcacctgacagtctgggctgaacgcaatgaagtgcgaggctataatagcactcttaccgcggctaccgctcctaatgaagtcacagatctccaaaatgagacacagactaaaaatagcgtcatgctgtggtggaaagcaccaggcgacccgcattcacagctgtatgtgtactgggtccaatgggcatccaaaggacatccacgtcgggggcaggatccacaggccaactgggtgaaccaaacctcccgaaccaatgagacttggtataaagtcgaggccttagaacccgggactctgtacaacttcactgtttgggccgaacgtaacgatgtggcctccagtacacagtctctgtgcgcttctacataccctgataccgtaaccattacctcctgtgtgtcaacatctgccgggtatggtgtgaacctgatctggagctgcccccagggcggctacgaggcattcgagctggaggtgggtggtcagcggggtagccaggaccgctcaagttgcggtgaagcagtttccgtcctgggactgggtcccgcgaggagttatcccgccactattaccacaatttgggatggcatgaaggtggtctcccatagtgtggtttgtcataccgagagtgccggtgtgattgcgggcgcattcgtgggaatccttttgttcttaatactggtggggctgcttatcttttttctgaaacggagaaataaaaaaaagcagcagaaacctgagctacgggatctcgtgttcagctcacctggcgatatacccgctgaggatttcgcggatcatgttcgcaaaaacgagcgggatagcaattgtgggtttgccgacaagtatcagcagctgtccctggtcggccacagccagtctcaaatggtggcaagtgccagtgagaataatgcaaaaaacaggtaccgcaacgtgctcccatatgactggagtcgagtgccactcaagccgattcacgaggaacctgggtctgactacatcaatgccagcttcatgcctggtctctggagcccacaagaattcatcgctactcaggggcctttacctcagaccgttggcgacttctggcgactcgtctgggaacagcagtcccatacgctggtaatgttgacaaattgcatggaagctggcagggtaaagtgcgagcactactggccactggacagccaaccatgtacccatggacatctccgggtgaccctcgtgggagaggaggtgatggaaaactggacagtgcgggaactgttgcttctccaggttgaggagcagaagacactgagcgtgagacagttccactaccaagcctggcccgaccacggtgtcccttcaagcccagatacattgctggccttttggcgtatgctaaggcagtggctcgatcagaccatggaggggggacctccgatcgtgcactgctccgccggcgttgggagaaccggcacacttatcgcattggatgtgctgctgcggcagctccagagtgaagggctgctgggacccttctccttcgtgagaaagatgcgggagtcccggcctctgatggtgcagactgaggcccagtatgtttttttgcaccagtgtatcttgcgattcctgcagcagagcgcccaggctccggccgagaaagaagtcccttatgaagatgtggaaaacttgatatatgaaaatgtggccgctatccaagcccataaattggaggtgtag

SEQ ID NO: 130949 - DNA, 1278 bp, synthetic construct
  misc_feature 1..1278: note = Description of Artificial Sequence: Synthetic coding sequence
  source 1..1278: mol_type = other DNA
atgaaaccagccgcgcgggaggcgaggcttccaccacgcagccccggtctgagatgggccctgccattactgctcctgcttctccggttgggccagattctgtgcgctgggggcacccctagtcccatccccgatccatcagttgctactgttgctacaggggagaacggaattacccagattagttctactgccgagtcatttcacaagcaaaatgggaccgggactccgcaggtggagaccaatacctcagaggatggtgagagctctggagcaaatgacagcctgagaactccggagcagggctcgaatggcaccgatggggcttctcagaaaacacccagcagtacgggcccgtctcccgtgtttgatatcaaggcagtaagcatctcaccaacaaatgtaatcctcacctggaagtctaacgacactgcagcctcagaatataaatacgtggtcaagcacaaaatggaaaatgagaaaacaataactgtggtgcaccaaccctggtgcaacattaccgggctgcgccccgctacaagctacgttttctctattacccctggaatcggaaatgaaacctggggagacccaagggtgattaaggtcatcacagagcctatccctgtgtcagacctcagggtggctctcaccggcgtacgaaaagcggccctctcatggagtaacggtaatggcactgctagctgtcgggtgctgttggagagcatcggcagccatgaggagcttacccaagacagtcgtctgcaggttaacatctcagggctaaagcctggagtgcagtacaacatcaatccttatctattacagagcaacaaaacgaaaggcgacccacttggcactgaggggggactggatgcttctaataccgagcgctctcgcgccggaagtcccactgcccctgtacacgatgagtctctggtgggcccagtggatcccagcagcggccaacagtctagggacactgaagttctcctggtgggcctcgagcccgggacccggtataacgccacagtgtactctcaggccgctaatggaaccgaagggcagccacaggccattgaatttagaaccaacgccatccaagtgtttgatgtgactgccgttaatatttcagccacgtccttgacactgatatggaaggtgagtgataacgagtcctctagcaattatacatacaagattcatgtggcaggcgagacggattcctccaatctgaacgtgtccgaacccagagccgtcattcctgggctacgctag

SEQ ID NO: 130950 - DNA, 4014 bp, synthetic construct
  misc_feature 1..4014: note = Description of Artificial Sequence: Synthetic coding sequence
  source 1..4014: mol_type = other DNA
atgaagcctgcagcccgagaggctcgactccctcctcgatccccgggtctccggtgggcactgcccttgctgctgctccttctacgactaggacagatactgtgcgcaggagggacacccagtcctattcctgacccctccgttgcgactgtagcaacaggggagaacgggattactcagatctcaagcactgccgagagcttccacaaacaaaacggcaccggtaccccacaggtcgagaccaacacaagcgaagatggagaatctagtggcgctaatgactcccttcggacacctgaacagggttccaacggtaccgatggtgcatcccagaagaccccctcttcaactgggcctagccctgtctttgatatcaaggcagtgtctatcagccccacgaacgtgattctgacatggaagtcaaacgataccgccgcatccgaatataagtatgtggttaaacataagatggagaacgaaaagacgatcactgttgttcaccagccttggtgcaacatcactggcctgaggcctgccacctcctacgttttctccatcacgcctgggatagggaatgaaacctggggggatcctcgggttatcaaggtgattacagagccaattccagtatccgacctgcgcgtggcactgaccggcgtgcggaaagccgctctctcttggtcaaatggtaatggaactgcctcctgtagggtcctgttagagtctataggctcccatgaggaattaacccaggattcgagactgcaagttaacatttccggattgaaaccgggggtgcagtataatattaatccatatctgctgcagtctaataagacaaagggagaccctttaggcacggagggggggctggacgcttccaataccgagcggtcccgcgcaggttcgcccaccgcaccggttcacgacgaatcgctggtcgggccagttgatccttccagcggccagcaatccagagataccgaagtgctgcttgtcggcctggagcctggcactcggtacaatgccacggtgtattcacaagctgcaaacggaaccgaaggccaaccgcaagctattgaatttcgcacaaacgccatccaggtgtttgacgtaaccgccgtgaatatctcggccacctccttgacactcatctggaaggtgtcggataatgaaagcagcagcaattacacttacaaaatccacgttgctggtgaaaccgactcgagtaatctaaacgtctcagagcctcgcgcggttatcccaggccttagatcgtcaacgttctacaacatcacagtttgccccgtgctgggagacattgagggtactcccggattcctacaggtccacactccacctgtccctgtctctgacttcagggtgactgtggtcagcaccactgaaattggactcgcttggagttcccacgatgccgagagctttcaaatgcacattacccaggagggagccggcaactcacgggtggaaattaccacaaaccagagcataataatcggcggcctctttcctgggactaagtattgttttgaaatcgtgccaaaagggcctaatgggacagaaggagcttccagaacagtgtgcaacagaacggttccttcagccgttttcgacattcacgtggtgtacgttaccaccaccgagatgtggttagactggaaaagccctgacggagcaagtgagtacgtttatcacctggtgatcgagagcaaacacggcagcaaccatacatccacctatgataaagctattacactgcagggtcttattcccggaaccctttataatatcaccatttcccctgaggtggaccacgtttggggagaccccaactcaacggcgcagtatacaaggccaagcaacgtttccaatatcgacgtgagcaccaacacgaccgcagccaccttaagttggcagaactttgacgatgcgagccctacctattcatactgtcttctgattgaaaaagccggtaactcaagcaacgctactcaggtggtgaccgatatcgggatcaccgatgcgactgtgacggaactgatccccggcagtagctacacggtggagatcttcgcacaggtcggggacggtataaagagtctcgaacctggacgaaaatccttctgcaccgatcccgccagtatggccagttttgattgtgaagttgtgccaaaggagcctgcactggtcttgaagtggacttgtcctcctggggcaaatgcagggttcgaactcgaagtctcttcgggggcgtggaacaacgcaacccacctggagtcctgctctagtgaaaatggcacagaatataggaccgaggtcacctatctgaacttctccacatcttacaatatctccattaccaccgtctcctgcggcaaaatggcagctcccactaggaatacctgtacgactggaatcacggatcccccaccccctgacggttcacccaatattacgtcagtaagccataacagcgttaaagttaaattctccggcttcgaggctagtcacggcccaatcaaggcgtatgctgtaatattaaccaccggggaggccggacacccaagtgccgatgtgctgaaatacacttatgaagacttcaagaaaggcgccagtgatacctatgttacgtatctgatccggaccgaagagaagggaaggagccaaagcctgtcggaggtgctcaagtatgagatagacgtgggcaatgagtcaacgacacttggttactacaatggaaaacttgagccgctgggctcttatcgcgcatgtgtcgctggttttacgaatatcaccttccatccacagaataaaggactcatcgacggggctgagtcctacgtgtctttcagccgctactccgacgcagtctccctgcctcaggatcccggagtcatatgcggtgccgtgtttggctgtatttttggagccctggtaatcgtgaccgtgggaggtttcattttctggagaaagaaaaggaaagacgctaagaataatgaagtgagtttcagtcagatcaaaccaaaaaaatcgaaacttatcagagtcgagaacttcgaagcttatttcaaaaagcagcaagccgatagtaattgtggttttgccgaggagtacgaggacttaaaactggtgggcattagccagcccaagtatgcagcggagctcgctgaaaacagggggaaaaaccgatacaacaacgttttgccctacgatatttctcgggtgaagctgtcagtgcagactcattctacagacgactacatcaacgcgaattacatgcccggctaccacagtaaaaaggacttcatcgctacacagggtccccttcccaataccttgaaggatttttggcgaatggtttgggagaagaacgtctacgctattataatgttgactaagtgcgtagagcaaggacgaacaaaatgcgaagaatattggccatccaaacaagcgcaggactacggagatattacagttgccatgacatcggagattgtcctaccagaatggaccatccgcgatttcaccgtaaaaaacatacagacaagtgaatcacatcctcttcggcagttccattttacctcgtggcctgatcacggagtgccagatacaaccgatttgttaataaactttaggtacctggtccgcgattatatgaaacagagtccacctgagtcccccatacttgtgcactgctccgccggagtcggccggacagggacgtttattgcaattgatagactgatttatcagatcgagaacgagaacaccgtggatgtatatggcatcgtgtacgatttgagaatgcaccgtcccctcatggtgcagaccgaagaccagtacgtctttttaaaccagtgtgtacttgacattgtccggtctcagaaggattccaaggttgatctcatctatcaaaatacaactgccatgacaatctacgaaaatcttgcccctgtcactacatttggaaaaacaaatggctatattgcttag

SEQ ID NO: 130951 - DNA, 1620 bp, synthetic construct
  misc_feature 1..1620: note = Description of Artificial Sequence: Synthetic coding sequence
  source 1..1620: mol_type = other DNA
atgaagcccgccgcccgggaagcaaggttgccaccccggagccccggtttgcgctgggcactccctttgttgttgttgcttctcagactcggccagatactctgtgccgggggtacccctagtccgattccagacccctctgtggccaccgttgcaaccggagagaacggcattacccagattagcagcacagcggaaagtttccataaacaaaatggaaccgggacgccccaggtggagaccaatacaagcgaggatggggagtctagcggcgccaacgactccctaaggactcctgaacaggggtccaacgggacggacggagcatctcagaagaccccctcttctacagggccttcacctgtcttcgacattaaagctgtgagtatttccccaacaaacgttatcctgacctggaaatccaacgatactgccgccagcgagtataagtatgtagttaagcacaagatggagaacgagaagaccatcactgtggtccatcaaccatggtgtaatatcactggactgcgaccagcgacaagttacgtgttcagcatcaccccaggtatcggcaatgagacatggggagatcccagggtgatcaaggtgatcaccgaaccgatccccgtgtccgatcttagagtagcattaaccggcgtgagaaaggcagccttgtcgtggtcaaatggtaatggtacagcctcatgtcgagtgctgctcgagtcaataggatctcacgaagaactgacacaggattcccgcttgcaggtcaatatttccgggcttaagcccggagtgcagtataatatcaacccctatctcctgcagagcaacaagaccaaaggcgaccccctgggcaccgaaggagggctggacgcctctaacaccgaacggtccagagccgggtcccctaccgctcctgtacacgacgagtcactcgtgggtcccgtggatccctcatctggacagcagtcccgcgacactgaggtgctgttggtgggactggaacccggcacacgttataacgcaacagtgtactcccaggctgcaaatggaactgaggggcagccgcaggccatcgagtttcggaccaacgcaatccaggtctttgatgtaactgctgtgaacatttccgccacctccctgactttaatttggaaggtcagcgataacgagagttcatcaaattatacctataaaattcacgttgctggcgagacagattcctcaaatctgaacgtgtctgaacctcgcgcagtcattcccggcctgaggagttccacattctataatataactgtgtgtcccgtgctgggagacattgagggcacacccggatttctacaggtgcacacgccacccgtccctgtgtccgactttcgcgtgaccgtggttagcaccactgagattggccttgcctggtcaagccatgacgcggagagctttcagatgcatataactcaggaaggtgcgggaaattctcgcgtggagattactactaaccaaagcattattattgggggcctttttcctgggacgaagtattgctttgaaattgtgcccaagggacctaacgggactgagggggcatcccgaaccgtttgcaacagaacggggtag

SEQ ID NO: 130952 - DNA, 4419 bp, synthetic construct
  misc_feature 1..4419: note = Description of Artificial Sequence: Synthetic coding sequence
  source 1..4419: mol_type = other DNA
atggatactaccgccgccgccgcccttccagcattcgttgcactgctgctgctgtccccctggccactactggggtctgcacaaggtcagtttagcgccgggggctgtacatttgatgacggtcctggggcgtgtgattaccatcaggacttgtacgatgacttcgagtgggttcacgtatcagcccaagagccccactacctgccgcctgagatgccccaaggaagctacatgatcgtcgattcttccgaccacgaccctggggaaaaagcccgtctgcagctacctacaatgaaggagaatgatacccattgcattgactttagctatctgctctattcccaaaaaggccttaatcccgggactctgaatattctggtgcgcgtgaacaaaggcccactcgccaatcctatctggaacgtaaccggatttacggggcgcgattggctcagggcggagttggcagtatccaccttctggcctaacgagtaccaggtgatatttgaagccgaggtgtctggagggcgctctgggtacatcgcaatagacgatatccaggtcctttcttatccgtgtgataagtcccctcactttttgcgattgggcgacgttgaggtgaatgccggacagaatgctacctttcagtgcatcgcaaccggacgggacgcagtccataataaactgtggctccagaggagaaacggcgaagacattcctgtggctcagacaaaaaacataaatcaccgacgttttgcagccagcttccgtctgcaggaagttactaaaactgatcaagatttatatagatgtgtcacacagtccgaaagagggagtggcgtttcgaacttcgcccagctgatcgtgcgggagcctcctcgacccatcgctcccccccagctgctcggcgtggggcccacttatctgctgatacagctgaatgcaaattcaattatcggggacggccctattatcctaaaagaggtagagtataggatgacctcgggatcttggacagagacacacgcagtgaacgccccaacctataaattgtggcacctagatcccgacaccgaatacgagatacgtgttcttctcactaggcctggtgagggtggcaccggcttgcctggccctccactcattacccgcaccaagtgcgcggaacctatgaggaccccgaagactctaaagatcgccgaaattcaggcccgtcgcatcgccgtggattgggaatccctcgggtataatatcacaagatgccacacctttaatgtcaccatctgttaccattactttagaggccacaacgagtccaaagcagattgtctggacatggatccaaaggcaccccagcatgtggtgaatcacctgcctccctataccaacgtgtcacttaaaatgatactgacaaatcctgaggggcggaaggaatccgaggaaaccataatccagacagatgaggacgtaccaggcccagtccccgttaagagtctgcaaggcacatcttttgaaaataagatttttctcaactggaaggaacccctcgaccccaacggtattatcactcagtatgagatctcctactctagcattcgctctttcgacccagccgttcccgtggcaggtccgcctcagaccgtcagcaacctgtggaactcaacccatcatgtgtttatgcacctgcaccccggcacgacatatcagttttttatccgtgccagtacagttaagggttttgggcctgccaccgccatcaacgtcaccaccaacatttcagccccgaccttgcctgactatgaaggagtagatgcgtccctgaacgaaacagctaccacaattacagtcctgctgcgacctgcacaagcaaagggggcccctataagcgcgtatcagattgtggttgaggagctgcaccctcatagaaccaagagagaggctggtgccatggaatgctaccaggtgcctgtgacgtaccagaacgccatgagtggcggagccccctactatttcgccgccgagcttccacctgggaatctcccagagcccgcgcctttcactgtaggagacaatagaacataccagggcttttggaatcctcctttggcgcccaggaaaggctacaacatctacttccaggcaatgagtagtgtggaaaaagagaccaagacacagtgtgtcagaatcgccaccaaggccgcagcaaccgaggagccagaagtgattcctgatccagctaagcagaccgatcgcgtggtgaaaatcgccgggataagcgcaggcattctggtgtttattttgcttttgctggtggtgattttaattgtgaaaaagcggcgcagctactactcatattcatattacctcaagctagctaaaaaacgcaaggacgctatggggaatactcgccaagaaatgacccatatggtgaatgccatggacaggagttacgctgaccagagtaccctgcacgcagaggaccctctttctatcacttttatggaccagcacaacttcagcccccgcttacccaacgatccacttgtgcccactgcagtgctagtgcctatcactgacgagaaccactccgctacagccgaatctagccggctgctggacgtgccgagatacctgtgcgaggggacggagtctccttaccagactggacagctgcacccagcgatacgggtggctgatttgttgcaacatattaatttgatgaaaacttcagatagctatggatttaaagaggagtatgagtccttttttgaaggacaatctgccagttgggacgtcgccaaaaaggaccagaatcgcgcaaaaaatcgttacgggaatatcattgcttacgatcatagcagagttattttacaaccagtggaagacgatccctcttccgattacatcaatgcaaactacattgatatatggctgtatcgcgatgggtaccagagacccagtcactacatcgctacccaaggacctgtacatgagacggtctacgacttttggaggatgatttggcaggaacagagcgcctgcatcgtgatggtgactaacctggtcgaggtgggaagagtcaagtgttataagtattggcctgacgacaccgaggtatatggagacttcaaagtcacttgtgtcgagatggagcctctggcagagtatgttgtgcgcacctttactttggagagacgcggctataatgagatccgagaggtcaaacaattccacttcaccggatggcccgatcatggggtcccttatcacgctactggcctcctgtcctttattcggagggtcaaactgtctaacccaccctctgcgggtccaatcgtagtgcattgctccgccggtgctggtagaaccgggtgctacattgtaattgacattatgttggatatggctgaaagagagggagtggtcgacatctacaattgtgtgaaggccctgaggagtaggaggatcaacatggtacagactgaggagcaatacatattcatacatgatgcaatccttgaggcatgcctgtgcggcgaaacagcaattccagtctgcgaattcaaggctgcatattttgatatgattcgaattgactctcaaacaaattcttcccacctgaaggatgaattccaaactctgaacagcgttacccctagactccaagctgaagattgttctattgcttgtctgcctcgcaatcacgataagaatcgtttcatggacatgctccccccagaccgttgtctgccattcctcattaccatagacggcgagagcagcaactatatcaatgctgctttgatggatagctaccgtcagcccgcggcttttatcgttactcagtatccactgcccaacaccgttaaggatttctggcgcctggtgtacgactacggttgtacatctatcgttatgcttaatgaagttgacttatcccaaggctgtccacaatactggcctgaagagggcatgttacgctatggtccgattcaagtagagtgcatgagttgcagtatggactgcgacgtcataaaccgcatttttcgtatttgcaatctcaccaggcctcaagaaggctacttaatggtgcagcagttccagtacctgggttgggccagtcacagggaggtccccgggagtaagagatcctttttaaagttaattttacaggtggaaaagtggcaagaggaatgtgaagagggtgaagggaggacaatcatacattgcttgaatggagggggccgctctggcatgttttgtgccattggaatcgtcgttgagatggtgaaacggcagaatgtggtggatgtgttccacgctgttaagacgctgagaaattcaaagccaaatatggtcgaagctcccgagcagtaccgcttctgctacgacgtggccctcgaatatttggagtccagctag

SEQ ID NO: 130953 - DNA, 4377 bp, synthetic construct
  misc_feature 1..4377: note = Description of Artificial Sequence: Synthetic coding sequence
  source 1..4377: mol_type = other DNA
atggacacaaccgcagccgcagccttacccgcctttgtcgcgctgctgctcttaagtccatggccgctactgggatccgcgcaaggacaattttcggcaggagggtgtacatttgacgatggccctggagcatgtgactaccaccaggatctttacgacgattttgagtgggtgcacgtgtcagctcaggagccccactatttgccccccgagatgccacagggatcatacatgattgtggattcatctgatcatgacccaggcgagaaggctagacttcagttgccaacaatgaaggagaatgatactcactgcatcgacttcagttatctcttatattcgcaaaagggcctgaatccgggcactctaaacatactggtccgggtcaataaaggacccctggctaatcccatatggaatgtgacaggatttaccgggcgcgactggctgagggcagagcttgccgtctccacgttctggcccaacgagtatcaggtgatcttcgaggcagaagtatccggtgggaggtcaggttacatagcgatcgatgacatacaggtgcttagctacccgtgcgacaaaagcccacatttcctgcggctgggcgatgtggaggtcaatgccggccagaatgctacctttcagtgtattgccacaggccgggacgccgtacacaacaaactctggttgcagcgccggaatggcgaagatatcccagtggcccagaccaagaatatcaatcacagaaggttcgcagctagctttcggctgcaggaggttacaaaaactgatcaggacttgtatcgatgtgttacccagagtgaacgggggagcggtgtatccaactttgcccagctcatcgtcagggaaccacccaggccaattgctcccccgcagctgttgggcgtggggcctacatacctgttgatacaactaaatgctaacagcatcataggggacggcccgatcatcctaaaagaagtggagtacagaatgaccagcggttcatggactgaaactcatgctgtaaacgcccctacatataagttgtggcacctggatcccgacacagagtacgaaatcagggtactcctgacacgccctggagaaggtggcacaggactgcccggtccccccctaatcactcgaaccaaatgtgctgagcctatgaggacaccaaaaacgctgaagatcgccgagattcaagcgcgccgtattgcggtggactgggaatcactgggctacaatatcacccggtgtcacacgtttaatgtgactatatgttaccactatttccgtgggcacaatgagtctaaggctgattgcctggatatggatcccaaagcgccgcaacacgtggtgaaccacctgcccccctacacaaacgtgagtcttaagatgatactcaccaaccccgaggggcggaaggagtctgaggagactatcattcagactgatgaggacgtgcccggcccagttccggtgaaaagtctgcagggaaccagctttgaaaataagatctttttgaactggaaggagccactggaccctaacggcattatcacccagtacgagatatcttattcatcaattcgctcctttgacccagcagtcccggtggcaggcccaccacagaccgtgagcaatctgtggaattcaactcatcatgtgttcatgcacctacatcctgggacgacataccagtttttcattagggcctcaaccgttaaaggatttggtcctgccacggccattaatgtcacgactaatatcagtgcgcccactctccccgactacgagggagtggatgccagtctaaacgagaccgctaccactattacggttttgctccgcccagcccaggccaaaggcgctccaatctccgcctaccagattgtggtagaagagttacaccctcatagaaccaagagggaggcaggcgcaatggagtgctaccaggtgcctgtgacataccagaatgctatgtccgggggtgcaccatattattttgcggcggagttgcctcccggcaacctacccgagcccgctcccttcaccgtgggcgacaatcggacctaccaggggttctggaacccacctctcgctccccgaaaaggttacaacatttacttccaagctatgagcagcgtggaaaaagagaccaaaacgcaatgcgtgcgaatagccaccaaggccgctgctaccgaggaacctgaggtaatcccggatcccgccaagcagaccgacagagtggtcaaaatagccggcatctcagccggtattctggtgtttattctcctcctgctcgtcgtgattcttatcgtcaagaaatctaaactggctaagaagagaaaagatgcaatgggcaataccaggcaggagatgacacacatggtgaatgcaatggacaggtcttacgccgatcagtctacactgcatgctgaggatccgcttagcataacctttatggaccagcacaattttagtccaaggctgccgaatgatcctctagtgccaaccgctgtgctggacgaaaaccactcggccacagcagaaagctctaggctgctagatgtacccaggtatctgtgcgaggggactgagtccccatatcagacgggccagctgcatcccgccatcagagtagctgatctcctgcaacatattaacttgatgaagaccagcgactcctatggcttcaaagaagaatacgaaagtttttttgaaggacagtctgcctcctgggatgttgccaaaaaagatcagaatcgtgccaagaatcgctatggcaatattattgcctacgaccattctagggtgatactccaaccagtggaggatgacccatcatctgattacattaacgcgaactacatcgacatctggctgtatcgcgatggataccagcggcctagccattacatcgctacacaaggtcccgtgcacgagaccgtgtacgacttctggcgaatgatatggcaagaacagagtgcttgcattgttatggtgactaacctcgtggaagtcggacgagtgaagtgctataagtactggcctgacgatacagaggtttacggcgatttcaaagtgacgtgcgtggaaatggagcccttggccgagtacgtggtaagaaccttcaccctggaacgacgcggatacaatgagatcagggaggtgaagcagttccatttcaccggatggcccgatcacggcgtaccctaccacgccaccggactgctttctttcattcgccgagtgaagttgagcaatcctccatctgcaggccccatcgtagtgcactgcagtgctggagcagggcgtaccggatgttacattgtgatagacatcatgttggatatggccgaacgagagggtgtagttgatatatacaactgcgtgaaggccctgagatctcggcggataaacatggtccagacagaggagcagtacatattcattcacgacgccatccttgaggcatgtctgtgcggggagaccgccatcccagtctgtgaatttaaggcggcctactttgatatgattcgaattgacagccagaccaattctagtcacctgaaggatgagttccagactctgaacagcgtgacccccaggctgcaggctgaagactgctctatagcctgtctcccccgtaatcacgacaaaaaccgcttcatggatatgctgccgcccgatcggtgtctgcccttcctgatcaccatcgacggggagtctagcaattacatcaacgcagcgctgatggatagttaccggcagcccgccgccttcattgtgactcaatatcccctccccaacacagtgaaggatttctggcgtttggtttatgattatggttgtacgtctattgtgatgctgaacgaagtggatttatctcaggggtgtcctcagtactggccagaggaaggcatgcttcgttatggtcctattcaggtcgaatgtatgtcctgtagcatggattgtgatgtgattaataggatatttaggatatgcaacctgacccggccccaggagggatacctcatggttcaacagttccaatatttgggatgggctagtcaccgagaagtgcccgggtcaaagaggtcttttctgaaactcatattgcaggtggagaagtggcaggaagagtgcgaggagggagagggtcgtactataattcattgtttgaacgggggcgggcgctccggaatgttttgcgctatcggaatcgtggtggagatggtgaaaaggcagaacgttgtggatgtattccacgccgtgaaaacactccgcaactccaagcctaacatggtggaggcaccagaacaatataggttctgctacgatgtggctttggaatatctggaaagcagctag

SEQ ID NO: 130954 - DNA, 4341 bp, synthetic construct
  misc_feature 1..4341: note = Description of Artificial Sequence: Synthetic coding sequence
  source 1..4341: mol_type = other DNA
atggacacaactgctgccgccgccctcccggcttttgtggctctactgctcttgtccccttggcccctgctcgggtctgcacaggggcagttctccgccggaggttgcacatttgacgatgggcccggagcctgtgactaccaccaggatttgtacgacgatttcgagtgggtgcatgtgagcgcccaagagccccactacctgcctcctgagatgccacaggggtcctatatgatcgttgattcgtcagaccatgaccccggggaaaaggctagactccagctgcccacaatgaaggagaacgacactcattgcatcgacttcagctacctgctgtatagtcaaaagggtctgaaccccggtacacttaatatactggttcgtgtgaacaaaggcccactcgcaaacccaatttggaacgttaccgggtttactggccgggactggcttcgggcagaactggctgtgtctaccttttggccaaacgagtaccaggtgatatttgaggcagaggtgagcggtggcaggtccgggtacatcgctatagatgacattcaggttctcagttacccgtgcgacaagagtcctcactttctgcgactgggcgacgtagaagttaacgcgggccagaacgccacgttccagtgtatagccaccggtcgtgacgccgttcacaataaactttggctgcagcgtagaaatggtgaggacatacctgtcgcgcagaccaagaacatcaatcatagacgcttcgccgcgtcctttcggctgcaggaagtgactaagactgaccaggacctctaccgttgtgtgacacagtctgaacgcggcagtggggtttccaatttcgcacagctgatcgtgagggaaccaccccgacccattgccccaccccaacttctcggggtgggcccgacctaccttcttatccagctgaacgccaactcgattatcggagacggacctattatactgaaggaagttgaatatcggatgacatctggatcctggacggaaacgcacgccgtgaacgcccccacctacaaactgtggcacctcgacccagacaccgagtacgagattcgcgtcctgctgaccaggcccggcgaggggggcacaggcttgcccggaccgccactgattactaggacaaagtgcgctgaaccgatgcgcacacctaaaacactgaaaatcgccgagatccaagctcggagaatcgccgttgactgggagagccttggatacaacattacccgctgtcataccttcaacgtgaccatctgttaccactatttccgtggtcataatgaaagtaaggccgattgccttgatatggatcccaaagctccgcagcatgttgtcaatcaccttcccccctatacaaatgtcagcctgaagatgatcttgactaacccggaggggcgcaaggaatccgaagaaacaattatacagaccgacgaggatgtgcctgggcccgtccccgtaaaaagtctgcagggtacctctttcgagaataagatttttctgaactggaaagaacctcttgacccaaatggcatcattacacagtacgaaatctcatatagttctatccgctcattcgaccctgccgtgcctgtagcaggacccccccagaccgtgtcaaacctctggaatagcacccaccatgtcttcatgcaccttcacccagggacaacatatcagttcttcatccgggcgtctactgtgaaagggttcggacctgccacagcaataaacgtgacaaccaacatctctgcccctacgctgccggactacgaaggcgtggatgcgagccttaatgaaacagccactactatcactgtgctgctcaggccagcccaggccaaaggcgcccccatcagtgcttaccagatagtggttgaggaattgcatccccatcggactaagcgagaggccggtgccatggagtgctaccaggtccccgttacttaccaaaacgccatgagtgggggggctccctactacttcgctgctgagctcccccccggcaacctgcctgagccggctccattcacagttggcgacaataggacctatcagggcttttggaacccacccctggcgcctcgcaaaggttacaacatttattttcaagctatgagcagcgtagaaaaggagacaaagacacaatgcgtgcggatcgccacaaaggctgctgcgacagaagaacccgaagtgattcccgatcccgcaaaacaaacagatcgcgtagtaaaaattgcaggtatttccgctgggattctcgtcttcatactattgctgttagttgtgattttaattgttaagaagagcaagttagccaagaagaggaaggacgccatgggcaacacgcggcaagaaatgacccatatggtgaatgccatggatcggtcttatgctgatcagtctacactacatgctgaggatcctcttagcataacctttatggatcagcacaacttctccccgcggtacgagaaccattccgccactgcggaaagttctaggttgttggatgttccccggtacctctgtgaaggtacagagagtccgtatcagacggggcagctccatccggccatccgtgtggcggacctgttacagcacatcaacttgatgaagacatctgatagctatggtttcaaggaggagtatgaatcctttttcgaagggcagtccgcaagctgggatgttgctaaaaaggatcaaaaccgcgctaaaaaccgctacgggaacattatagcttacgaccacagcagagtcattttacagcctgtggaggacgatccttcttcagactatattaacgctaattacatcgatatctggctctaccgagatggctatcaaagaccaagccactacattgcgactcagggcccagtacatgagacagtgtatgacttttggcgcatgatctggcaagaacagtcagcctgcattgtgatggtgactaatcttgtagaggtgggcagagtgaagtgctataagtattggcctgatgatacagaggtgtacggagatttcaaggtgacctgcgtggaaatggaaccacttgcagaatacgtggtaagaacctttacccttgagaggcggggatacaacgagatacgggaagttaaacaattccacttcactggatggcctgatcatggcgtgccgtaccatgctaccggattattgagttttatacggcgagtcaagctgtctaatccccctagtgcgggacccatcgttgtccactgttctgctggtgcaggccgaacagggtgttatattgtgatcgacattatgctcgacatggcggaacgcgagggcgtggtagatatctacaactgcgtgaaagccctccgttcccgcagaatcaacatggtgcagacagaggaacagtacattttcatacacgacgccatcctcgaagcttgtctatgtggggaaaccgccatccctgtctgcgagttcaaggctgcttacttcgacatgatcaggatagactctcaaaccaacagttctcaccttaaggacgaatttcaaacactcaattccgtgaccccccgactgcaggctgaggattgcagcattgcatgtttacctagaaatcacgacaagaataggttcatggacatgcttccccctgatcgatgtctgcctttcctgattactatcgacggggaatcatctaattacataaatgccgccttgatggacagctatagacaaccagcggcctttatcgtaacacagtacccgctgccaaacaccgttaaagacttctggaggcttgtgtacgattatgggtgcacatccatcgttatgctcaatgaggtggacctctctcagggctgtccccagtactggcccgaggaaggaatgctcagatacgggccgattcaggtggaatgcatgtcctgctctatggactgcgacgtaattaatcgcatctttaggatttgcaacctgacacgtcctcaggaagggtacctaatggtgcaacagttccagtatcttgggtgggccagccacagggaggtgcccgggtccaaaaggagctttctgaaactgattctacaagtagagaagtggcaggaagaatgcgaagagggcgaaggtaggacaattattcattgtcttaatggcggaggcaggagcggcatgttctgtgcaatcgggatcgtggtggagatggtcaaacggcagaacgtggtggacgtgtttcacgcagtaaagacactcagaaactccaaacctaatatggtggaggctcctgaacagtaccgattctgctatgacgtggccctcgaatacctggagtcttcttag

SEQ ID NO: 130955 - DNA, 4320 bp, synthetic construct
  misc_feature 1..4320: note = Description of Artificial Sequence: Synthetic coding sequence
  source 1..4320: mol_type = other DNA
atggataccactgccgctgccgccctcccagcctttgtcgcactgctgctactgagcccttggcctctgctcggctccgcccagggtcaatttagcgccggcggctgcacctttgatgatggccctggcgcctgtgattaccaccaggacctgtatgacgatttcgaatgggtgcacgtttctgcccaggaacctcactatcttcccccggagatgccgcaagggagctacatgatcgtggattcttctgaccatgatcccggagaaaaagcccgccttcagttacccactatgaaggagaacgatacccattgcatcgattttagttatctgctgtactctcagaaaggcctcaaccccggtaccctcaacatcctggtgcgcgtcaacaagggacctctggcaaatcctatttggaacgtaacaggttttaccggccgggattggctgagggccgagttagcagtttctactttttggcctaacgaataccaagtgatctttgaggccgaggtttcaggcggcaggtccggctacatcgcaatcgacgatattcaagtgctgagttacccctgcgataagtccccacactttctcagacttggagatgtggaagtaaatgccgggcaaaacgccacattccaatgtatcgcaaccgggagagatgccgttcacaataaactgtggctgcagcggaggaacggggaagacatccctgtcgcccagacgaaaaacatcaatcataggagattcgccgccagcttccgcctacaggaggtaactaagactgatcaggatttgtacagatgcgtaacccagtccgaacgaggatccggggtgagcaatttcgctcagctcattgtgcgcgaacccccgcggcccatcgccccaccacagctcctgggcgttggcccaacatatctcctcattcagctcaacgccaattccattattggcgacggccctatcattcttaaggaggtggagtatcggatgacttcaggttcgtggaccgaaacccatgccgtgaacgccccaacctataaactgtggcacttagacccagatacagagtatgagatcagggtgttattaacgagacccggtgagggcgggacaggcttaccaggaccacccctgatcaccagaaccaagtgtgctgaacccatgcgcacaccaaagacactcaaaattgccgagatacaggcgcgccggatcgccgttgactgggagtccctcggctacaacattactcgatgtcacacatttaatgtgacaatatgctaccactacttccgggggcacaacgaatctaaggccgactgtctggatatggatcctaaagctcctcagcatgtggtgaaccatctcccaccgtacaccaatgtctcactgaagatgattctaacaaacccagaagggcggaaagagagtgaagagaccattattcagacagacgaggatgtccccggccccgtgcctgtcaaaagcttacaggggaccagttttgaaaacaagatcttcttgaactggaaagagcctctcgatcccaatgggatcatcacccaatacgagattagttactcaagtatccggtcttttgacccagcggtgcccgtggccgggccgccccagactgtaagcaacctttggaattctactcaccacgtttttatgcatctgcaccctggcaccacatatcagttcttcattagagcatccactgtgaagggattcggtcccgccaccgccataaatgtgactacaaatataagcgctcccacattacccgactatgagggggtggatgccagcctgaacgagactgccaccacgattacggtactgctgaggccagctcaggccaagggagcccctatctcggcttatcagatagtcgtcgaggaactacatcctcatcgcactaagagggaggcaggagctatggaatgttaccaagtccccgtgacctatcagaacgcaatgtctggaggggctccatattactttgccgctgagttaccccccggcaacctgcccgaaccagcccccttcacagtcggcgataataggacataccaagggttttggaatccccctcttgctccaaggaagggatacaatatatatttccaggcaatgagctcagtagaaaaggaaacaaaaacccagtgtgtgagaattgcaaccaaagctgctaccgaagaacctgaggtcatcccagacccagccaagcagacagacagagttgtcaagatcgccggcattagtgcaggcattctggtgtttatactgctactgctagtggttatccttatcgtaaaaaaaagtaagctggccaaaaaaagaaaagacgcgatgggcaatacacggcaggagatgacacatatggtaaacgccatggaccgctcctatgctgaccaatccactctgcacgccgaagatcccctgagcattacctttatggatcagcacaacttcagtcctcgctatgagaatcactccgcgacagctgaatcatctcggttgctggacgtaccccggtacttatgcgagggcaccgagtccccctatcagaccggccagttgcatcccgccataagagtggctgacctgctccagcacatcaatctgatgaaaacctccgattcatatgggttcaaagaggagtatgaatccttctttgaggggcagtcggcatcatgggatgtggcaaaaaaagaccagaatagagcgaaaaatcggtatggcaatatcattgcttacgatcactctcgagtgattctccaaccggtggaagatgacccatctagcgactatataaatgctaactacatagacggatatcagagacctagccattatatcgccacccagggaccagttcacgaaactgtttatgacttctggcgcatgatttggcaggaacaatctgcctgcattgtcatggtgactaatctggttgaagtcggaagggtgaagtgttacaaatactggcccgatgataccgaggtgtatggcgactttaaggtgacgtgcgtcgaaatggagcccctggccgagtatgtcgtcaggacctttacgctggagagaaggggatacaatgagattcgggaagtaaagcagtttcacttcaccgggtggcctgatcacggggtaccatatcacgctactggcctgctgtcattcattaggagagtgaagctcagcaacccgccgagtgctggccccattgtggtgcactgctccgcaggcgcaggccggaccgggtgctacatagtcatcgacattatgttggacatggccgaacgggagggcgtcgtggacatctataactgtgttaaagctctccggtctcggagaattaatatggtgcagacagaggagcagtatatcttcattcacgacgcgattttggaggcgtgtctttgtggcgaaaccgcaatccctgtgtgtgagttcaaggccgcttatttcgacatgattcgtattgactctcagacaaacagttctcacttaaaggacgaatttcagacgctcaattcagtgacaccgcgtctccaggctgaagattgtagcattgcctgcctccctagaaatcatgacaagaatcgctttatggatatgcttcccccagatcgttgtcttccgttcctcattactatcgacggcgagagttcaaactacatcaatgctgcacttatggattcttatcggcagcctgcagcattcattgttactcagtaccctctgcccaatacggttaaagatttctggaggctggtgtacgactacggttgcacctcaattgtgatgctgaacgaagtggacctttcccaaggttgtccgcagtattggcccgaggagggtatgcttaggtatgggcctattcaggtagagtgcatgtcatgctccatggactgcgatgtgattaaccgaatcttccgaatttgtaatctcacgcgccctcaggaaggctaccttatggtccaacagttccagtacctgggctgggcatcgcacagggaagtccccgggagcaagcgctcatttctcaagttgattctacaggtggagaagtggcaggaggaatgtgaggagggcgaagggcgcacaataatccactgcttgaacggaggggggcgcagcggaatgttttgtgccatcgggattgtggtggaaatggtgaaaaggcagaacgtggtcgacgtttttcacgccgtaaaaacactccggaatagcaaacccaacatggtcgaagctccagagcagtacagattttgttatgatgttgccctggagtacttggagtcatcatag

SEQ ID NO: 130956 - DNA, 4323 bp, synthetic construct
  misc_feature 1..4323: note = Description of Artificial Sequence: Synthetic coding sequence
  source 1..4323: mol_type = other DNA
atggacactactgctgcagccgctctgcctgccttcgtggccttactactgctttccccctggcccctccttgggagtgcacagggtcagttcagcgcgggcggctgcaccttcgatgacggccctggggcatgcgactatcatcaggacctctacgatgatttcgagtgggtgcatgtgtctgcccaggagccccattaccttcccccggagatgcctcaagggagttacatgatcgtagacagctccgaccatgaccctggagaaaaagctaggctgcaattaccaactatgaaggagaatgacacacattgtatcgactttagctatctcttgtatagccaaaaagggctgaaccctggtacactgaacatactcgtcagagttaataaaggacccttagctaaccctatatggaatgtcaccggcttcacaggtagagactggttgcgcgcggaactggccgtctccacgttctggccgaacgaataccaggtgatcttcgaagcagaggtctccggtggtagatctggttacatcgcaattgacgacattcaggttctctcatatccctgcgataaaagcccacattttctcaggcttggcgatgtggaggtgaacgctggccagaacgcaaccttccagtgtatcgcaaccgggagagacgccgttcacaataaactgtggctacagagaaggaatggggaggatattcccgtggcccagaccaaaaacattaatcaccgtcggtttgctgcttcctttcgactgcaggaagtgaccaagactgatcaggatttgtaccgctgtgtcacacagtctgagcgcgggtcgggggtgtctaacttcgctcagttaatcgtgagggaacctccccggcccatcgcgccgccccaattattgggcgtaggccctacctaccttttaattcagctgaacgccaattcaatcattggagatggcccaatcatcttaaaagaggtggagtacaggatgacaagtgggtcttggaccgagactcacgctgtaaacgctcccacgtataaactgtggcatctagaccccgacactgagtatgaaatacgtgttctgctgacccgccctggtgagggtggaacgggtctgcccggtccacctttgataaccagaacaaagtgtgccgaacctatgagaacacccaaaacactgaagattgccgagatccaggcacggagaatcgccgtggactgggaaagcctaggctacaacattacccggtgtcacacatttaacgtgactatttgttatcactattttcgcggccacaacgaatcaaaggccgattgcctagacatggaccctaaagccccccagcacgtggtaaatcatctgccaccttacacaaacgtcagcttgaagatgatactaactaatcctgagggcagaaaagaatccgaggagaccataatacagactgacgaagacgtgcccggccctgtccctgtgaaatcgctgcagggcaccagctttgaaaacaaaattttcctgaactggaaggagcccctggaccccaacggaatcatcactcagtatgagatttcgtacagtagcatcaggtcctttgacccagccgtaccagtggctgggcctccacagacagtaagcaatttatggaatagcactcatcacgtgtttatgcacttgcacccgggaaccacgtaccagttttttatcagggccagtaccgtcaaaggattcggaccagccacagcaattaatgtgaccaccaatatttccgctcctacattgccagattacgagggtgtcgacgccagccttaatgagacagccactacgataacagtcctcttgagacctgcgcaggccaagggagcgcccattagcgcataccaaatagtggttgaggagctccaccctcataggacgaaacgcgaggctggcgccatggaatgttaccaggtgcccgtgacataccagaacgccatgtctggcggagccccctattacttcgctgcagagcttccccccggcaatctcccagagccagccccgttcaccgtgggagacaaccgcacttaccaaggcttctggaatcccccactggctccaagaaagggatataatatctattttcaagcgatgagcagtgtggagaaggaaactaaaacccaatgcgtccgaatcgccacaaaggcagctgccactgaggagcctgaagttattccggatcctgctaagcagaccgacagggttgttaaaatcgccggaatatctgccggaatactcgtgtttatcttactgctgctggttgttatcttaattgtaaagaaaagcaagctggccaaaaagaggaaggacgcgatgggtaacactaggcaagaaatgacccatatggtgaacgctatggatagaagttacgccgatcagtcaactctgcacgccgaggatcctctcagtatcacgtttatggaccaacataacttctctccaaggtacgaaaaccactctgccacagcggaatcatccaggctgttggatgtgccacggtatttgtgtgaaggtaccgaaagcccgtaccagactggccagctgcatcccgcaatcagggtggccgacctgttacagcatattaatctgatgaaaacttctgatagttacgggtttaaggaagaatacgagagtttcttcgaagggcagtcggcaagctgggatgtagccaaaaaggatcagaatcgtgccaagaaccggtatggcaatattattgcatatgatcattccagagtgattctacagcctgtggaagacgaccctagttcagattatattaatgccaattacatagacggttatcaacgcccaagccactacatcgcgacacagggacccgtgcatgaaacagtgtacgatttttggagaatgatctggcaggaacaaagtgcctgtatcgtgatggtcaccaacttagtagaagtcggaagggtaaaatgctataagtactggccggatgatactgaggtttatggtgactttaaggtgacatgcgtcgagatggaacccctcgccgaatacgttgtaaggacatttactctggaacggcgaggatataatgaaatccgggaagtgaagcaattccatttcaccggatggcccgatcacggcgtcccataccacgctacaggcctcctttctttcattcgaagggtgaagttatccaaccctccatctgctggcccgatcgtggtacactgcagcgccggagcaggacgcaccggctgctatatagtgatcgacatcatgctcgacatggctgagagggagggcgtggtggacatttataattgtgtgaaggctttgcgatcccgcagaatcaatatggtgcagacagaggagcaatacatcttcattcacgatgcaatcctggaggcatgcttgtgcggagagactgccatccctgtgtgtgagttcaaggcagcatattttgacatgatacgcatcgacagccaaaccaactcctctcatttgaaggacgagttccagaccctgaattctgttaccccccgcctgcaggccgaggattgttcaatcgcctgtctgccccgaaaccatgacaaaaaccgtttcatggacatgctcccaccggatagatgcttgccttttctgatcaccatagatggcgagtccagcaattatattaacgctgccctcatggacagttacaggcagcctgcagcattcatcgtaacacagtaccctctaccaaacaccgttaaggatttctggagactggtgtacgactatggctgtaccagcattgtgatgctcaatgaggtggacctgagtcagggatgcccgcagtactggccagaggaaggtatgttaaggtatggcccaattcaagtggagtgcatgtcttgctccatggactgcgacgtgatcaacaggatctttcggatatgcaaccttacaaggcctcaggagggctacctaatggtgcagcagttccaatacctggggtgggcaagccacagagaggttcctggatcaaaaaggtctttcttaaaacttatcctgcaggtggaaaagtggcaggaagaatgtgaggaaggggaaggcaggacaataatccactgtctgaatggtggcggtaggagcgggatgttctgtgcgattggtattgttgtggagatggttaagaggcagaatgtagtcgacgtgttccatgccgtgaagacgctgcgaaacagtaagcctaatatggtggaggcgcccgaacagtatagattttgctacgacgtggcgctggagtacctggagagctcatag

SEQ ID NO: 130957 - DNA, 4374 bp, synthetic construct
  misc_feature 1..4374: note = Description of Artificial Sequence: Synthetic coding sequence
  source 1..4374: mol_type = other DNA
atggacaccactgccgcggcagctttacccgcattcgtcgcattgctgctcctatcaccctggcccctcctcggcagcgctcagggacagttctccgccggaggctgcaccttcgacgatggtcccggcgcctgtgactaccatcaggatctgtatgacgatttcgagtgggtgcacgtctctgcccaggaaccacactatttaccgcccgaaatgccccagggaagttatatgatcgtcgattcctctgatcatgatccaggagaaaaggcgagattacagttgcctaccatgaaagaaaacgatactcattgtatcgacttttcttatctgttgtacagtcagaaaggcttgaaccctggcactctaaatatcttggtccgtgttaataagggccctctggcaaaccctatctggaacgtgacaggtttcacgggtcgagactggctgcgagcagaactggcagtgtcaacattctggcccaatgagtaccaggtcattttcgaggcggaagtaagcggcggaagatcgggctatatcgcgattgatgatattcaggtcctgagttatccatgcgacaagtcaccccatttcctgcgtttgggcgatgtggaggtgaatgctggccaaaacgccacctttcaatgcatcgcaactgggagggacgccgtccacaacaagctgtggctgcagcgccggaatggtgaagacatacctgttgcccagaccaagaacattaaccatcgacggttcgctgcttcttttcggttgcaggaagtgacaaaaactgaccaggacctgtaccgctgcgtcacacaatccgagaggggatccggcgtgtcgaattttgcccaactgattgtgcgcgagcctccacggcccattgctccacctcagttgttgggtgttgggcctacttatctgttaattcagctgaacgcgaactctatcataggagacggtccaatcattctgaaagaggttgagtacaggatgacaagtggctcttggacagagactcacgcagtgaatgccccaacctataaactctggcatctcgaccccgataccgaatacgaaattagagttctgctgacccgccctggagagggaggcactggactgccagggcccccattgatcacacggacaaagtgtgccgagccaatgaggactccgaagaccttgaaaatcgccgagatccaagccaggcggatcgctgttgactgggagtctctagggtataacataactcgctgccacactttcaatgtgaccatttgttaccattattttcgcggccacaacgagtctaaggctgactgcttagatatggaccccaaggcccctcagcacgtggtaaaccacctcccaccatacaccaatgtgtccttaaagatgatcctgacaaaccccgaagggcggaaagagtccgaggagacaatcattcaaacagatgaggatgtgcctggacctgtgcccgttaagagtcttcaagggacaagcttcgagaataagattttcctgaactggaaagagcctcttgatccaaacggcatcatcacacagtacgagatcagctattcatccatccgctctttcgacccagccgtgcccgtggccgggccaccacagaccgtcagtaatctgtggaattcaactcatcatgtctttatgcacctgcaccctgggaccacgtaccagtttttcatccgagcatcaactgttaagggcttcggacccgctacagctatcaacgtgacaaccaacatcagcgctccaacgctgccagattacgagggggtcgacgctagtctgaacgaaactgcaactacaattaccgttctcctgaggccagcccaagcgaaaggcgctcccatatcagcctatcaaattgtagtggaagaactccatccacaccgcactaaaagagaagctggagccatggagtgctaccaggtgcctgtgacataccagaacgccatgagcgggggggccccttactactttgctgcagagctcccccccggcaatctgcctgaacccgctcccttcaccgtgggtgacaaccgcacctaccaaggcttctggaaccctcctctggctcccagaaagggttataatatttactttcaagccatgagctctgttgagaaggaaactaagacacaatgcgtcaggattgctacaaaggcggcggcaaccgaggaaccagaggtgattccggaccccgccaaacagacggatcgcgtcgtaaagattgccggaattagtgcggggatactagtctttatccttttgctgctggttgtcattttaattgtgaaaaagagcaagcttgccaaaaaacggaaggacgcaatgggaaatacccgacaggaaatgactcatatggtgaacgcaatggataggtcttatgcagatcaatcaacattgcatgctgaggaccctctatcaattacattcatggaccagcacaacttttcccccagactccccaatgaccctttggtgcccaccgccgtgctcgatgaaaaccactctgccaccgctgaatcatcacgtctgcttgatgtgccaagatatctttgcgaaggtacggaaagtccttaccaaaccgggcaactccacccagctattagagtggccgatcttttacagcacattaacttgatgaagacgtcggacagctacggcttcaaggaagagtacgagtcattttttgaggggcagtcagctagctgggacgtggctaaaaaggatcagaacagggccaagaatcggtacgggaatattatcgcctatgaccacagcagggtcatcctgcagcctgtggaggacgacccgagttctgactacatcaacgccaactacatcgatgtgtccatattcatcggctatcagcgcccttctcactatatagccacgcagggccccgtgcacgaaaccgtctacgacttttggcgtatgatctggcaggaacagtctgcctgtattgttatggtcaccaatctggtcgaagtcgggcgcgtgaaatgttataaatactggcccgacgacaccgaagtctatggggacttcaaggtgacttgcgtcgagatggagcccctcgccgagtatgttgttcggacgttcactttggaacgcagaggatataatgaaatacgggaagtaaaacagttccattttactgggtggcctgatcatggagtgccataccacgcgacggggttattgtcctttattcgacgggtaaagctgtccaatcctccttctgctgggccaatcgtggtgcattgttcagccggggccggacgaaccgggtgctatatcgtcatcgacataatgctggatatggctgagagggaaggagtcgtggatatttataattgcgtcaaggctttgcggtcacgtcggatcaatatggtgcagacggaagaacaatacatttttatccacgacgccattctggaagcctgtctatgtggcgagaccgcgatccccgtttgcgagttcaaggcggcttactttgatatgatccgtattgacagtcaaactaactcatctcacttgaaggatgagttccagaccttgaacagcgtgacaccccggctccaggctgaagactgcagcatcgcctgcctgccacgaaatcatgacaaaaatcgttttatggacatgctgcccccagaccgatgtcttcctttcttgatcacgatcgacggtgaatcttcgaactatataaacgcagctctgatggacagctatcgacaacctgctgcttttatcgtgacgcagtatcccctccccaacaccgttaaggacttctggagactggtgtacgattacggttgcacaagtattgtcatgctcaatgaggtagacctatctcagggttgtccacagtactggcccgaagaagggatgttgcggtatgggcctattcaggttgaatgtatgtcatgctccatggattgcgacgtgataaatcgaatatttcgaatatgtaatctgactcgaccgcaggaggggtatctaatggtgcaacagttccagtacctgggctgggccagtcaccgggaggtccccggatctaaaaggagcttcctgaaactgatccttcaagtcgaaaagtggcaggaggagtgcgaggagggggaagggagaacaattatacattgccttaacggggggggccgcagcggcatgttctgtgcgattgggattgtggtagaaatggttaagagacaaaacgtggtggacgtgtttcacgcagtcaagaccctgaggaatagcaagccgaacatggtggaggcccccgaacagtatcggttttgctatgacgtcgccttggaatacctggaatcctcgtag

SEQ ID NO: 130958 - DNA, 2244 bp, synthetic construct
  misc_feature 1..2244: note = Description of Artificial Sequence: Synthetic coding sequence
  source 1..2244: mol_type = other DNA
atgacactgaacggttgcatgcttgtattaaagtccctgattatctatcacccccgttgtcccaaagtgatatttgaggctgaggtttctggcggtagatccgggtatattgctatcgacgatattcaagtcctgtcctatccctgtgataaatctccgcactttctcagactgggagacgtggaggtgaacgcgggccagaacgcgactttccagtgcatagccacgggtcgcgacgccgttcataataaattatggctccagcggaggaacggggaggatataccagtcgcccagaccaagaacatcaatcatcggagattcgctgcctccttcaggcttcaggaggttactaagacagatcaggatctatacaggtgtgtcacacagagcgagcgcggcagcggagtctcaaatttcgcgcagttaattgtcagggaacctccccgcccgatcgctccccctcagctgttgggggtgggacccacatatctgctaatccagctgaacgctaactccatcatcggcgacggacctattatcctgaaagaggtggagtaccgtatgactagtggctcctggacagagacacatgcggtgaatgctcctacctataagctgtggcatctcgacccagacactgaatacgagatccgggtccttctgacacgcccaggagaggggggtaccgggctccccggcccaccccttattactagaacaaaatgcgctgagcctatgaggacaccgaagacactgaagatcgcggaaatacaggctcgacgaattgctgtggattgggaaagcctgggctataatatcaccaggtgccatactttcaacgttaccatctgctaccattactttcggggacataatgagagcaaagcggactgtctggatatggatcccaaagccccgcaacacgtcgtgaaccacctcccaccttacaccaacgtgtcacttaagatgatattaaccaatcccgaaggacgcaaggagtctgaggagaccatcatccaaacagacgaggacgtacctggtccggtgcctgtgaagtctctccagggtacctccttcgagaataaaatattcctgaattggaaagaacctctggaccctaacggtatcatcacacagtacgaaatatcttattcatctatcaggagcttcgatcccgcagtacccgtagccgggccacctcagaccgtctcaaatctttggaattccactcaccacgtctttatgcatttgcacccagggactacctaccagtttttcattcgggcgtccactgtgaaagggtttggccccgcaaccgctataaatgtgacaactaacatttctgctcctacactgcccgactacgagggagtagacgcatctctgaacgagacagctacaactattactgttctgctgaggcccgcgcaggccaaaggggctcccatttctgcttaccagatagtagtggaggaactccatcctcatcggacgaaaagggaggccggagcaatggaatgctatcaggtgcctgtcacctaccagaatgctatgagtggcggggctccatactatttcgctgccgaacttccccctggtaacctgcccgaacctgcaccctttacggtgggcgacaaccgtacgtaccagggcttttggaaccctccactcgctccccggaaagggtacaatatttattttcaggccatgtcgagtgtggagaaagagaccaagacccaatgtgtgcgcattgctacaaaggctgcagctacagaggagcctgaggtaattccagacccagccaagcagacagaccgggtcgtgaaaattgcgggcatcagcgcagggattttggtgttcatcttgttgctcctggttgtcatcttgattgtgaaaaagaggtacatctgttggcgacggcacatatgcattagaaatatccggcggtcttattattcttatagttattacctcaagctggcgaaaaagcgaaaggatgccatgggaaacacgaggcaggaaatgacacatatggttaacgctatggaccggtcatacgctgatcagagtaccttgcacgccgaagatcccctgtccattacctttatggatcagcataatttttctcctcgcctccctaacgacccacttgtacccaccgcagtcctcgtgccgagcccaggaaggaagaatgtttaccacggggataataattcattctttgccattagctacctctag

SEQ ID NO: 130959 - DNA, 4389 bp, synthetic construct
  misc_feature 1..4389: note = Description of Artificial Sequence: Synthetic coding sequence
  source 1..4389: mol_type = other DNA
atggacaccactgccgccgcagctctccccgccttcgtggctctcttgctactgtcgccatggccccttttaggtagtgcacagggtcaatttagcgcaggcggctgcactttcgacgacggaccaggagcgtgcgattatcaccaagacctgtacgacgatttcgaatgggttcatgttagcgcccaggaacctcattaccttccccctgaaatgccccaagggtcttatatgatagtcgacagtagcgatcatgacccgggagaaaaggccagattgcagctgcccaccatgaaggagaatgatacccactgcatcgatttctcctacctgctttactcacaaaagggattaaatcccgggacattgaacatattggtacgggtgaataaggggcccctggctaacccaatttggaacgttactggtttcactgggcgagactggctgcgggccgaacttgcagtgagtacattttggccaaatgaatatcaagtgatctttgaggccgaagttagtggaggaagaagcggctacatcgccatcgacgatatccaagtgctctcctatccgtgtgacaaatctccacactttttgcgcttaggagacgtggaagtgaacgctggccagaatgccacatttcagtgtatcgccaccggtagggatgctgtccataataagctgtggcttcaaaggcgcaatggagaggacatccccgttgcccagaccaaaaatatcaatcacaggaggtttgcagcctcatttcggcttcaggaggtgacaaagaccgatcaggatctgtatcggtgcgtgacccagtccgaacggggcagtggggtgtctaacttcgcacaactcatcgtccgtgagccgcctaggcccatcgcccctcctcaactcctcggagtgggacccacctacctcctcatacagttgaacgccaatagcatcatcggcgatggtccaattattctgaaggaagtggagtatagaatgactagcggttcgtggaccgagactcatgcggttaatgcacccacatataaattatggcatctggaccccgacaccgaatacgagattcgcgtcctcttaacccggcctggggaaggtggcaccggcctgcctgggcctccactgatcacccgtacaaaatgtgccgaacccatgcggactcctaaaacactgaagatcgccgagatacaggctaggagaatcgctgtggattgggagagcttaggttacaacatcacccgctgtcacacatttaatgtcactatttgttatcattatttcagagggcacaatgagtccaaggcggattgcttagatatggatccgaaggcccctcagcatgttgtgaaccatctccctccctataccaatgtgtcgcttaagatgattctcaccaatccggaaggccgcaaggagtccgaggaaactatcattcagaccgacgaagatgttcccggcccggtccccgtcaagtccctgcaggggacgtcatttgagaataagatcttcttgaactggaaggaaccacttgatccgaatggaattatcactcagtacgagatatcctattcatccatccgatccttcgaccccgctgtccccgtagcggggcctcctcagaccgtctccaatctgtggaactctactcaccatgtttttatgcacttacatcctggtacaacttaccagtttttcattagggccagtaccgtgaagggctttggcccagctacagccatcaacgttacaactaacataagtgcccctaccctaccagattatgagggcgtggacgccagtttgaatgaaaccgctacaactatcaccgtgcttcttcgaccagctcaagccaagggggcccccatttccgcctaccagattgtcgtggaagaactccatcctcatcgaacgaagcgggaagcaggcgccatggaatgttaccaggtcccagtgacttatcagaatgcgatgagcggaggcgctccctattattttgcagcagagctcccacccggaaatcttccggagcctgctccttttaccgtgggggataataggacttaccagggattttggaaccctcctctggcccccaggaaaggttacaacatctactttcaggcgatgtcgtctgtggagaaggagacgaaaacacaatgtgtgagaattgctactaaagccgcagccacggaggagccggaggttatccctgatcctgccaagcagaccgaccgagtcgtgaagattgctggcataagcgctggtatactagtgtttatcctcctgttgcttgtcgtaatcctgattgtgaagaagagtaaactggcaaagaagagaaaagacgctatgggcaacactagacaggaaatgacccatatggtgaacgcgatggatagatcctacgcagatcaatctacattgcacgctgaggatccactgtctatcaccttcatggatcagcacaacttctcaccccgattgccaaacgatccgctcgtgccaaccgctgtccttgtgccgataacagatgaaaatcacagcgccactgcagaatcctcccgcctcctggacgtgcctcgatatctgtgtgaaggaaccgagtccccgtaccagaccgggcagttacatccggctatacgcgtcgccgacctgctgcaacacatcaacctgatgaagacttccgattcatacggttttaaagaagagtatgagagtttctttgaaggacagtccgcatcctgggatgttgctaagaaggatcaaaaccgagctaagaatagatatggcaatatcatcgcctacgaccattcaagagtgatattacagcccgtagaagacgacccttccagtgactacatcaatgccaactatatcgatatctggctgtacagagatgggtaccaaaggcccagccattatattgccacccaaggccccgtgcatgaaacagtctatgacttctggcggatgatatggcaggaacagtcagcgtgcatcgttatggtgactaatttagttgaggtcgggcgagtgaagtgttataagtactggcccgacgacactgaggtgtatggagacttcaaggtgacatgtgtagagatggaaccccttgcggaatacgtggttaggaccttcacgttggaaagacggggatataatgagatcagagaggtgaagcagttccattttacaggatggccggaccatggtgtgccttaccacgccactggattgctgtcatttatccgacgcgtgaagctaagcaatcccccaagtgccggcccaatcgttgtgcattgctcagcgggagccggccgcacagggtgttacattgtcatcgatatcatgctcgacatggctgagcgcgagggcgtcgttgatatatacaactgcgtgaaggcattgagaagcaggcggatcaatatggtgcagaccgaggagcagtacatctttatccatgatgccatcctggaagcctgcctgtgcggggaaacagctatacctgtatgcgaattcaaagccgcctattttgatatgattcggatcgatagtcagaccaatagcagccacctgaaggatgagtttcagactctgaactccgtcacacccagactgcaggctgaagattgcagcatcgcctgtctgcctcgaaatcatgacaagaatagatttatggatatgttgccacccgatcgctgtcttccctttctcatcaccatagacggcgagtccagtaattacatcaacgctgccttgatggatagctatagacagcccgccgccttcatcgtcacccaatatcccctgccaaacactgtgaaagacttctggagacttgtctatgattatggttgcacctcaatcgttatgttgaacgaggtggacctgtctcaaggatgcccacagtactggcctgaagaagggatgctaagatacggaccaatccaggttgagtgtatgtcctgttcgatggattgcgatgtgattaatagaatctttagaatatgcaatttgacaaggccacaggaaggatatctgatggttcaacagtttcagtacctcgggtgggcctcgcaccgtgaggttcccggcagcaaacggtcctttctgaagctgatcctgcaagtcgagaagtggcaagaggaatgtgaggagggtgaggggagaacaattattcactgtctgaacgggggtggccgatccggtatgttttgtgctattggcattgtcgtggagatggttaaaagacagaacgtggtggatgtctttcacgctgtaaaaactctgaggaactctaagcccaacatggttgaggccccagaacagtatcgcttctgctacgatgtggcgctggagtatctggagagctcctag

SEQ ID NO: 130960 - DNA, 4359 bp, synthetic construct
  misc_feature 1..4359: note = Description of Artificial Sequence: Synthetic coding sequence
  source 1..4359: mol_type = other DNA
atgcgcggactgggtacgtgtttggccaccctcgctgggctcctactaaccgcagctggagagacatttagtggaggctgtctcttcgacgagccctactcaacatgtgggtatagtcagtctgaaggggacgattttaactgggagcaagtgaataccttgaccaagccaacatccgacccctggatgcccagcggttcctttatgctggtgaatgcatcaggacgccccgagggacagagagcccacctcctacttccacagctgaaggaaaacgatacgcattgcatagatttccattatttcgtgagctccaaaagcaattcgcctcctgggctccttaatgtatatgttaaggtcaacaatggcccgttaggaaacccaatttggaacatctctggcgaccctacacggacgtggaaccgcgctgaactggccatcagtaccttctggcctaatttttatcaggtgatatttgaggtcattacctccgggcatcagggctaccttgccattgacgaggtgaaggttctcggtcatccctgcactagaacccctcacttcctcaggattcagaatgtcgaagtcaacgctgggcagttcgccacattccaatgctccgctattggcagaacagtggctggggatcggctctggcttcagggcatcgatgtacgggacgcacccctcaaggaaatcaaggtgaccagtagccgcaggttcattgcatcctttaatgtcgtgaatacaactaagagagatgctgggaaataccgctgtatgattagaacagagggtggcgttggaattagtaattacgccgagctggtggtcaaagagccgccagttcccatcgcgcctccacagctggcctccgttggtgcaacctacctttggatccaactgaatgccaattctattaatggcgatggcccaattgtggcacgcgaggtggagtactgcacagcttctggaagctggaatgacaggcaacctgtggatagcaccagctataaaattggtcaccttgaccccgatacagagtacgagatttccgtgctgctaactcgacctggcgaaggcggtaccgggtcccccggccccgcgttgagaacaagaacaaaatgtgctgaccccatgcgagggccgcggaaactggaggtggtcgaggtcaagagcaggcaaataactattcggtgggaaccgttcggatacaatgtgacgaggtgtcattcctataacctgacggtccactactgctatcaagttggcggccaagaacaggttcgcgaagaggtttcctgggacaccgagaactctcacccacaacacacgataacaaacttgtcaccttacaccaatgtgtcagtcaagctgatcctcatgaatccagaaggtaggaaagaatctcaggagctgatcgtccaaacagacgaagacctgcccggcgccgttcctaccgaatctattcagggctcgactttcgaagagaaaattttcctgcagtggcgggagccaacacagacctacggagtgatcaccctgtatgaaatcacatacaaagcagtgtcatctttcgatcctgagatagatctgagtaaccaatccggaagggtatccaaattgggaaatgagacgcatttcctcttcttcggattgtaccctgggacaacttactccttcactattcgtgctagcacagcaaaggggttcggcccccctgccacaaaccagtttactacgaagatcagcgccccaagcatgcctgcgtatgagctggagacacctctcaatcagactgacaatactgtgaccgtgatgcttaagccagcacactcgcgtggcgcccccgtctctgtttaccagatagtggtggaggaagaacggccacgccgcactaaaaaaacaacagagatattaaagtgctatccagtgccaattcatttccagaatgcaagtctgcttaactcacagtattacttcgctgcagaatttcccgcagattcgctgcaggctgcccagccattcactattggggacaacaaaacatacaacggatattggaacacccctctgctgccctataagagctatcggatttactttcaggctgcatctagagctaacggtgagacaaaaatcgactgcgttcaggtggcgactaaaggtgccgctactccgaaaccggtgccagagcctgagaagcagactgaccacactgtcaaaatcgccggggtgatcgctgggattttacttttcgtgatcatatttcttggcgtggtcctggtaatgaagaagcggaagcttgccaagaagcgaaaagagacgatgtcatcgactagacaggaaatgactgtcatggtcaactcgatggacaagtcatacgccgaacagggaactaattgcgatgaagccttcagttttatggacacccacaaccttaatggcaggtcagtttcctcaccaagctctttcaccatgaagaccaatactctgagtaccagtgttcctaactcatactatcccgacgagactcacacgatggcatcggacacctcctcccttgtacagtcccatacatataagaaaagggagcctgcagatgtgccctaccaaacaggacaacttcatccagccatcagagtggcagacctgctccagcatattacacagatgaaatgcgccgaggggtacggtttcaaggaggaatatgagagcttcttcgaggggcaatccgcgccatgggattcagctaagaaagatgagaataggatgaagaacagatacgggaacatcattgcctatgatcactccagagttaggctgcagaccatcgagggggacaccaattcggattacattaacggcaactacatcgacggataccaccgacctaaccactacattgccacgcagggccccatgcaggagactatctatgacttctggcgaatggtgtggcatgagaacaccgcaagcatcatcatggtaacaaacctggtggaagtgggccgtgtgaagtgctgcaaatattggcctgacgacaccgagatttacaaagacattaaggtaaccctcatcgagaccgaactgctggccgaatacgtgattaggacatttgctgttgagaaacgcggtgtgcacgaaattcgggagatcaggcagttccacttcacaggatggcccgaccatggtgtcccttaccacgcgaccggtctgttaggattcgtgaggcaggtgaagagtaagtcacctccatctgccggccctctggtcgtccactgcagtgccggggccggacgaactggttgctttatcgtgattgatatcatgctcgacatggcggaaagggaaggggtggttgacatctataactgcgtgagagaactgcgatcaaggagagtcaatatggtgcaaaccgaggagcaatatgtcttcatacacgatgctattttggaagcatgcctctgtggcgacacttctgttcccgcaagccaggttcggagcctgtactatgatatgaataaactcgatccgcagactaactcatcgcagataaaggaagaatttagaacactaaatatggttaccccaacgctgagggtggaggattgctcaatcgcgcttctacccagaaaccatgaaaaaaacagatgtatggatatccttccaccggatcgttgcctcccctttctgatcacaattgatggcgaaagctcgaactatataaacgccgcgctgatggattcctacaaacaaccttcagctttcatagtgacacagcaccctctgccaaacactgtgaaggacttctggaggctggtcctggactaccattgtaccagcgtggtgatgctgaacgatgtggaccctgcccagctgtgcccacaatactggccagagaatggcgtccaccgtcatggaccaatacaggtagagttcgtgagcgcggatttggaagaggatatcatatctcgtatctttcggatatacaacgctgcaaggcctcaagatggctaccgcatggtccaacagtttcagttcctgggttggccgatgtatcgagatacccctgtcagtaaacggtcgttcctgaaattaattcgtcaagtggacaaatggcaggaagaatacaacggcggcgaagggcgaacagtggtccactgtttgaatgggggaggtcgttccggaacgttctgtgccatttccattgtctgtgagatgttgcgtcatcagaggaccgtggacgtctttcacgccgtgaagactctgagaaataacaaacctaatatggtggacttgctcgaccagtacaaattttgctacgaagtggccctggagtatctgaatagcggctag

SEQ ID NO: 130961 - DNA, 4173 bp, synthetic construct
  misc_feature 1..4173: note = Description of Artificial Sequence: Synthetic coding sequence
  source 1..4173: mol_type = other DNA
atgccgtcaggatccttcatgctggtgaatgctagtggccgaccagagggtcagcgggcccacttgctcctgccccagttaaaggagaacgatacacactgcatcgactttcactactttgtgagctcaaagagcaatagccctccaggtctcctgaacgtctacgtgaaggtgaacaacggaccactagggaatcctatctggaacatatccggggaccccacaaggacctggaatcgagctgaattagctatttccacattctggcccaacttctaccaagtgatttttgaggtcattacaagtggtcatcagggctatctagccatcgacgaggtcaaagtgctgggacacccgtgtacccggaccccccattttctgcggatacaaaacgttgaggtgaatgctggacagtttgccacctttcaatgctccgctatcgggcggaccgttgcgggtgatcgcctgtggctgcaggggattgatgtacgcgacgctcccctcaaagagatcaaggttaccagctctcgcagatttatcgcctcctttaacgtagtcaacaccaccaaacgagacgcaggaaagtacagatgtatgatccggaccgaaggcggcgttgggattagtaattacgccgaattggttgtgaaggagccccccgtcccaattgccccaccccaacttgcctcggttggggccacttacctatggatccaattgaatgctaacagcatcaatggtgatggaccgattgtcgcccgagaggtcgaatattgtaccgcttccggctcatggaatgataggcagcctgtagacagcaccagttacaaaatcgggcacctggaccctgataccgagtacgagatcagcgtgctgctgactaggccgggagaaggcggtactggatctcctggtccagcgctccgcactagaaccaagtgcgctgatcccatgagggggccgcgcaaactagaagtggtagaagtgaaatcacgccagattaccataagatgggaacctttcgggtacaacgtgaccaggtgtcactcttataacttaacggtgcactattgctaccaggtgggcggccaagagcaggtgcgagaggaggtttcttgggacaccgagaacagccacccgcaacacactattacaaatttgagtccttatacaaacgtatctgttaagttgatcctgatgaaccccgagggtaggaaagaatcccaggagctgatcgtccagactgacgaggatctccccggagccgtccccaccgaatcaattcaaggctccacctttgaggaaaaaattttcctacagtggcgtgagcccacacagacatatggagtgatcacactgtatgagattacctataaggcggtgtctagctttgaccccgaaattgatttgtctaaccagtcaggccgagtctccaaattgggtaacgagactcacttcttgttcttcggcctgtatcccggcacgacgtactccttcacaattcgcgcctccacggctaagggttttggtccccctgccacgaaccagttcaccaccaaaatctctgccccatccatgcccgcttatgagctggagactcctttgaaccagacagataacaccgttacagtgatgttaaagcctgcccatagcaggggtgcccccgtgtctgtataccagattgtggtcgaggaggagagaccaaggcggaccaagaaaaccactgagattctgaaatgctacccagttccaatccatttccagaacgcctctttattgaactcgcagtactacttcgcagccgaatttccagccgattccctacaggcagcccaacccttcacaatcggggataacaagacttacaatggctactggaacacacctctgttaccctataaatcgtaccgaatttatttccaggcagcatcccgcgctaacggggagacaaaaattgattgcgtgcaggtggccaccaagggggccgctacccccaagcccgtcccagaaccagaaaagcaaacagatcacactgtgaaaattgcaggcgtgatcgccggcatactcctgtttgtgattattttcctgggagttgtgctggtgatgaagaaaaggaaactggctaagaagaggaaggagacaatgtcgagcacaagacaagaaatgaccgtcatggtgaatagcatggataaatcatatgccgaacaaggcacgaattgcgacgaggctttctcattcatggatacccacaatctcaatggcagatccgtgagctccccatcaagcttcacaatgaaaacaaataccctttcaacctctgttcccaacagctactatccagatgagactcacaccatggcctctgacactagctcccttgtgcaaagccacacctataagaaacgcgagccagcggacgtcccctatcagacgggtcagctgcaccccgcaattagagtggctgaccttcttcaacacatcacacagatgaaatgtgccgagggctatgggttcaaagaggaatatgagtctttctttgagggccaaagcgcaccttgggatagtgccaagaaggatgagaatcgaatgaaaaataggtacgggaacattattgcatatgatcattccagagttagacttcaaaccattgagggagacaccaattctgactatattaatggaaactatattgatgggtatcacagacctaaccactacattgctactcaggggccgatgcaggagactatctacgacttttggaggatggtgtggcatgagaataccgcctcgatcataatggtaaccaatcttgtcgaggtcggacgcgtgaagtgctgtaaatactggcccgatgatactgaaatctacaaagatatcaaggtcacactgatcgaaaccgagctgctggctgagtatgtgataagaaccttcgccgtcgaaaaacggggagtgcacgaaatccgggagattcgtcaattccacttcacagggtggcccgatcacggggtgccctaccatgcaactggactcttgggttttgtgcgtcaagttaaaagcaaaagccctccctccgcaggtccattggtagttcactgctccgcgggggctgggcgtaccggctgtttcatagtcatcgacataatgctggacatggccgagagagaaggagtagtggacatatacaattgtgttagagaattacgatcaagacgagtcaatatggtgcagacagaagagcagtatgtttttatccatgacgctatcctggaagcctgtctctgtggtgacacctccgttcccgccagccaggtgagatctctgtattacgacatgaacaaactggacccacaaaccaattctagtcagataaaagaagagtttcgaacactgaatatggtaacaccaacactaagagttgaagactgctccatcgccctgctgccacggaaccacgaaaaaaacaggtgtatggacatcctaccccccgacaggtgtctgccctttctgattactattgatggtgaaagctccaactacattaatgcagcactgatggactcgtataaacagccatcagccttcattgtcacacagcatcccttgcccaataccgtgaaggacttttggagactcgtactagattatcattgtaccagcgtagtgatgctgaacgacgtagaccctgcgcagctttgtcctcagtattggcctgagaacggtgtccaccggcacggacccatccaggtcgagttcgtctcggccgatctggaggaagacattatctcaagaatctttcggatctacaacgccgctcgcccacaagatggataccggatggtgcagcagtttcaatttctcggctggccaatgtatcgcgacactccggtttctaagcgcagtttcctgaaactgattcgacaggtggataaatggcaggaagagtacaatgggggcgagggtaggaccgtcgtccactgtttgaacggaggcggcagatccgggaccttctgcgcaatatccatcgtctgcgaaatgctgaggcaccagcggaccgtggatgtcttccacgctgtgaagacactgcgcaacaataagcccaatatggtggatctcctggatcagtacaaattctgttatgaggtcgccttggaatacctaaatagcggatag

SEQ ID NO: 130962 - DNA, 4401 bp, synthetic construct
  misc_feature 1..4401: note = Description of Artificial Sequence: Synthetic coding sequence
  source 1..4401: mol_type = other DNA
atgcgtggactcgggacatgcctcgccacgttagccggcctgctgttgaccgccgcaggagagaccttctcaggcggatgtctgttcgacgaaccatatagtacttgtgggtactcacagagtgaaggcgacgactttaattgggagcaggtaaacaccctcacaaagcccacttccgacccctggatgccttctggctcttttatgctcgtcaatgcttcagggaggcctgagggccagagggctcacttgcttttgcctcaactgaaggaaaatgatacccactgcatcgacttccattacttcgtgagcagtaagtccaatagcccaccagggctgttgaacgtttatgtgaaagttaacaatggaccccttggcaatccaatctggaatatcagcggcgaccctacccgtacgtggaatagagcagaactggcaatttcgacattttggcctaacttctatcaggtgattttcgaggtaatcacatcgggccaccaagggtatcttgctatcgatgaggttaaagtgctcgggcacccttgtaccagaacacctcatttcttacgcatacagaatgtcgaggtcaacgccggacagttcgccacctttcagtgttctgccatcgggcggaccgtggccggtgaccgcctgtggttacagggcattgatgtcagagacgcacctttgaaagaaattaaggtgacatccagccggcgcttcatcgcgtctttcaatgtggtgaatacaactaaacgggacgccggcaaatatcggtgcatgattcgtactgaagggggggtggggatctctaattacgcggaactcgttgtcaaggagccccccgtaccaatagcaccgcctcagcttgcttcagtcggagccacttatctttggatccagctgaacgccaatagcatcaatggtgacggacccatagtcgctagagaggtggagtactgtactgctagtggaagctggaatgataggcagcctgtggattctaccagctacaagatcggccatttggaccccgacaccgagtatgagattagtgtgcttctgaccagacctggagaaggaggcaccgggagcccaggaccggcactccggaccagaactaagtgcgctgatcccatgagggggccgagaaagcttgaggttgtggaggttaaatctcgtcagatcaccatccgctgggagcctttcggctacaatgtgactaggtgccacagttataaccttactgttcactattgctatcaagtcggaggccaggaacaggttagggaagaagtaagttgggatactgagaactcccacccacagcatacaatcacaaacctctctccttacacaaacgtatccgttaaactcatcctcatgaaccctgaaggaagaaaagagagccaggaactaatcgtacagacagatgaggacttgccgggcgcagttcctactgagagcattcaaggcagcacgttcgaggaaaagattttcctgcagtggcgcgagccgacacagacctatggagttattactctgtacgagattacgtacaaagccgtgtcctcctttgacccggaaatcgatcttagcaatcagtctggaagagtttcaaaacttgggaacgagacgcacttcctatttttcggtctgtatcccggaacaacatatagcttcacaatcagggcaagtacagccaagggatttgggccccccgctaccaaccagtttacaaccaagatctctgctccctctatgccggcctatgaactggagacccccctgaatcaaacagataacacggtgacagtgatgctgaaaccagcccacagtagaggcgccccagtctcggtttaccagattgtcgttgaggaggagcgccctcgacggactaaaaagactaccgaaattctcaaatgctaccctgtgcctattcacttccaaaatgcctcacttttgaactctcagtactattttgctgctgagtttccggcggattctctgcaggctgcacaacccttcactatcggcgataacaaaacttacaacggttactggaacacacctctgcttccctataaatcctatcgcatttactttcaggctgcctcccgcgcaaacggggagactaaaatcgactgcgtgcaggtagcgacaaaaggagccgcgacacctaagcccgtgccagagcctgaaaagcagacagatcacactgtgaagattgctggtgtcatcgctggaatcttgctgttcgtgatcatcttcttaggcgttgtgctggtcatgaaaaagcggaagttagccaagaagcgcaaagaaacaatgagcagtacccgacaggagatgactgtcatggttaactcaatggataagagttacgcagagcagggaactaattgtgacgaggcattctcatttatggacacacataaccttaacgggagatctgtcagctctccatccagttttacgatgaagaccaatacgttgtccacctccgttcctaatagctattatccggacccattcgtgccaactgcgatactcgacttttctctgaacaatgagacccataccatggcttctgacacttctagcctggtccagtctcacacctacaaaaaacgggaacccgccgatgttccctaccagactgggcagctacaccccgcaatcagagtggccgacttgttgcaacacattactcagatgaaatgcgccgagggctacggcttcaaagaggaatatgagtcattctttgagggtcagagcgccccctgggatagcgctaaaaaggacgaaaacaggatgaaaaatcgctatggcaatattattgcctacgatcactcccgggtgagactgcagacgattgaaggcgataccaatagcgactacatcaacggcaactacattgacggatatcaccggcccaaccattacattgctactcagggacccatgcaagaaacaatatacgacttctggaggatggtttggcatgagaatacagcgtccattattatggtgacaaacctggtcgaggtcggcagggtgaaatgctgcaagtattggcccgatgataccgaaatctataaagatattaaggtgacgctcatcgagacagagctgttagcggaatatgtgattcgcaccttcgccgtggagaaacgcggagtccacgaaatccgagaaatacgacagttccacttcacggggtggcctgatcacggagtgccctaccatgctacaggactgctagggtttgtgagacaggtaaagtccaaatcacctccttccgccggaccgttggtcgtgcactgtagcgcgggcgccgggagaactggctgcttcatagtgatcgacattatgttagacatggcagagcgggagggtgtcgtggacatctataattgtgtgcgcgagttaagaagtcgacgggtgaacatggtgcagacagaagagcaatatgtgttcattcacgatgccatattggaggcttgcctttgtggtgacacatctgtgcctgctagtcaggttaggtcactctattacgacatgaataagctggacccccagactaactcaagccaaattaaggaggagttcaggacgctgaacatggtcaccccaacactgcgggtggaggattgctctattgctcttctcccacggaatcatgagaagaacaggtgcatggatatcctgcccccagacagatgcctccccttcttgatcaccatcgatggggagtcctcaaactacattaacgcagccctcatggactcttacaaacaacctagtgctttcatagtcacacagcatcccctgcccaatacagtgaaagatttctggcggctagtgctggattatcattgtaccagcgtcgtgatgctaaatgacgtcgaccccgcacagctgtgcccccagtactggccggaaaatggagtgcaccgtcatgggcctatccaggtcgagtttgtatccgccgacctggaagaggacattattagtaggattttcagaatttataatgctgctcgccctcaggatgggtaccgcatggtacagcagttccaattcctggggtggccgatgtaccgagacacacccgtgtcgaaacgaagtttcttgaagcttatacggcaggtggacaaatggcaggaagagtataacggcggtgagggacggaccgtcgtgcattgtcttaatggtggaggccggtccggcaccttctgtgccatctccattgtgtgtgagatgctgcgtcatcagagaaccgtcgacgtcttccatgccgtgaagacactgagaaataataaacctaatatggtggacttattggatcaatacaagttttgctatgaggttgcgctggagtatctgaattccgggtag

SEQ ID NO: 130963 - DNA, 3720 bp, synthetic construct
  misc_feature 1..3720: note = Description of Artificial Sequence: Synthetic coding sequence
  source 1..3720: mol_type = other DNA
atgggtaccctgagtttgcatcccggaattgacgtccgtgacgccccccttaaggagattaaggtgacctcatctcgcaggttcatcgccagctttaatgtcgtgaacacgacaaaaagggatgctggcaagtacaggtgtatgatcaggaccgagggtggggtcggcatctccaattacgccgaactagttgtgaaggaacctcccgtgcccatcgcaccgccgcagctcgcttctgtcggagccacttacctttggatccagctgaatgccaattccatcaatggcgatggccctattgtggcaagggaggtcgagtactgcacagcgagcggcagctggaacgacagacaaccagtggatagtacatcatataagatcggccacctagacccggataccgaatacgaaatatctgttctgttgacaagacctggtgaaggtggaactggctctccaggccctgccctaaggaccagaacaaaatgtgcagatcccatgcgcggacctaggaagttggaggtagttgaagtcaagtcccggcaaatcactatccggtgggagccattcggatataatgtgactcgatgccactcttacaacctgactgtgcattactgttaccaagttggcggccaggaacaggtgcgcgaggaggtgtcttgggataccgagaatagtcatccgcagcacaccattactaacctctcaccctacaccaacgtatcagtgaagcttatactgatgaatcccgaagggcgtaaagagagccaggagcttattgtccaaacagatgaggacctgccgggcgccgtccctaccgaatccatccagggctctacatttgaggagaagatcttcctgcagtggcgtgagcccacacagacatatggagtgataacactgtacgagattacttataaggccgtctcttcgtttgacccagaaatcgacctgtctaaccagagcgggcgcgtgtcaaaactcgggaatgaaacccacttcctgttttttggactctatcctggcactacatactctttcaccatcagagccagcacagcaaagggcttcggacccccagccaccaatcagttcactaccaagataagcgcacccagtatgcccgcctacgagttagaaactcctctcaaccaaaccgacaacaccgtgaccgtgatgctgaaaccagcccactctcgcggtgcacctgtttctgtgtatcagattgtggtggaagaggagcgcccacgccgaacaaagaagacaacagagatccttaagtgctatccagtacccatccactttcaaaatgcctccctactgaacagccagtactacttcgcagctgagtttccagcagacagtttacaagctgcccagccattcaccataggcgataataagacttataacggatactggaacacaccattgctgccctacaaatcataccgcatctatttccaggccgcctcaagggcaaacggggagacaaaaattgattgtgtccaagtggccaccaagggagcagcgacccccaagcctgtaccagagcccgaaaaacagaccgatcataccgtgaaaatcgcgggagtaattgccggtatcttgctttttgtcataatcttcctcggagtggtgctggttatgaagaaaagaaagttggcaaaaaagagaaaagaaacaatgtcaagcacacggcaggaaatgacagtgatggtgaattcaatggacaagagttatgctgagcagggtacaaactgcgatgaagccttctcttttatggacacccacaacctgaatggcagatccgtttcctcaccaagctcgttcactatgaagactaatacactgtctacttcggtgcccaatagttactatccagatgagacccacacgatggcgtctgatacttcgagcctggtgcagagccatacatataagaagagagagcccgcagacgtcccctaccagactggacaattacaccctgctattagagtcgcagatctcctgcagcatattacccagatgaagtgtgccgaggggtatggtttcaaggaggaatatgaaagctttttcgaaggacagagcgctccctgggactccgccaaaaaagacgaaaacaggatgaaaaatcgatatggaaatatcatcgcttacgaccacagcagagtccgcctacagacgatcgagggtgacactaattccgattacattaacggcaattacatcgatggatatcatcggccaaatcactacatagctacgcagggacccatgcaggagacgatctatgacttctggcgcatggtttggcatgagaacactgcctcaattatcatggtgaccaacctcgtggaagtgggaagagtgaagtgttgcaaatactggcctgacgacaccgagatctataaggacatcaaggtgaccctgattgaaaccgaacttttagccgaatacgttattcggacattcgcagtcgagaaacggggcgtccacgaaatcagggagatccgccagtttcattttacgggttggcctgatcatggcgtaccataccacgcgaccgggctgctgggattcgtcaggcaggtgaagtccaagagtcctccttcagccgggccactcgttgtgcattgctcggccggcgctggtagaactgggtgtttcatcgtgattgatatcatgctcgacatggcggagcgagagggtgttgtcgacatttacaattgcgttcgagagctgcgatcccgtagagttaatatggtacagactgaagaacagtacgtcttcattcatgacgcaattctcgaggcctgtctgtgtggagatacatctgtacccgcctcccaggttaggtccctgtactacgacatgaacaaactcgacccccagacgaatagctcacagatcaaggaggaattcagaaccctcaatatggtgacaccaacgctgagggtcgaagactgctccattgctctactgcctcggaaccacgagaaaaatcgctgtatggacattctgccccccgatcggtgcctccctttcttgataacgattgatggagagtccagcaattacatcaatgctgctctaatggattcctataaacaaccaagtgcctttatagtgacccagcatccactgccaaacactgtgaaggacttttggaggttagtgttggattatcactgtacctccgtggtaatgttaaacgacgtcgacccagcacaactctgcccacagtactggcccgagaacggggtgcatagacacggccctatccaagtcgaattcgtgagcgccgatctagaggaggatattatttcccggattttccgcatttacaacgccgcccgtccacaggacggctatcggatggtgcaacaattccagttcctcggttggcctatgtatcgagatactcccgtcagcaaaaggtctttcctgaagctcatcagacaagtggataagtggcaggaagagtataatggtggcgaaggccggactgtcgtccattgcttaaacggaggaggaaggagcggcactttctgtgccattagtattgtgtgcgagatgctgcgtcatcagcggaccgtcgatgtgttccacgcggtcaaaacactgagaaataataagccgaatatggtggatctgctcgaccagtacaagttctgctacgaagttgccctggagtacctcaactcgggctag

SEQ ID NO: 130964 - DNA, 2940 bp, synthetic construct
  misc_feature 1..2940: note = Description of Artificial Sequence: Synthetic coding sequence
  source 1..2940: mol_type = other DNA
atgagaaggccgcgaaggcctgggggcctggggggcagcgggggcctccgtttactcctctgtttgctgctgctgagctccagacctgggggatgcagcgctgtcagcgcacacgggtgtctgtttgacaggcggctgtgcagccacctcgaagtctgcatccaggatggcctctttggccaatgtcaggtgggagtggggcaggcaagacctttgcttcaggtgacctcccctgtactgcagcgtctgcagggggtgttaaggcagctgatgagtcaggggctgagttggcatgatgacttgacccagtacgtgataagccaggaaatggaaagaatacctcgactccgtccaccagagccacgcccacgcgacaggagcggccttgcacccaagaggcctggacccgccggagaacttctgcttcaggatatacccacaggttctgctccagcagcgcagcaccgtctccctcaacctccagtgggcaaagggggtgcaggggcctcttctagcctttccccactccaggccgagctgctgccacccctactagaacacttgctgctgccaccacagcctccgcatccttcactctcttacgagcctgccctcctgcagccttacttgtttcaccagtttggctctcgcgatggctctcgggtttccgaaggatcacctgggatggtttctgttggccctctgccaaaggccgaagcccctgcgctcttcagccgcacagcaagcaaggggattttcggggaccatcccggccactcttacggggaccttcccggtccttcccctgcgcagctatttcaagatagtgggctgctttaccttgcccaggaacttccagccccctcccgcgctagagtgccacgtctccctgagcaggggtcgagctcacgggccgaggatagccccgaggggtacgagaaagagggactgggcgacaggggagaaaagcctgcttcccctgccgtgcagcctgatgctgctctccagagactcgctgctgttctagcaggatatggcgtggagctgaggcagctcacacctgaacagctttcgactttgctgacgttattgcagctgctgccgaaaggcgctggaaggaatcccgggggtgttgtgaacgtgggggctgatatcaagaagactatggaaggccccgtggaaggccgggatacagccgagcttcctgccagaacttccccaatgccggggcatccgaccgctagtcccacgtcttcggaggtccagcaggtgccctctccggtgtcttccgagccaccaaaagctgctcgccccccggtgactccggtgctgctggaaaagaaatctccgctcggccagagtcagcccacagtggccggacagccaagcgcgaggcctgctgccgaggaatacggatacatagtgaccgaccaaaagcccctcagcctggccgcaggcgttaagctactggaaattctcgcagaacatgttcacatgagtagcggatccttcatcaacatttccgtggtcggtccagcacttacattccggatcagacataacgaacagaacctctctctagccgatgtgacacaacaggcaggtctggtgaagtcggaactcgaggctcagacagggctgcagattctgcagaccggggtcgggcaacgcgaggaggctgcggctgttctgccacagacggctcacagtaccagtccaatgcgctcggtgctcttgactcttgtagctctcgctggggtggccggactcctcgtggccctggcagtcgccctgtgcgtgaggcaacatgcacgacagcaggacaaagagagattagcagccctcggtccggagggtgcccatggcgatacgacgtttgaatatcaggatctctgtcggcagcatatggctacgaagagcttgtttaacagggctgagggccccccagagccgtcccgcgtttcttcagtgtcaagccaattcagcgatgcagcacaagcatcccctagctcacactcctcaacgccctcttggtgcgaggaaccagcacaggctaacatggacatttccaccggacacatgatacttgcttatatggaagaccacctgaggaaccgggatcgcctggctaaggagtggcaagccttgtgtgcttaccaagcagaacccaacacctgtgctacggcacaaggcgagggcaatattaagaagaacaggcacccggactttttgccgtatgatcatgcacgtatcaaacttaaagttgaaagctccccgtcccggtctgattacatcaacgcttctcctatcattgaacacgacccaagaatgcccgcctacatcgctactcaagggcccctgtctcataccatcgcggatttttggcagatggtatgggagtctgggtgcaccgtgatcgtgatgttgacccccctggtggaagacggggtaaagcagtgtgaccgctactggccagatgagggggccagcctttatcatgtctatgaagtaaacctggtgtcagaacatatatggtgtgaggattttctggtcagatccttctatttgaaaaacgtccagactcaggaaactcgtactctgacccagtttcattttctttcatggcccgccgaaggcactcctgcttccaccagacccctacttgatttccggcgaaaggttaacaaatgttacagaggacgctcctgtcctatcatagtgcactgcagtgacggggcaggacgtactggcacttatattctcatcgatatggtgctcaataggatggcaaaaggcgtcaaagaaattgacatagcagccacgcttgagcacgtgcgcgaccagcggccaggcctggtgcggtctaaagaccagttcgagtttgctctaactgctgttgccgaggaggtcaacgctatactaaaagccctgccgcagtag

SEQ ID NO: 130965 - DNA, 2853 bp, synthetic construct
  misc_feature 1..2853: note = Description of Artificial Sequence: Synthetic coding sequence
  source 1..2853: mol_type = other DNA
atgcgaaggcctcgtcgacccggcggcctgggcggcagtggcggactcagactgcttctgtgtctcctcttactcagcagccgacccggcgggtgttccgcggtgtccgctcatggttgcctgtttgatcgcaggctgtgctcacacttggaagtgtgcatccaggacggtctgttcggtcagtgtcaggttggtgttggacaagccagacctctgttacaggtgacttcacccgtgttgcaaaggctgcagggtgtgctgaggcagctgatgagtcaaggactgagttggcatgatgacctgacccagtacgtgatttcgcaggaaatggaacggataccacgcctcaggccgcctgagccacgtccccgtgacagaagcggtctggcccctaagagaccaggcccagcgggggaactacttctccaggatatacctacaggaagcgcaccagccgcccaacaccggctccctcagcctccagtcggaaagggcggcgccggagcttcttcatctctgagtccactgcaggctgagctcctgccccccttgcttgaacacctgcttttgccaccccaacctccccacccttctttgagttatgagcccgcgctgctgcaaccatacttgttccaccagttcggttctagagacggcagtcgcgtgtcagagggtagcccaggaatggtgtccgtggggcccctaccaaaggccgaagctcctgctcttttttccagaaccgcatctaaaggaatattcggggatcatcccggtcactcatacggggacttgcccggtcctagtcctgcgcagctgttccaagactccggactgctgtatctagcccaggagctgcccgccccatccagagcaagggtgccacgattgcccgagcaggggagctcgagcagagcagaggactcgcctgaaggctacgagaaggagggcttgggtgatcgcggtgaaaaacccgcaagccctgcggtgcagcccgacgccgccctgcaacggctcgcggcagttctggcagggtatggcgtcgagttgaggcagctcacaccagagcagctgtcaactctgctcacgctcttgcaactcctgcccaaaggggccggacggaaccccggcggagtagtgaatgtgggcgcagacataaagaagactatggaagggcctgtggagggaagagatactgccgagttgcccgcacggaccagcccaatgcccggccatccaacggctagcccgactagttcggaggtgcagcaagtgccaagccccgtgagttccgaacccccaaaagcagcgcgtccccccgtaacgccagtgcttctggagaagaaaagtccgctcggccagtcccaacccaccgttgccggccagccatccgcccgccccgccgccgaggaatatggatacattgtcaccgaccagaatgtggttggtcccgcactgacattccgcattagacacaatgaacagaatttgtcacttgccgacgttacccagcaggccggtctcgtgaaaagcgaacttgaggcgcagactggactgcaaattttgcagacaggcgtcggtcagcgggaagaagccgctgcagttctgccgcaaactgcgcactccaccagtcccatgcgcagcgttctgctcaccctcgtcgccctggcaggagttgcaggcctgttagtggctctcgctgtggcactctgcgtcagacagcatgctcggcagcaggataaggaaagacttgctgcactaggaccagagggcgctcacggggacactactttcgagtatcaagacttatgcaggcagcatatggccacaaaaagtcttttcaacagggccgaggggccccccgaaccctcccgggtgtcatccgtcagttctcaattcagcgatgctgctcaggcatctccctcttcccacagcagcaccccctcttggtgcgaagaaccagcacaggccaacatggatatttccacaggccacatgattcttgcgtacatggaggaccacctcagaaatagggaccggctggcgaaagagtggcaagccctatgtgcttaccaggcggagcctaatacatgcgcaactgcccagggggagggcaatatcaagaagaatcgacatccggatttcctcccatacgaccatgcccgtatcaaactgaaagttgagtctagcccttcacgatcagactatataaacgcctcccctatcatcgaacatgatccgcgcatgcccgcatatatcgcgacccagggacctttgtcacatactatcgcagacttctggcaaatggtgtgggagagcgggtgcactgtgatcgtgatgctgacccccttagttgaggacggcgttaaacagtgcgatcgctattggcctgatgaaggcgcttctctgtatcatgtgtacgaagtgaacttggtgagcgaacacatctggtgcgaggactttttggtccgtagcttctaccttaagaatgtgcaaactcaggagactcgaactctgacccagttccattttttgtcctggccagctgagggaacacccgctagcacacggccactcttggatttcagacggaaagtcaacaaatgctaccgagggcgcagctgtccgataatcgtgcattgcagcgatggggccggccggacaggcacatacatactaatcgatatggtgcttaaccgcatggcgaagggcgtcaaggaaatcgatatcgcagcaacactagaacatgtgagagatcaacggccaggcttggtccgatctaaggaccagttcgaatttgcgcttacagccgtcgcagaagaggtcaacgcgattttgaaagctttaccccaatag

SEQ ID NO: 130966 - DNA, 489 bp, synthetic construct
  misc_feature 1..489: note = Description of Artificial Sequence: Synthetic coding sequence
  source 1..489: mol_type = other DNA
atgagacggccaaggcgccccggaggtctaggtggaagtggcggcctccgcctgcttctctgccttctccttcttagttcacggcccggcggctgctctgcagttagcgcccacggttgtctgtttgataggcggctttgctcacacctggaggtgtgtattcaagatggactgtttggacaatgtcaggtaggggtagggcaggctcgcccactgctccaggttaccagcccagtgcttcagcgtctgcagggcgtgttacggcagctcatgtctcaaggattaagttggcacgatgacctgacacagtacgtgatttcccaggagatggagcgaataccgaggctgcggcccccagaaccccgccccagagatcggagtggcttggcgcccaagcgtcccggccctgcaggcgaactcctcttgcaggacatccccacaggctctgctcccgccgcccagctgctctccgtgccttcagcaggttag

SEQ ID NO: 130967 - DNA, 2670 bp, synthetic construct
  misc_feature 1..2670: note = Description of Artificial Sequence: Synthetic coding sequence
  source 1..2670: mol_type = other DNA
atgtcacaggggctgtcttggcacgatgacctgactcaatacgtcatcagccaggagatggagaggattcccagactgcggccccctgaacccagacctagagacagaagcggccttgcacccaaaagacctggcccggcaggggagctcctattgcaggatattcccactggcagcgcccctgccgcgcagcaccgcctgccccagcctcctgtcggaaaggggggggctggagccagcagcagtctcagtcccctacaggcagagcttctgccgccgctgctcgagcacctcctcctgcccccccaacctccacacccatcattgtcctatgagcccgcgctactacagccctatttgttccatcaattcggcagcagagacggatcgagggttagcgagggatcccccggaatggtctccgttggcccactgcccaaggcagaagctccggcactgttctcacgaactgctagcaaaggcatcttcggcgatcaccccggacacagctatggagacttgccaggcccttcccccgcccagctctttcaggacagcgggttactttaccttgcacaggagcttcctgctccgagtcgcgcccgagtcccaagactgcccgagcagggctcctcctccagggcggaggactctcccgagggctatgagaaggaaggactgggggacagaggggaaaaaccagcttctcctgcagtgcagcccgacgccgccctccaacggctggcagctgtgttagccggttacggcgtagagctgcggcagttgacgccagaacagctgtcaacactattgacattgcttcagctgctgccaaaaggggccgggagaaatccgggtggcgttgtgaacgtgggagccgatattaagaaaacaatggaggggccagttgagggtagagataccgcggaactcccagcacggacatctcctatgccggggcatcccacggcttcccccacatcctccgaggtgcaacaggtcccaagtccagtgtccagcgaacctcctaaggctgccagaccccctgtgactccagtactgttagaaaagaagtctccgctcgggcagagccagcccacagttgctggacagccatccgcccgccctgcagccgaggagtacggatatattgtgactgaccagaagcccttaagtctcgctgctggagtaaaattgctggagatacttgctgagcacgtacacatgagctcagggtcatttattaatatttccgtggtgggacccgccctcaccttcaggattcgccacaacgaacagaatcttagcctggcagatgtaactcagcaggctggcctcgtgaagtcagagttagaagcccagacaggattgcaaatcctgcagactggagttggccagcgtgaggaggctgctgctgttcttccgcagactgcacacagcaccagcccaatgagatccgtgctccttactcttgtcgccctggcgggggtcgctgggttgctcgtggcccttgccgttgccctgtgtgtccgccaacacgcacgacagcaggataaagagaggctggccgccctaggccccgagggggcccatggtgacacgacattcgaataccaggatctgtgcaggcaacacatggccaccaagagcctgttcaaccgcgctgaagggccgccagagccgagcagagtctcatcggtgagctcacagttttctgacgccgcgcaggcctccccgtcatcgcatagctccaccccttcctggtgcgaagaaccggcacaggcaaacatggacatttccacgggacacatgatactggcctacatggaagaccatctgcggaaccgcgaccggctggctaaggaatggcaggctctctgcgcatatcaagcggagcccaatacctgcgcgacagctcagggtgaaggcaatatcaagaaaaacagacaccccgactttctaccctatgaccatgcccggattaagctgaaagttgagagcagtccatccagatcagactacatcaacgcttcaccgattatagaacatgacccccgtatgcccgcatatattgccactcagggcccgctgagccacacaatcgcggacttctggcaaatggtatgggagtccgggtgcactgttatagttatgttaacacccctcgttgaggatggcgtgaaacagtgcgataggtattggccagacgaaggcgccagcttgtatcacgtttatgaggtcaatctcgtgtctgagcacatttggtgtgaagatttcctggtgaggagcttttatcttaagaatgttcagacccaggagactagaacactgacacagttccattttctatcctggcccgcagagggaactcctgcttccacaagaccgttactggacttccgccgcaaagtgaataagtgctacagaggaagaagctgtccgattattgttcattgctctgatggggcgggccggacaggcacatatatactcatcgacatggtattgaataggatggcgaaaggagttaaagagattgatattgctgctacgctggagcatgtacgtgaccaacgacccgggctggtgagatctaaggatcagttcgagttcgctctgactgctgtggctgaggaggttaatgctatcctcaaggcactcccccagtag

SEQ ID NO: 130968 - DNA, 2853 bp, synthetic construct
  misc_feature 1..2853: note = Description of Artificial Sequence: Synthetic coding sequence
  source 1..2853: mol_type = other DNA
atgcgcaggcccaggcggcctggcggcttgggtgggtcaggtggcctccggctactgctctgcttactgctcttgtcgagccgacctggtggatgctcggcggtgagtgcacacggttgccttttcgatcgccggctgtgctctcacctcgaggtgtgcatccaggatgggcttttcggacagtgtcaggttggcgtgggtcaggctcgaccccttctgcaggtcacttccccagtgctacagaggctgcagggagttctgcgacagttaatgagccaggggctttcctggcatgacgaccttactcagtacgtcatatcacaagagatggagagaatccccaggctcaggcccccggagccccgcccacgcgaccggtctgggcttgccccaaagagaccaggccccgccggggagctgttgttgcaagatatcccaactggctccgcacccgcagcccaacaccgcctgccccaacctcccgttgggaaaggaggagccggggccagctcttcactgtctccccttcaggcagagctgctcccaccactgctggagcacctcttactcccgcctcagccacctcacccctcattgtcatatgagcccgccctgcttcaaccatacctcttccaccagtttggctcgagagatgggtcacgggtgagcgaaggcagccctggcatggtgtccgtgggtcctctcccaaaagcagaagcacctgccctgttcagtaggaccgcttctaaaggcatcttcggtgatcaccccgggcactcatacggagatctaccagggccgagtcccgcccaactcttccaggattcaggattgctttacttagctcaagaactgccggccccatcgagggccagagtgccgcgactgcctgagcagggcagctcgtcccgggctgaagacagcccagagggatacgaaaaagaaggactgggagaccggggtgagaaaccagcatccccggctgtccaacccgacgctgctttgcagcgcctggcggctgttttagctggctatggggttgaactgaggcagctgaccccggagcagctgagtacactcctcaccctgctccagctcctgccaaagggagcgggtcgaaatccaggcggcgttgtcaatgtgggcgccgatatcaagaagactatggaaggccccgtggagggcagggacaccgctgagttgcctgcaagaacttctccaatgccaggccatccgacagctagtcccacctctagcgaggttcaacaggtccccagcccagtttcaagtgaaccaccaaaagcagcccgcccccccgtcacaccagtgcttctcgagaaaaaaagtcccctcgggcaatcccaaccaaccgtggctggtcagccgtctgcaagacctgccgccgaggagtatgggtatattgttacagaccagaatgttgtcggacctgccctcacgttcaggatccgacacaatgaacagaatctgtccctcgcagacgttacccagcaggccggtctggtgaagagcgaactggaggcccagaccggcctccagatactgcagacaggagttggacagagggaagaggctgctgccgttctgccacagaccgcccactcaacaagccctatgcgctcagtgctgctaactctagtggccctcgctggggtagcagggctattagtcgcgctggccgtggccctctgtgtcaggcagcatgctagacagcaggacaaagagcggctggctgcactgggccctgagggggctcatggcgacaccactttcgaatatcaggacctatgtagacagcacatggccaccaagagcctttttaacagagcggaaggcccgcctgagccctctagggtgtcttccgtgtcgtctcaattctccgacgccgcccaagcttcaccatcctcacattcaagcaccccaagctggtgcgaagagcctgcacaggctaacatggacatatccacaggccacatgattctcgcttatatggaagaccatttacgcaaccgggatcggttggccaaggaatggcaggcgctttgcgcttaccaggctgagccaaatacctgtgctacagcccaaggagagggcaacattaaaaaaaatcggcaccctgacttcctcccatacgaccacgctagaattaaacttaaggtcgaatcatcccccagccgcagcgactatatcaatgcgtcacccattatcgaacacgacccccggatgccagcctatatcgcgacgcaggggccactgagtcacaccattgctgacttctggcagatggtgtgggaaagtggatgcacggtcatcgtcatgctgacacccctcgtggaagacggggttaagcagtgtgatcgatactggcccgacgaaggagcatccttgtatcacgtgtacgaagtcaacttagtcagcgaacacatctggtgcgaggattttctggtgagaagcttttatctcaaaaatgtgcagacccaggagacacggacccttactcaattccactttctaagttggccagccgaggggactcctgcttccactcgtcctctgctcgacttccggcggaaagtgaataagtgctatcgcggccggtcctgtccaattatcgtgcattgctccgatggggcaggaagaacagggacgtacattctgatcgacatggtgctcaacaggatggccaaaggcgtcaaagagatcgacattgccgctactctcgaacacgtgcgggaccagagaccaggtctcgtgagatcaaaagaccagttcgaattcgcattgacagcggtggccgaagaggttaacgcaatccttaaggctctgccacagtag

SEQ ID NO: 130969 - DNA, 2961 bp, synthetic construct
  misc_feature 1..2961: note = Description of Artificial Sequence: Synthetic coding sequence
  source 1..2961: mol_type = other DNA
atgggacctccgttacccctcctcctcctgttactgctcctcctaccccctcgcgtgctccccgccgcccccagttccgtcccgagggggcgccagctccccgggcggctggggtgcctgctggaggagggcttatgcggggcgtccgaggcctgtgttaacgacggagtgtttgggagatgtcagaaggtgcctgccatggacttctatcggtatgaggtctcacctgtcgcacttcagcggctgcgagtggctctacagaaactgtctggtaccgggtttacatggcaggatgattacactcaatatgtgatggaccaggaactcgccgacctgcctaagacatacttaaggagaccggaggcttcctctccagctcggcctagtaagcacagcgtgggctcggagcgcaggtattcccgtgagggcggcgcagcactcgccaacgcattgcgtcgccatctgcctttcctggaagccttgagtcaggcaccagcatccgacgtcttggctcggactcatactgcccaggacagaccgcccgcggagggggatgaccgcttcagcgagtctatacttacctatgtagctcatactagcgcattgacgtatcccccaggcagcaggacacaactgcgcgaagatctgctgcctcgtaccctgggccagcttcagcccgatgagctgtcccctaaagttgattcaggggtcgacaggcaccatcttatggctgcattgtccgcctacgccgcacagaggccaccagccccaccaggtgagggatccctggaacctcaatatctgcttagggccccatctcgaatgcctcgcccactactggcccccgcagcgcctcagaagtggcctagccctttaggcgactctgaggacccaagctctactggcgacggggcacgcatccacactctcctcaaggatctgcaacggcagcctgctgaagtacgtgggctctcagggctggaactggatggaatggctgagctgatggccgggctaatgcagggcgtcgatcacggcgtggcgcggggctcccctgggagggccgcactgggtgagtctggcgaacaagctgatggtcccaaggctacattgaggggagactcattcccggatgatggcgtccaggacgacgacgaccgactctatcaggaagtgcacagactgagcgctaccctgggaggcctacttcaggatcacggcagcagattactacccggtgcattgccctttgctcggcctctggatatggaaaggaaaaagagcgaacacccagagagctctctgtcgtccgaagaggagactgcaggcgtagagaacgttaaaagccagacgtattctaaggatctgcttgggcagcagccacactccgaacccggcgccgccgcttttggagaactccaaaatcagatgcccgggccctccaaagaggaacaatccctccctgcaggagctcaggaagccctgagcgacggacttcagctggaggtgcagccctctgaggaggaagcccggggctatatagtgaccgacagagaggtgttaggacccgctgttacatttaaagtctctgcaaacgtgcagaatgtgacaaccgaggacgttgaaaaagccactgtggataataaagacaaactcgaggagacctctgggctgaaaatcctgcagaccggtgtgggcagcaagtctaaactcaagtttcttcccccacaagcggaacaggaagactctaccaagtttatagcactgactcttgtgagcctggcctgcattctgggtgtcttgctagccagtggccttatttactgcctgcggcatagcagccaacatcgcctcaaagagaaactgtccggccttggcggggacccaggcgctgatgctacggccgcctatcaggaactatgcagacagaggatggcaactaggcccccggacaggccagaagggccacacactagcagaataagtagtgtttctagccagttttctgacggtcccatccccagtccctcggcccgcagttctgcctcgagctggtctgaggagcccgttcagagcaatatggacattagcactgggcacatgattctgagctatatggaggatcatctgaaaaacaaaaatcgtctggagaaagaatgggaagcactgtgcgcttatcaggcagaaccaaattcctcattcgtcgcacagcgggaagagaacgtccctaagaatagatccttggcagtgctcacctatgaccacagtagggtcctgttaaaggcagagaattcccatagccacagcgattacatcaatgcatctcccatcatggatcacgatccaaggaatcctgcatatattgctacacaggggcctcttcctgcaacagtggctgatttctggcaaatggtatgggaaagtggctgtgtggtgattgtcatgttgacacctctggcagagaacggggtcaggcagtgctatcattactggcctgacgagggatctaatttgtaccacatctatgaagttaacctagtctccgagcacatctggtgtgaagacttcctggtgcgctctttttacctgaagaacctgcagaccaatgaaactcggaccgtaactcagttccatttcctgtcttggtacgaccgaggcgtgccatcatcgagcagaagcctgctggactttcggaggaaagtaaataagtgttatagagggcggagttgccccattatagtgcattgcagtgacggtgccggccgtagtggaacctatgtgcttatcgatatggtcctcaacaaaatggccaagggggcaaaagaaatagacatcgcggcgacccttgaacacctcagagaccagcggccaggtatggttcagaccaaggagcagtttgagtttgccctgacagctgtggcagaggaggtgaacgccatacttaaggccctgcctcaatag

SEQ ID NO: 130970 - DNA, 2997 bp, synthetic construct
  misc_feature 1..2997: note = Description of Artificial Sequence: Synthetic coding sequence
  source 1..2997: mol_type = other DNA
atgggaccccctctgcccctgctcctgctcctcttgctgctcttgcccccccgagtcttgcctgcagctccttcaagcgtgcctcgtggtagacagctgcctgggcgtctggacggcgtttttgggagatgccaaaaggtgcctgcaatggacttttacagatacgaagtctccccagtggctctgcagcggctccgcgttgccttgcagaaactcagcggcactggttttacctggcaagacgactatactcagtacgtgatggatcaggagttggccgacctgcctaaaacttatctcagacggcccgaggccagcagcccggccaggccaagcaaacactccgtggggtctgagagaaggtactcgcgggagggcggagccgcacttgctaacgccttacggcgccatctcccttttctagaagcactgtctcaggcccccgcctctgacgtgcttgctcgtacacacaccgcacaagatagaccccctgccgaaggcgatgacaggttctccgagagcatactgacctatgtcgcccataccagcgcattgacttaccctccgggatcgaggacccagctgagggaggatctcctccctaggacccttggccagctgcaacctgatgaattatccccaaaagtcgattcaggggtggaccgccatcatctgatggctgcattgtccgcttatgccgctcaacggcctcctgctccacccggtgaaggctcattagagcctcaatacctactccgcgcaccctcacgcatgccgaggccactgttagctcctgctgccccccaaaagtggccgagtcctcttggtgattccgaagaccccagtagcactggcgacggtgcacgtatccacactctgctgaaggacctccagagacagcccgcggaagtgcgaggactcagcggtctggagctggatggtatggccgagcttatggccggactgatgcaaggcgttgatcatggggtggctagaggttcacccggaagagctgccttgggcgaatcgggtgagcaggctgatggacccaaggctacccttagaggcgattcctttcccgacgatggcgtacaggacgacgacgatcgactctatcaggaggtacatcgtctgtcagcaactttggggggcttactacaagatcatgggtctcgactgctgcctggcgcactgccctttgctaggcctctggacatggagcgtaagaaaagcgagcatcccgaaagctctctctctagcgaagaggaaacagccggcgtcgagaatgtgaagtcacagacatattcgaaggatctccttggccaacagccacactctgagccaggcgccgcagcttttggcgaattgcaaaaccagatgccaggaccctcgaaggaggaacagtcacttcctgccggcgctcaagaagccctgagcgacggacttcagttagaggtccaaccgagtgaagaggaggccagaggatatatagtgaccgacagggaccctctgaggcccgaggagggtcggcgcttggtggaggatgttgctaggctcctgcaagtgcctagctctgcctttgcagacgtggaggtccttggccccgccgtgactttcaaggtgagcgccaacgtgcagaacgtgacaaccgaagacgtcgagaaagccaccgttgataataaggataagctggaggaaactagtggtttaaagatactgcaaaccggggtgggcagtaaatctaaattgaagtttctacctccgcaggccgaacaggaggactctacgaagtttattgccctcacactggtcagcttggcctgtatactgggcgtcctccttgccagcggcctgatctactgcctacgacacagttcccagcatcggctgaaggagaagttaagtggtctgggcggcgatccgggtgctgacgctacagccgcataccaagaactctgccgacagagaatggcaacccggccacccgaccgcccagaaggtccgcatacatcaagaatttcatctgtatccagtcagttcagcgatgggccaatcccaagtccttccgcgaggagtagtgctagttcatggtccgaagagccagtgcagtcaaacatggatatctcaaccggacacatgatcctatcctacatggaggatcaccttaaaaacaaaaatcgcctggagaaggaatgggaggccttgtgtgcataccaagccgagcctaacagcagcttcgttgcacagcgggaggagaatgttcccaaaaatagaagccttgcggtattgacctacgatcactcccgagtgctccttaaggctgaaaattctcacagccacagtgactacattaacgctagcccaattatggatcatgaccctagaaatccagcttacatagccacgcaggggccactgccggcgactgtggcggacttttggcaaatggtgtgggagtctggctgcgtggttattgtgatgttaactcctctggccgagaacggcgtgagacaatgctaccactactggccagatgaggggagtaatttataccacatctacgaggtaaacctggtctcagaacatatctggtgcgaagactttctggtccgcagcttctaccttaagaacttgcaaacaaatgaaactcggacggtgacccagttccatttcctttcatggtatgatcgcggggtccccagctccagccgatcattgctggacttccggagaaaggtcaataagtgttatagggggcgttcgtgcccaatcatcgtacattgttctgatggggctgggcgtagtggaacttacgtgctgatagatatggttctgaataaaatggccaagggcgctaaggagatcgacattgcggcgaccctggaacacctcagggatcaaaggccagggatggttcagactaaggagcagtttgagttcgctttaacagcggtggctgaggaggtgaatgccattctcaaggccctgccacagtag

SEQ ID NO: 130971 - DNA, 3048 bp, synthetic construct
  misc_feature 1..3048: note = Description of Artificial Sequence: Synthetic coding sequence
  source 1..3048: mol_type = other DNA
atgggtcctccattacccctgctgctgctgctcttgcttctactgcctccacgagtgttacctgccgccccctcatctgttccaaggggcagacaactgccaggtcgtttgggctgcctcctggaagaaggtctctgcggagctagcgaggcttgtgtcaatgacggtgttttcgggaggtgtcaaaaggtacccgctatggacttctacagatatgaagtgagccctgtggcgctgcagcgcctgagggtggctctgcagaaactgtctgggaccggttttacctggcaggacgactacactcaatatgtgatggaccaagagctggctgatcttccgaagacctaccttagacgccccgaagcctcctctcccgccaggcctagcaaacactcagtcggtagcgagcgaagatactctagagaaggcggtgcagccttggccaatgccctaaggaggcacctgccctttctggaagccttgagtcaagcaccggcatccgatgttctagcacggacacacactgcacaagatagacctccagcagagggcgacgatagattcagcgagagtatcctcacatatgtggcacacacctcagctctgacttacccacccgggtcgcggacacagctgcgggaggatcttctgcccaggaccttgggccagcttcagcctgacgagttgtctccaaaagtcgactctggagttgacagacatcacctcatggctgctctttctgcatatgccgcccagagaccgcccgccccccccggcgagggatcactggaaccccagtacctgcttcgcgccccctctcgaatgcctaggccactcctggcccccgccgccccacagaaatggccaagtccactaggcgacagcgaggatccctctagtactggtgatggcgctaggatccacaccttacttaaagatctgcaaaggcagccggccgaagtccggggacttagcggcttggaacttgatggcatggctgaactcatggcaggtctgatgcagggggtggaccatggtgtggcgagaggatcaccaggacgagcagccctaggggagtcaggagagcaagcagacggacccaaagccacgctaaggggggactccttccctgacgatggagtacaagacgatgatgaccgtctgtaccaggaagtgcatcgactgtcagcaacgctcggcggactcctgcaggaccacggatccagactgttgccaggagcgctgcccttcgcgcgtccgctggacatggagagaaagaagagcgagcaccctgagtcatctctgagctcagaggaggaaacagcaggagtagagaacgtgaagtcccagacatattccaaggatctcctcgggcagcagccccacagtgaaccaggggcagcagccttcggcgaactgcagaatcagatgccaggacccagtaaggaagaacagtctctgccagcaggtgcccaagaggctctgtcagacggcttgcagctggaagtgcagccatctgaagaagaggccaggggttacatcgtaacagacagggacccgctgagacccgaggagggtcgcaggttagttgaagatgtcgcacgcctgctgcaagtgccttcaagtgccttcgccgacgtggaggtcctggggccagctgtaaccttcaaagtttccgctaacgtgcagaatgtaactacggaagacgtggagaaggctaccgtggataataaggacaagttggaagaaacttcaggattgaaaatccttcagacgggggtgggttcaaaatccaagcttaaattcctccccccacaagcagagcaggaggactccaccaagttcatcgcattaacattagtcagtctcgcttgcatcctgggcgtgctactcgcttccgggctgatttactgcctgcggcattccagtcagcatagattgaaagaaaaactgagcgggttgggaggcgaccctggcgccgatgctactgctgcttaccaggagctctgtcgtcagcgaatggctacccggccgccggatcggccagagggaccacatacctctcggatttcgagcgtgtcgtcacagtttagcgacggacctattccatctccctccgctagatcttccgcgagctcctggtctgaggagcctgtccaaagtaacatggacataagcaccggccacatgatcctgagctatatggaggaccacctaaagaacaagaataggctagagaaggagtgggaagccctgtgtgcatatcaagctgagcccaatagctccttcgtggcgcaacgcgaagagaatgtgccaaagaatagatcgcttgcggtactcacatacgatcactctcgggtgctgctgaaggcagagaattctcattctcacagcgattatattaatgcttcgcccattatggatcatgaccctagaaatcctgcctacatcgcaacacaggggccccttcctgccaccgtggccgatttctggcagatggtttgggaatctggctgcgtcgtgatcgtgatgctcacccctctggcagagaatggtgtccgacagtgctaccactactggccagacgagggaagcaacctttaccatatctacgaggtcaacctagtctccgagcacatctggtgtgaagactttctggtgaggagtttctatctcaagaacttgcagactaacgaaacccggacggtcacacagtttcatttcctgtcgtggtacgacaggggagtgccctcctcttccagatctctgctagattttaggcgcaaggtaaataagtgctaccgtggacgctcttgtcctataattgtgcattgttcagacggcgcagggcgaagtgggacgtacgtcctgatcgacatggtcctgaataagatggccaagggagctaaagaaattgatattgccgccactttagaacatctcagggaccaacggccaggcatggtccaaaccaaggaacagttcgagttcgccttgacagcagtagccgaggaggtgaacgccatcctcaaggctctccctcagtag

SEQ ID NO: 130972 - DNA, 3117 bp, synthetic construct
  misc_feature 1..3117: note = Description of Artificial Sequence: Synthetic coding sequence
  source 1..3117: mol_type = other DNA
atggctgttgaaagtgaatactcccttctgcggaccgaggcttcatttccaacgatgaagatgttttgcgtgtctcacactctgccgagagtcgaggtcatgtttgtctccggcccacagacgcgcgaacgaactgagcccgtggacccacggtggcaatgcttggtgcagatgtgggcagggtgtctgcttgaagagggtctgtgtggggcttctgaagcctgcgtcaacgatggcgttttcggccgctgtcagaaggtaccggctatggatttctaccgatatgaggtaagccccgttgcactccaacgtttgagggtagctctccagaaattgagtggaactggcttcacctggcaagatgactatactcagtacgtgatggaccaggaattagcggaccttccaaaaacctacctgcgaagacctgaggccagctcacctgcgaggccatcaaaacattctgtcggcagtgagaggagatactctcgcgaaggaggagccgcccttgccaacgctctgcgacgccacttgcctttcctcgaggctctctcacaggcgccagcttccgacgtcttggcgaggacgcacaccgctcaggatcggcctcccgccgagggtgacgatcgcttctccgaatctatcctaacttatgtcgcccataccagtgcccttacttatcctcctgggtctagaacgcagctacgagaagatctgctacctcggacactcggtcaactgcaaccagacgaactgagccccaaggtcgacagcggcgtggatcgacatcacctcatggccgcactctcagcatacgctgcccagaggcccccagcaccccctggcgaggggtcactggagcctcaatatctgctgagagctccatcacggatgccacgccccctgttagcccctgctgcccctcagaagtggcccagccctctgggtgattccgaagaccccagcagtaccggcgacggtgcccgaatccacactctcctaaaggacttacaacggcagccagccgaggtgagaggactgagcggcctggagctagatgggatggccgagcttatggctggactgatgcagggcgtggaccatggggtggcgagagggtcacccgggcgggctgcattaggggagagtggcgagcaagcagatggacccaaggccaccctgaggggtgatagcttccctgacgacggggtgcaggacgatgacgaccgcctgtatcaggaagttcataggctaagcgccacactcggcggactgctccaagatcatgggtcccgcctgctgcctggagctttaccttttgcaagaccgctcgacatggagcggaagaagagcgagcaccccgagtcctccctatcctccgaggaagaaacagctggagtggagaacgtcaagagccaaacatattcaaaagatctcttggggcaacaaccccattcagaacctggggctgctgctttcggcgaactgcagaaccaaatgcccgggcccagcaaagaggagcagagcctgcctgccggtgctcaggaggctctatccgacggcctgcagctcgaggtccagcctagcgaagaggaggccaggggctacattgtcacagacagagatccgttgcggcccgaggaggggagacgccttgtcgaggatgttgcacgtctactgcaagttccaagcagtgcgttcgcagacgtggaggttctggggcccgcagttacatttaaggtctcggcgaacgttcagaatgtgacaaccgaggacgttgagaaagctacagttgacaataaggataaactggaggaaacgtctgggctgaaaattctgcagactggcgtagggtcaaagagcaaactcaaattcctgcccccacaggctgagcaggaagattctacaaagttcatagctttaacgctagtgtcccttgcttgtattctgggggttctgttggcttctgggttgatctactgcctgcgacacagcagccaacatagacttaaggagaagctttcgggcctcggaggggacccaggcgccgatgccacagctgcgtaccaggaactctgccgccagcggatggctactcgccctcctgatcggcccgaagggccccacacctccaggatatcgtctgtttccagccagtttagtgatggccctataccttcgccgagcgcgagaagctccgcttcctcctggtccgaagagccagtgcagtcaaacatggatatctccactggacacatgatcctctcttacatggaggatcacctcaagaataaaaatcgattagagaaagaatgggaagcattatgtgcctaccaggccgaaccaaattcttctttcgtggcccagagggaggagaatgttcctaagaatcgcagtctggccgtgcttacctacgatcatagccgcgtattactgaaggctgagaattcgcactcacattctgactacatcaatgcttcccctattatggaccacgatccgagaaaccccgcttacatcgcgactcagggaccactccctgctaccgtggcggatttctggcagatggtgtgggaatcaggatgcgtcgtcatagtgatgcttactcccctggctgagaacggcgttcgccagtgttaccactattggcccgatgagggatccaacctgtaccatatctacgaagtgaacctagtcagtgagcatatctggtgtgaggatttcttagtgcgctccttttacctgaagaacctccagaccaacgagacccgaacggtgacccagttccactttctttcttggtacgataggggcgtgccctcatcctccagaagcttgctcgatttccggcggaaagttaataagtgttacagaggtaggtcctgccctataatcgtgcactgttctgacggggccggcagatccgggacctacgtgctcattgacatggtgctgaataaaatggccaagggagcaaaggagattgacatcgcagcaaccctggaacatcttagagatcaacgccccgggatggtccagaccaaagaacagttcgagttcgcgctgaccgccgtcgcggaggaggtgaacgctattctcaaagcactgccccagtag

SEQ ID NO: 130973 - DNA, 2934 bp, synthetic construct
  misc_feature 1..2934: note = Description of Artificial Sequence: Synthetic coding sequence
  source 1..2934: mol_type = other DNA
atgggtccccctctgccacttttactgctgctccttctcctgctgcccccacgcgtattgccagctgccccttccagcgtgcctagaggccggcagctcccaggcagactgggctgtttactggaggagggactgtgcggtgcctccgaggcatgcgtgaacggattcacatggcaggacgattacactcagtatgtaatggatcaggaattggcagatctgccgaagacttatcttagaagacctgaggcatcatcaccagcccggccttccaagcattctgtggggagtgagcggcggtattcacgcgagggtggagcggctttggctaatgctctgcggagacatctgcccttcctggaggctctttcccaggctcccgcgagcgacgtcctggcacggacccatacagcccaggatcgcccaccagctgagggggatgatagattctccgagtctatcctcacttacgtggcccacaccagcgctttgacatatccccccggctcaaggacacagttacgtgaagacttgctgcctaggaccctgggtcagcttcagcccgatgagctctccccaaaagtggattcgggagtggaccggcatcaccttatggcggctctcagcgcgtacgcggcacagaggccacccgcgccgccgggagaaggcagcctggaaccccagtacctcttgagggctccctccaggatgcccaggccactactcgctcccgcagccccacagaaatggccctccccactgggcgattcagaggacccctcatctaccggtgatggcgctcggatccacacactgcttaaagatctgcagcgacaacccgcagaagtaagaggtctttctggtttggagctggacgggatggcagagcttatggccggcttgatgcagggagtcgatcatggcgtagccagggggtctcctggaagggccgctttaggggagagcggagaacaagccgacgggccgaaggccactttaaggggagacagcttccctgatgatggcgtccaggacgatgatgaccgactctatcaggaggttcatagactcagtgctactctcggtggtctgcttcaggatcacggcagccggttgctgccgggcgcgctgcctttcgcccgtccactagatatggagcgtaaaaagtctgagcacccagagagctccctgtcctccgaagaggagaccgctggtgttgagaacgtaaagtcacaaacctattctaaggatctactcggacagcagcctcacagcgagccaggcgccgcagctttcggggagctgcagaaccagatgcctgggccctctaaagaagagcaatctctccctgccggagctcaagaagctctgagcgacggactgcaactggaagtgcagccgtccgaggaggaagctagagggtatatcgtcacagaccgggacccgttgaggcccgaggaagggcggcgactcgtggaggatgtggcccgcctgcttcaggtgcctagctctgcatttgccgacgtcgaagttctcggccccgccgtgacattcaaggtatcggcaaatgtccagaacgtgactactgaggacgtggaaaaagctaccgtcgacaataaagataagctggaggagacatcgggactgaaaattctacaaactggggtgggtagcaagtcaaaactgaaattccttcccccacaggcagaacaagaggacagtacgaagttcatcgctctgactctggtgagcctcgcctgtattttaggcgtcctgttggcctcgggcctgatctattgcctgagacacagtagccagcatcggcttaaggagaaactctctggtctgggtggagaccctggcgccgatgccactgcagcctaccaagagctgtgtcgacagcgcatggccactcgacctccagatcgcccggaaggtccgcacaccagcaggattagttctgtcagctcacagttctccgatgggcccatcccttccccaagtgcgcgaagttcagcctccagttggtctgaggagccagtccaaagcaatatggatatctccactggacatatgatactctcttatatggaagaccatctcaagaacaaaaatcgcctcgaaaaagaatgggaggcactttgtgcttaccaggccgagcccaacagcagcttcgtagctcagcgagaggagaacgtcccgaagaatcgtagtctggctgtgctgacttatgatcacagcagagtgctcctcaaagccgagaatagtcactctcattcagattatattaacgccagtcctattatggatcatgatcctaggaatcccgcttacattgccacccaggggcccctgccggccacagtggctgatttttggcagatggtctgggagtccggctgtgtagtgatagtgatgctgacccccctggcagagaacggtgtgagacaatgttaccactactggcccgatgagggttccaatctttatcacatttacgaagtgaatttggtttccgagcacatctggtgtgaggactttctggtgaggagcttctatctaaaaaatttgcagacaaacgaaacccgcacagtgacccaatttcatttcctgtcatggtatgatagaggagtaccctcatcatcaagaagcctgctagatttcagaaggaaggttaacaaatgctaccggggcagatcttgccctatcatcgtgcactgcagcgatggagccggcagatctggaacttacgtgctgatcgacatggtcctgaataagatggctaaaggagccaaggagattgatatcgcagctaccctcgagcatctgagggaccagcgacccgggatggtccagacaaaggagcaatttgaattcgccctgacggcggtggccgaggaagtgaacgctatactgaaggcgctaccccagtag

SEQ ID NO: 130974 - DNA, 3651 bp, synthetic construct
  misc_feature 1..3651: note = Description of Artificial Sequence: Synthetic coding sequence
  source 1..3651: mol_type = other DNA
atgggacatttgcccacaggaatccacggagcccgcagattgctgcccttgctgtggctgtttgttctgttcaaaaacgccaccgctttccacgttaccgtccaagacgacaataatatagtcgtaagcctggaggcatcagatgtgatctctcccgcatcagtgtatgtggtaaagattactggagaaagcaagaactattttttcgagttcgaagagttcaacagtacactgccccccccggtgatctttaaggccagttatcacggtctctattacattatcactctcgtcgtggtcaatggcaatgtcgtgactaaaccctcacgtagtataaccgtgcttaccaagcccctccctgtaacgagcgtcagcatatacgactataaaccgtcccccgaaacaggcgtgttgtttgaaatccattatccggagaaatataacgtcttcacaagagttaatatttcatattgggaggggaaagatttccgcacaatgttgtacaaagatttcttcaagggaaagacagtatttaatcactggctgcccgggatgtgctactccaacataacttttcagctggtcagcgaggcaacattcaacaagagtacactggtcgaatattccggcgtgagccatgagccaaagcagcatcgtaccgcgccctaccctccgcagaatatttcagtccgcattgtgaatctcaacaagaataattgggaggagcaatccggcaacttccctgaagaatcttttatgcggagccaggatacgattggaaaggagaagctgtttcacttcactgaggaaactcccgaaattcctagcggaaatatatcctcaggatggcccgactttaactctagtgactatgaaaccacaagccagccctattggtgggactcagctagcgctgccccggagtccgaagatgagtttgtgagcgtgctgccaatggaatacgagaacaactcaacccttagtgagaccgagaagtctaccagcggctccttctcctttttccccgttcagatgattttgacctggctgccacccaaaccccctacagcctttgatggctttcatatccacattgaacgtgaggagaacttcaccgaatatctgatggtggacgaggaggcgcatgaatttgtagctgagctgaaggagcccggtaaatacaaactgtcagtgaccacgttcagttcgtcaggatcctgtgagacaaggaaaagccagtcagcaaagagtcttagcttttatatctctccatctggtgagtggatcgaggagctgacagagaagccacagcacgtgtcagtgcatgtgctgtcgagtactaccgccctgatgagctggacatccagtcaggaaaactacaactccaccatagtgtcagtggtttccctgacttgccagaaacaaaaggaatcacagcgattagagaagcagtattgcacccaggtcaacagtagcaaacccattattgagaacctagtgcctggggcacaataccaggtggtgatctatttaaggaaaggcccacttattggccctcccagcgatcctgttacctttgccattgttcctaccggtatcaaagacctaatgctgtaccccctgggccctactgctgtcgtgctgagctggacgcgcccatacctgggcgtgttccgcaaatatgtcgtcgaaatgttctattttaatccagccacgatgacatctgagtggacaacatattacgaaattgcagcaaccgtgtctctgactgccagtgtccgcattgccaacctgctgcccgcttggtattacaattttcgagtcactatggtgacctggggcgatccagagctgtcttgctgtgattccagcactatctctttcatcaccgcccccgtggctcccgagattacttccgttgagtatttcaattccctgctgtacattagttggacctacggcgacgatacgacagatctgtctcattctcgtatgcttcattggatggtggttgccgaagggaagaaaaagatcaagaagagtgtcacacggaacgtgatgactgcaatattatctctacctcccggggacatttacaatctgtccgtgacagcttgcaccgagcggggtagcaatacctccatgctgcggcttgtaaaactggaacctgccccccccaagtctctctttgctgtgaacaagacccagacgtctgtgacccttctctgggtggaagaaggagtggccgattttttcgaggtattttgtcagcaggtgggtagctcgcagaaaaccaaactgcaggaacccgttgctgtctcctcccacgtcgtgactatctcgagtctgctgcctgccacagcatacaattgctctgtgacctccttttcccacgactccccttccgtgccgaccttcattgccgtatcaaccatggtgacggaaatgaaccctaatgtcgtggtcatctcagtcctagctatactgtcaaccctgctgatcggcctgctcttggtaactctcataatcctgcggaagaaacatttacaaatggctcgagagtgtggcgccggcaccttcgttaatttcgccagcctcgaacgcgatggcaagctgccgtacaattggagacggagcattttcgcctttttaacactccttccaagctgtctgtggactgattatctcctggctttctacattaatccttggtcaaagaatgggcttaagaagcgaaaactgactaatcccgtccagttagacgactttgacgcctatatcaaagatatggcaaaggattctgactacaagttttccctgcaattcgaagaactgaaactaatcggcctggacatcccacactttgctgctgacctccccttgaaccgatgcaaaaataggtatactaatattctcccctatgatttctctcgtgttcggttggtgtctatgaatgaagaggaaggtgccgattacatcaatgctaactatatacctggctataactctccccaggagtatattgctacacagggcccactgccagagaccagaaacgacttctggaaaatggtgcttcagcaaaagagtcaaataatcgtgatgttgacccagtgcaacgaaaagagaagagtgaagtgtgaccactattggcccttcactgaggaaccgatcgcttacggcgacatcactgtcgagatgattagcgaagaggaacaggatgattgggcttgcagacacttccggatcaactatgccgacgagatgcaggatgtgatgcactttaactacaccgcttggccagatcacggggtgccaactgcaaatgccgcagaaagcatactgcaatttgtccatatggtacgccagcaggccacaaaaagcaaaggtcccatgatcatccactgctccgcaggcgtcggtaggaccggaaccttcattgctctcgacagactgctccaacatatccgagaccatgaattcgtagatattttaggcctagtgtcagagatgaggtcttaccgcatgtcaatggtgcagactgaggagcagtatattttcattcatcaatgtgtgcagttgatgtggatgaaaaagaaacaacagttttgcatttctgatgttatttacgagaacgtaagcaaatcctag

SEQ ID NO: 130975 - DNA, 3567 bp, synthetic construct
  misc_feature 1..3567: note = Description of Artificial Sequence: Synthetic coding sequence
  source 1..3567: mol_type = other DNA
atgggccacctgcctaccggcattcacggggcccgcagacttttgcctcttctctggctctttgttctattcaagaacgctacagctttccatgtgacggtgcaggatgataacaacatcgtggtctcccttgaggcgagcgacgtgatatccccggcgtccgtttacgtagtgaaaattaccggagagagtaaaaattactttttcgagttcgaagaattcaactctactctccctccacctgttatcttcaaagcttcttaccatggactatactacatcattactctggtggttgtcaatggcaatgttgtgacgaagcccagtaggtccataacagtgctgacaaagccccttccagtgacttcagtcagcatttatgactacaagccctcccctgaaaccggcgtgctgttcgagattcactacccagagaagtataacgtatttacgagagtgaatatcagttactgggaaggaaaagattttcggaccatgctttacaaggacttcttcaaaggaaaaactgtgtttaaccactggctgccaggcatgtgctatagtaatataaccttccaactggtgagtgaggccaccttcaacaaaagtaccctcgtagagtatagtggcgtgagccacgaacccaagcagcaccgtaccgcgccctacccgccgcagaacatcagcgtaaggatagtcaatctgaataagaataactgggaagagcagtccgggaacttcccggaggagtcattcatgcgttcccaggataccataggaaaagagaaactcttccatttcactgaagagaccccagaaattccgtcaggaaatatctcaagcggatggccagattttaatagtagtgattatgaaacaacctcccaaccctattggtgggactccgcttccgcagctcctgagtccgaggatgagttcgtgagtgtgttaccgatggaatacgaaaataactctacactgagtgaaaccgaaaaaagcaccagtggctctttttcattttttcctgtgcagatgatcctgacttggttgccccctaagccccctactgcattcgacggctttcatatccacattgaacgcgaagagaattttaccgagtaccttatggtcgacgaggaggcccacgagtttgtcgcagagttaaaggagcctgggaaatataaactttccgttaccactttcagctcaagcggatcatgcgagactcgcaaatcacagagtgctaagagcttgagcttttatatttctcctagtggcgagtggatcgaggaactcacagagaagccacagcacgtctctgtgcacgtgctgagctctaccaccgctctcatgtcctggactagttctcaggagaattataacagcactatagtaagtgtcgtgtctctgacttgccagaagcagaaagagtcccagcggctggagaaacagtactgcactcaggtcaattcttcaaaaccgattatcgagaacctcgtgccaggcgcccaatatcaagttgttatctatcttcggaaaggtcccctgatcggccccccctctgacccggtgaccttcgctattgtgcctactggtattaaagatttgatgctctatcctcttggtcctacggcggtggtgttgagttggactagaccgtacctgggtgtgttcagaaaatacgtagttgagatgttctactttaaccctgctacaatgacctctgagtggactacatactatgaaatcgccgccacggtgagtctcaccgcatctgtgaggatagcaaacttgttacctgcttggtactataactttagagtgacaatggtaacttggggggaccctgaattaagctgctgtgactcttctactatcagcttcataacggcccccgtggcacctgagatcacctctgtcgagtatttcaattctctcctgtatattagctggacttatggtgacgacactacggatctgtcacatagccgaatgttgcactggatggtcgtcgccgaaggtaaaaagaagataaaaaagagtgtgacccgaaacgtgatgactgccattctatctctgcctccaggcgatatctataacttgagtgtgactgcatgtacagaacggggtagcaatacatctatgttacgcttggtcaagctggagcctgccccgcccaaatctttgtttgccgtgaataaaacccagacatctgtaacccttttatgggtcgaggaaggggtggcggatttctttgaggtcttctgccagcaggttggcagcagccagaaaacaaaactgcaagaaccagtggcagtatccagccatgtcgtgaccataagctctttgctgccagctaccgcctacaactgctccgtgacatcgtttagtcacgacagcccttctgtgcctacattcatcgcggtcagtactatggtgaccgagatgaatccaaatgtagtcgttatatctgtccttgctattctgtccactctgctaattggcttattgctggttactctcatcatcttaagaaagaagcatctgcagatggccagggaatgcggggccggcaccttcgtgaacttcgccagtcttgagagagatggaaagctaccatacaattggtccaaaaacgggcttaagaaaaggaagctcacaaacccagtccagcttgacgacttcgacgcctatataaaagatatggccaaagacagcgactataaattcagcctgcagtttgaggagctcaagctgattgggttggacatccctcattttgctgccgatctgccccttaatcgctgcaagaatagatacaccaatatccttccttatgacttttccagggtgcgattagtgtctatgaatgaagaagaaggagctgactatatcaatgcaaactatatcccagggtataactctccccaggaatacatagctactcagggccccctgcctgaaacacgtaacgacttttggaagatggtcctacaacagaagagccaaatcattgtcatgctgactcaatgcaacgagaaacggcgcgtcaagtgtgatcactattggcccttcaccgaagagcccatagcttacggggacataacagttgaaatgataagcgaggaggaacaggatgattgggcgtgcagacactttcggatcaattatgcggatgaaatgcaggacgtgatgcactttaactacaccgcttggccagatcacggggtgccaactgcaaacgctgccgaaagtatcctgcagtttgttcatatggtacgacagcaagctaccaagtccaaaggacctatgattattcactgttctgcaggagtgggaagaactggtacctttatcgctttagataggttgttacaacacataagggaccacgaatttgtagatatcctgggtctcgtctctgagatgcgatcatatcgaatgagcatggtgcagacagaagagcagtatatctttattcaccagtgcgtgcagcttatgtggatgaaaaaaaaacagcaattctgtatttcagacgtgatttatgagaacgtgtcgaagagttag

SEQ ID NO: 130976 - DNA, 1218 bp, synthetic construct
  misc_feature 1..1218: note = Description of Artificial Sequence: Synthetic coding sequence
  source 1..1218: mol_type = other DNA
atggttacagagatgaatcccaatgtcgttgtgataagtgtgttggccatcttgtctactctgctgattggcttgctgctggtgacgctgatcatcctccgcaagaagcacctgcagatggccagggaatgtggagccggcaccttcgtgaactttgcctcccttgagcgtgatggcaagctgccttacaattggcgacgttccatctttgcattcctcacacttttgcctagctgtctgtggaccgattacctgctggccttttacataaatccttggtccaagaacggactaaaaaaaagaaaactgaccaacccagttcagctggacgactttgacgcttatataaaagatatggctaaggattccgattataagttcagcctgcagttcgaagagttgaaattgattggcctagacattccccacttcgccgcagatctgccgctgaatcgatgcaaaaatcgctacacaaatatcctcccctacgacttcagccgagttcggctggtgtcaatgaacgaagaagaaggcgctgattacatcaatgctaattacatcccgggatataacagcccccaggagtacatagcaactcagggccctttaccagagaccaggaatgatttttggaagatggtcttgcaacagaaatcgcagattatagtgatgctgacgcagtgtaatgaaaagcgccgggtaaagtgtgatcattactggccttttacagaagagcccatcgcgtacggcgacattactgtggagatgattagtgaggaagaacaggatgactgggcgtgtagacattttaggattaactatgccgatgagatgcaagacgttatgcactttaattataccgcttggcctgaccatggcgtgccaacagcgaatgccgccgagtcaattctccagtttgtccacatggtgaggcagcaagctacaaagtctaagggacccatgattattcattgtagcgctggtgtgggccgcaccggaacgttcatagctcttgatcggctgctgcaacacattagagatcatgaattcgttgacatcctcggcctagtatcagaaatgcgctcatatcgcatgtcaatggtgcaaacagaggagcagtacattttcatccaccagtgcgttcaactgatgtggatgaagaaaaagcagcagttttgtatatctgacgtgatctacgaaaatgtgtccaagagctag

SEQ ID NO: 130977 - DNA, 1218 bp, synthetic construct
  misc_feature 1..1218: note = Description of Artificial Sequence: Synthetic coding sequence
  source 1..1218: mol_type = other DNA
atggtgacggagatgaaccctaacgtagtcgtgattagcgtgctcgcaattctgagcacattgctcattggcttgttgctcgtgaccctgatcattctgcggaaaaaacatttacagatggcccgcgagtgcggggctggcacctttgttaacttcgccagcctggaaagagatggcaagctgccatacaattggaggaggagcatatttgcgtttctgacgctgctgccttcatgcttgtggaccgattacctgctggccttctatattaatccatggagcaaaaacggtctcaagaagagaaagctgactaatcccgtgcaactggatgatttcgacgcatacattaaggatatggccaaagactcagactacaaattctccctgcagtttgaggagctgaaattgataggactggacatacctcacttcgcagcggacctgccactgaataggtgcaagaatcggtacaccaacattcttccttacgattttagcagggtgaggctggttagtatgaatgaggaagagggcgccgactacattaatgccaattacatcccgggatacaacagcccccaggaatatattgccacccaaggtccgttgccagagacgcgtaacgacttttggaagatggtgttgcaacagaagagccaaattatcgttatgctgacacaatgtaacgagaagcggagggtcaagtgtgatcactactggccatttaccgaggagcccatagcctacggagatattaccgtggagatgatttcagaagaagagcaggatgattgggcttgccgtcacttccggattaactacgccgatgagatgcaggatgtgatgcactttaattataccgcgtggccagatcacggagtcccaaccgcgaacgctgcagagtctatcctgcagttcgtccacatggtgcggcagcaggccacgaaatccaagggcccaatgatcattcattgttcggccggggtgggacgcacaggtacctttatcgcccttgaccgcctgctgcaacacattagagaccacgaatttgtagacatcttaggtcttgtgtcggagatgcgcagctatcgcatgagcatggtgcagactgaagagcaatatatattcatccaccaatgtgtgcaactgatgtggatgaagaaaaagcagcagttctgcataagcgatgtgatatacgaaaatgtgagcaagtcatag

SEQ ID NO: 130978 - DNA, 1134 bp, synthetic construct
  misc_feature 1..1134: note = Description of Artificial Sequence: Synthetic coding sequence
  source 1..1134: mol_type = other DNA
atggtaaccgagatgaatcctaacgtcgtggtcattagcgttctggcaatactgagtactcttctaatcggtctgcttctggtcacccttatcatcttacgcaagaaacacctccagatggccagggaatgtggtgcggggacctttgtgaactttgcttctcttgaaagggatggcaagctgccgtataactggtcgaagaatgggctgaagaaacgcaaactgacgaatcccgtgcagctcgacgatttcgatgcatatatcaaagacatggcaaaggactcagattacaagttcagtcttcagttcgaagagctgaagcttatcggacttgacatcccgcacttcgctgccgatctacccctaaatcggtgtaagaataggtatacaaatattctgccatatgacttctccagagttaggctggtttcaatgaatgaggaggaaggcgctgattacattaatgccaactatattccaggatataatagcccccaggagtacattgctacccagggaccccttcccgagacgcgcaatgatttctggaagatggtcctccaacaaaagagccagataatcgttatgcttacacaatgtaatgagaagaggagggtgaagtgtgaccactattggccttttacggaggaaccaatcgcctacggggacatcacggtcgaaatgatctcggaagaggaacaggacgattgggcttgcagacacttcaggataaactatgcggacgagatgcaggatgtcatgcactttaattacactgcttggcccgaccacggcgtgccaacagccaatgccgccgaatctatcctgcagtttgtgcacatggtgagacagcaggctaccaagagcaaaggccctatgatcattcactgctccgcgggtgttgggaggaccggcaccttcatcgctctggatcggctcttacaacacataagagaccatgaattcgtcgatatcctcgggcttgtgtccgagatgagaagctatcgcatgtcaatggtccagaccgaagagcagtatatcttcatacaccagtgtgtgcagctcatgtggatgaaaaaaaaacaacagttctgcatttccgatgtcatttacgaaaatgtgagcaaatcctag

SEQ ID NO: 130979 - DNA, 1134 bp, synthetic construct
  misc_feature 1..1134: note = Description of Artificial Sequence: Synthetic coding sequence
  source 1..1134: mol_type = other DNA
atggtgaccgaaatgaatccaaacgtggtcgttatctctgtgctagccatcctctcaaccctcttaatcgggctgcttctggtgacgttaataattctgcgaaaaaagcacctgcaaatggctcgagagtgtggggccggcacgtttgtcaacttcgcatcactcgaacgcgacggaaagctgccatataattggtcaaaaaatggtctcaaaaagcggaaactgaccaatccggtgcaactagacgatttcgacgcctatattaaagatatggccaaggactccgactacaaatttagcctgcagttcgaggagctaaagctcatcgggcttgacatcccgcatttcgcggcagacctccctcttaaccgctgtaaaaatagatatacaaatatccttccttatgatttcagcagggtgcgccttgtatcgatgaatgaggaagagggcgccgattacatcaacgctaattatataccgggctataatagccctcaggaatacatcgccacacaaggtccgctcccagaaacaaggaacgatttttggaaaatggtattacagcagaaaagtcagattattgtcatgctaactcagtgcaatgagaaaaggcgagtcaaatgcgatcactactggccctttacagaagaacccatcgcttacggggacatcactgtggagatgatttccgaagaggagcaagatgattgggcttgcaggcactttagaattaactacgctgatgagatgcaggatgtgatgcattttaactatacagcttggcccgatcatggagtaccaacggcgaatgccgccgaaagtatactgcagttcgtgcacatggttagacaacaggcaaccaagagcaaaggacctatgatcatacactgtagcgcaggagtggggagaactgggaccttcatcgcactggatagactccttcagcacatccgcgatcacgaattcgtcgatatcctggggctcgtgtcagagatgagaagttatagaatgtccatggtgcaaacagaggaacaatacattttcatccaccagtgcgtgcagctaatgtggatgaaaaaaaagcagcagttctgtatttccgacgtgatttacgaaaacgtcagtaagagctag

SEQ ID NO: 130980 - DNA, 6888 bp, synthetic construct
  misc_feature 1..6888: note = Description of Artificial Sequence: Synthetic coding sequence
  source 1..6888: mol_type = other DNA
atggatttcctcatcatcttcctgctgctatttatcggcaccagtgaaacacaagtggatgtatccaatgtggtccctgggacccggtacgacattaccatatctagcatcagtaccacttacacaagtccagtgacaagaattgtgacaaccaacgtgacgaaacccggcccacccgtgttcctagccggggagcgggtggggagtgctgggatcttactgtcatggaatacgccgcctaatcctaacggccggatcatctcttacatagttaaatataaggaggtgtgcccatggatgcagaccgtgtacacacaggtgcgtagtaagcccgactccctggaagtactgctgaccaacttgaatcctggcaccacgtacgaaataaaggtcatcatcctcaacgcaaccaaggtgggatgcctgctatctccaatactactgaacactgtcctggagggacttgcgcgggccatcaatctcaccagagagtgccagactgtcgatgctggccagtgtgttcagtgtgcggttagggagccaaagcagggatcaactagcgggggaagagcccagactaataaaaagaccgccgttactagcgccgacctgaaccataccgccggcgacctccggaccggtaggctccccccgcagccgctgacagcagaacaaccaaattgggaagctcccccatcccggggcaggcttaccccacataaggctggctatagcagcgcaactgcggccggaacacaagctaatagggtgtggtcacggccactggccaagatacagacaacgattcgggagtactataagcatctttatgcaaagaaggaagggatcctgccaaactctttctatgaggcttcaatcatccttatccccaaaccagtacctgaaggaccacctcagaactgcgttacagggaacataacaggcaagagtttctctattttgtgggatccacctacaattgtgacaggaaagttctcataccgggtggaactatacggaccgtctggccgcattcttgataactccacaaaggacctcaagtttgcctttacaaaccttactccgttcaccatgtacgacgtctacatcgcagccgagaccagcgccgggacggggccaaagtctaacattagcgtttttacgccccccgacgtcccgggagccgtgttcgatttacaactcgctgaagtcgaatcaacacaggtacggattacctggaaaaagccaaggcagcccaatgggattatcaatcaatatagagtaaaagttttagtcccagagaccggcattatactggagaatacactgcttacaggaaataatgaatatattaacgaccccatggccccagaaattgtaaatatagtggaacctatggtgggactctatgagggctcagctgagatgagctcggaccttcattcattggcaaccttcatctataactcccaccctgacaaaaactttcctgcgcggaaccgggccgaggaccagacatcccccgtggtgactacgcgcaatcagtacatcaccgacatcgccgcagagcagctgagctacgtaatccgcagactggttcctttcacagagcatatgatctctgtgtccgccttcacaatcatgggagaaggaccgcctactgtgctgagcgtccgcacccgtcagcaggttccgagttccataaagatcatcaattataagaatatttcttccagctccatcctgctctactgggaccccccagagtatcctaacggaaaaattactcattataccatctacgcgatggaattagatactaacagggcatttcaaattacgactattgacaactcctttctgatcacagggctgaagaagtacacgaaatataaaatgagggtggcggcctcaacacatgttggcgagtcctctctctccgaggagaacgatatttttgtgagaacctcggaggatgaaccagagagctcgccccaggacgtcgaggtgatcgacgtaacagcagacgagatacgcctcaagtggtctcccccggagaagcctaacggaatcatcattgcctacgaggtactgtataaaaacattgataccctctatatgaaaaacacctccacaactgatataattcttaggaaccttcgaccccacacgctgtacaacatttcagtgcgttcctacacacgtttcggacatggaaaccaggtgagttctcttttatctgtaagaacgtcagaaaccgtcccagacagtgccccagagaatatcacctacaagaacatttctagcggcgaaattgaacttagctttctcccccccagctcccccaacggaatcatccagaaatataccatttaccttaaacgaagcaatggaaatgaggagcgcaccatcaacacaacaagcctgacacaaaatataaaagttctcaagaagtacacccagtacatcattgaagtgagcgcctcaaccttgaagggagagggagtacgttccgccccaatttctattcttactgaggaggatgccccagattcccccccccaggattttagcgttaaacagctgtctggagtcactgtgaagctgtcctggcaaccccctcttgaacctaatggcatcatcctctactacacggtttacgtgtggaacaggtcaagcctgaagactatcaatgttacagagacctctttggaactctctgatttagattacaatgtggagtattcagcctacgtgaccgcctctacaaggtttggagatggtaagacgcggagtaatatcatttcttttcagacaccagaaggagcaccatcagaccctcctaaagacgtgtactacgctaatctctcaagtagcagcataatactgttttggacccccccatccaagcccaatggaatcatacagtactatagtgtgtactatcgtaacacatcagggacatttatgcagaactttacgctccacgaagtgaccaacgatttcgacaacatgaccgtgtccactattatcgacaagctgaccatcttctcttactacacattctggttgactgcctccacgtccgtaggcaatgggaacaagagcagcgacatcatcgaggtgtacactgatcaggacattccagaaggtttcgtcggaaacctgacctatgagtcaatcagctcaaccgcaatcaacgtaagttgggttccacccgctcagccgaacggtctagttttttactacgtcagtctcatacttcagcagaccccacgacatgtgaggccacctctcgtgacttacgaacgcagcatttatttcgataacttagaaaaatatactgactatatcctcaagatcacacccagcacagaaaagggattttcagacacatataccgctcagctgtacatcaagactgaagaagacgtgcctgaaacttcacctatcatcaacacgttcaaaaacttgagctctacctcagtccttctgtcatgggatccgcccgtgaagcctaacggtgcgattatatcatacgatctgactctgcaggggcctaacgaaaattatagctttatcacgagcgataactatattatcttggaagagctatctccttttacactctactcattcttcgctgcggctagaacccgaaaggggctggggcccagttccatcctgtttttttacacggatgagagcgtcccactggcacccccccagaacctcacacttattaattgcactagcgacttcgtgtggctcaaatggtctcccagcccactccctggcggtatcgtgaaggtttattcttttaaaattcatgagcacgagaccgataccatctactataagaacatctccgggtttaagactgaagctaagctggtggggctggagcctgtaagcacctattcaattcgagtcagcgctttcacgaaggtgggcaatggcaaccagttttccaatgtggtgaagttcaccacgcaggaaagcgtacctgacgtggtccagaatatgcagtgcatggccacaagttggcagtctgtgctggtgaagtgggatcctcctaaaaaggccaacggcataattacccagtatatggtaaccgtcgagcgaaacagcaccaaggttagccctcaggaccatatgtacacattcatcaaactccttgccaacacctcttatgtcttcaaggtccgggcatccacctcagcgggcgagggcgatgagtccacatgccacgtatctacgcttccggagactgtgcctagcgtgccaaccaatatagcgttctctgacgtacagtccaccagcgccactctcacatggatcaggcctgatacaatactgggatattttcagaactacaagattacaacacagttacgggcccaaaagtgcaaagaatgggagtcagaagaatgcgtcgaataccagaagatccagtatttatacgaagcccatctgacggaagagacggtgtatggtctcaagaaattccggtggtaccggtttcaggtagctgcctctactaatgctggctatggcaacgcctcaaactggatatccactaaaacactgcccggtcccccagacggccctcccgagaacgtccacgtcgttgctactagcccatttagcattagcatatcttggagcgaacccgccgtgatcaccggccccacctgctatttgattgatgtgaaaagtgtagacaacgatgagttcaacatcagctttataaagagcaacgaggaaaacaagactatcgaaattaaggaccttgaaattttcacaaggtacagtgtggtgatcactgctttcacgggtaatatatccgcagcttatgtggagggtaaatcaagcgcagaaatgatcgtcacgactcttgagtccgctccgaaagacccacccaataatatgacgttccagaaaattcctgatgaagtaaccaagtttcagctgacctttctgccaccatcccaaccaaacggaaatatccaggtgtaccaggcgctagtttatagggaagacgacccaaccgccgtgcagattcacaatttgtccatcatacagaaaacgaataccttcgtaatcgcaatgttggagggtctcaaagggggacatacttacaatatttcggtttatgccgtgaactcagctggcgcaggtcccaaggtgcccatgagaatcaccatggacattaaggcccctgcgcgccccaaaaccaagccaactcccatctatgacgccacaggtaaacttcttgtaacatccaccacaataactattcgcatgccgatctgttattattctgatgatcacggaccgatcaagaatgtccaggtgctggtgacagagaccggcgcacaacatgatggcaacgttacaaagtggtacgacgcgtatttcaacaaggctcggccatattttacaaacgaaggcttcccgaacccgccctgtactgagggcaagaccaagtttagtggcaatgaagaaatctatatcatcggggctgataacgcctgcatgatcccaggcaatgaagataagatttgcaatgggccactgaagccaaagaagcagtacctgttcaagttcagggccacaaacatcatgggccagttcacagactcggattacagtgatcccgtaaagaccctgggcgagggcctttcggaacgcacagttgagattatcctgtccgttaccctttgtatcctgagtatcattctgctaggcaccgccatattcgcctttgctaggatcaggcagaagcagaaagagggcggaacatattcaccccaggatgccgagatcattgataccaagctgaaactggatcagcttataaccgtggcagacctcgaactaaaggacgagaggctcacaagactgctgtcctatcgcaagagcattaaacccatctccaagaaatcttttctccagcatgttgaggaattgtgcactaataacaatctcaaatttcaggaggagtttagtgaactcccaaaatttcttcaggatctctctagcacagatgccgatctgccttggaaccgcgctaagaacagatttcccaacatcaagccatataataataatagggttaaactgatcgcagacgcatctgtgccgggatctgactacatcaatgctagctacatcagcgggtacttatgccctaatgagtttattgccactcagggcccactcccaggcaccgttggtgacttctggagaatggtttgggagacacgggcaaaaactctggtaatgcttactcagtgttttgaaaaaggccggatccggtgtcaccagtactggcctgaagataacaaacctgtaacagtatttggggatatcgtaattacaaagcttatggaagacgttcaaatcgattggactatcagagacctcaaaatagaacggcatggcgattgtatgacagtgcgacagtgtaacttcacggcatggccagagcacggcgtacctgagaactctgcacctcttatccattttgtcaagcttgtccgcgcttccagggctcatgatacaactccaatgatagtccattgttcagctggcgtcgggcgtactggcgtatttatagcattggaccacctcacccagcatattaacgatcatgactttgttgatatttacggcctggttgcagagctgaggtcggagcgtatgtgcatggtccaaaatttagcacagtacatctttctgcaccagtgcatcctggatctcttgagcaataagggctcaaaccagccaatttgcttcgtcaattatagcgccctgcagaaaatggacagcctggatgccatggagggtgatgtggaactcgagtgggaggaaactacaatgtag

SEQ ID NO: 130981 - DNA, 5787 bp, synthetic construct
  misc_feature 1..5787: note = Description of Artificial Sequence: Synthetic coding sequence
  source 1..5787: mol_type = other DNA
atggcacctacatggggaccaggaatggtgtccgtggtcggtccaatgggactactagttgtgctgttggtggggggatgcgcggctgaggagccacctcgctttatcaaggagccaaaagatcagataggagtcagtgggggtgttgcgtcattcgtctgccaagctacaggggatccaaaaccccgggttacttggaataagaaaggtaaaaaagtcaactcacaaagatttgagaccatcgagtttgacgagtctgccggggcggtcctgcgaatccagcctctgaggacaccacgtgatgaaaatgtgtatgagtgcgtagcccagaattctgtcggtgagatcaccgttcatgcaaaattgactgtcctccgagaggaccagctgccttccggctttcctaacattgatatgggcccccagctcaaggtcgttgagcggacaaggacagccacaatgttgtgcgctgccagcggtaaccctgaccctgagatcacctggttcaaagattttctgcctgtggatccctcagccagcaatgggaggatcaagcagctacgatctgaccaggctttttcccacctcccgactggagctctccagatcgagtcttcagaagagactgatcaaggtaaatatgagtgcgtcgccactaactctgccggcgtgagatatagcagccctgcaaatttgtatgtgagggtccgccgcgtagcaccacgcttctcaatcttacccatgtcacatgaaattatgcccggggggaacgtgaatataacctgcgtggccgtagggtcgccgatgccctacgtgaaatggatgcagggggctgaagacttgactccggaggatgatatgcccgtcgggagaaatgtgctggagctcacagacgtcaaggactccgccaactacacatgtgtggctatgtccagcttgggcgtcatagaggcagtcgcccagataactgtgaagtctttacctaaagcccccggtactccaatggtaaccgagaataccgctacctctatcactatcacatgggactcaggtaatccagatccagtgtcttattatgtcatcgaatacaagtccaagagccaagatggaccctaccagataaaagaagatattaccaccacacggtattccataggtggattgtcacccaacagcgagtacgagatttgggtcagtgcagtgaactctattggccagggccctccatcggaaagcgtggtgacgcgtacgggcgaacaggccccagcgagtgccccccggaacgtgcaggcccggatgctatccgcaaccaccatgattgtgcaatgggaggaaccggtagagcccaatggtctaatccgggggtacagggtttactacaccatggaacccgaacatccagtgggaaattggcagaagcacaatgtcgatgatagcctcctcactaccgtaggatctttgctcgaagacgaaacctacacggttcgggtactggctttcaccagcgtcggagacggaccgctgagcgatcctatacaggttaagacacagcaaggggttcctgggcagcctatgaatttacgggcagaagccagatcggagaccagcatcaccctgagctggtcgccacccaggcaggagagtattatcaagtatgaactgctgttccgtgagggggatcacggccgtgaagtcggcaggacattcgatcccacaacatcatacgtcgtggaggatctgaagcccaacacggaatacgccttcaggctcgctgcaagaagtccacagggcctgggagcctttacccccgtcgtacgacaacgcacactccagtccaagcctagtgcgcctccacaggatgtcaagtgtgtgagcgtgagatccactgctatcctggtgagctggcggccacctccgccagaaacccacaatggagcccttgtgggatacagcgttcgctaccggcccctaggtagtgaggaccctgagccgaaagaggtgaatgggatcccacctaccacaacccaaatacttctcgaggcccttgaaaaatggacccaataccgcatcaccacagtggcccataccgaggtcgggccaggccctgaaagttcccccgtcgtggttcgcacagatgaggacgtaccatctgcccccccacggaaagtggaggccgaagcgttaaatgctacggccataagggtgttatggcggtcccctgcacccggaagacagcatggccagatccgcggatatcaggtccactacgtgaggatggaaggggccgaggctagagggcctccgcggatcaaggatgttatgctcgcagacgctcaatgggaaacagacgacactgcagagtacgaaatggtcatcactaacttgcagcccgagacggcctactcaattacagtcgccgcctacaccatgaagggagatggtgcccgtagtaagccaaaagtggttgtcactaaaggggccgtgctcggccgaccgaccttaagtgttcaacagactccagaaggatcactgttggccagatgggaacctcccgcgggaacagccgaagatcaggtgttgggctataggctgcagtttgggcgcgaagactcaactcctttggcgactctggagttcccaccatcagaagatagatatactgcttcgggggttcacaaaggtgctacctatgtctttcgcctggccgcccggagtcggggcggcctgggagaggaggccgccgaggtgctgtcaattccagaggatacccccagggggcaccctcagatcctcgaagccgcaggaaacgccagcgctggcaccgtgttactcaggtggctgccaccagtgcctgctgagagaaatggcgcaatagtgaagtatacagtagcagtgagggaggcgggcgcactcggcccagccagagaaactgaactccctgccgctgccgaacccggcgctgagaatgccctcactctgcaagggctaaagcctgataccgcctacgaccttcaggtgcgggctcatactagacgggggccgggtccatttagcccacctgtgagatacagaacattccttagggatcaggtttcccctaagaactttaaagtgaaaatgataatgaaaacctcggtgctacttagctgggagttccccgataattacaactcgccaactccctataaaattcagtataacggcttaacactggacgtggacggtagaacaacaaaaaaactgattacccatctgaagcctcacaccttctataacttcgtcttgacaaatcgagggagtagcctgggggggcttcagcagactgtcactgcatggaccgcttttaacctcctgaatgggaagccatccgtggcgcccaagccggatgctgacggattcatcatggtttacctccctgatggacagtcgcccgtgcccgtgcagtcctactttatcgtcatggtcccactgaggaaatctcggggcgggcagttcttaaccccactgggctctcctgaggacatggacctggaagaactgattcaggatatcagtaggcttcagaggcgatctctccgacactcgcggcagcttgaggtcccaaggccctacatagccgccagatttagcgttctaccccccaccttccacccaggcgaccaaaagcaatacggtggctttgataataggggtttggaacctggccacagatacgtgctctttgtgctggctgtacttcagaagtcagagcctacctttgctgcatcccccttttctgatcctttccagctcgataatccggatccacaacctatcgtggatggggaggagggtctcatctgggtgatcggacccgtgctggccgtggtctttattatttgcatcgttatcgctatactgctgtacaagaacaagccagactcaaagcggaaggatagtgagccgcgcacaaaatgcctgctgaacaacgcagacctcgcaccacatcatccgaaggatccagttgagatgaggaggatcaatttccagacaccaggaatgctgtcacaccctccaatcccgattgccgacatggctgagcatactgaaagacttaaggcgaatgactctcttaaactatcccaggaatacgagtccattgatcctggccaacagttcacctgggagcattctaatcttgaagttaacaaacctaagaaccgctatgcaaacgtgatcgcttacgaccactcccgcgtgatactccaaccaatcgaggggattatgggctccgactacatcaatgccaactacgttgacggttaccgctgccaaaatgcctacatcgccactcaggggccgctgccggagacattcggggatttctggagaatggtgtgggagcagcgctcagccactatcgtaatgatgacccgccttgaggaaaaatccagaatcaagtgtgaccaatattggccaaaccgggggactgaaacatacggattcatccaggtaactttacttgatacaattgaactcgcgactttttgcgtgagaaccttcagcctgcataaaaatggcagctctgaaaaaagagaagtacgtcagtttcagttcactgcttggcccgaccacggtgtgcccgagtacccaacaccattcctggcgtttctgcgcagggtgaagacctgcaacccgcccgacgccggacccatcgtggtccactgttcagcaggtgtgggaaggacgggatgttttatagtcatagacgccatgttagagcgtatcaagcctgagaagacagttgacgtctatggccatgtgacacttatgagatcgcagcgcaattatatggttcaaaccgaggaccagtactcattcatacacgaagccttgctggaggctgtgggttgtggtaatactgaggttccagccagaagcctgtatgcatatattcagaaattagctcaagtcgaacccggagagcatgttactggcatggagctggagttcaaacgtctagccaatagcaaagcccatactagccggttcatcagcgccaatctcccctgcaacaagttcaaaaaccgactggtgaatattatgccatacgagagcacgcgtgtgtgcctgcagcccattagaggagtcgaaggctcggactacataaacgcttcttttatcgatggctaccgtcagcagaaggcttatatcgcgactcagggacccttagccgaaacgaccgaggatttctggaggatgctttgggaaaacaatagcacaatcgttgtcatgctgacaaagctacgggagatgggccgtgaaaagtgccatcagtattggcctgcagaaaggagcgcacgctatcagtacttcgtcgttgaccccatggccgaatacaacatgccacagtacattttaagggagtttaaggttaccgacgccagagacggacaatcaagaacggtcaggcagttccaattcaccgattggcccgagcagggagttcctaaatctggcgagggattcatcgacttcattggacaagtgcataaaaccaaggaacagttcgggcaggatggcccaatctcagtccactgctctgcaggtgtggggagaaccggagtgttcataaccctctcaatagtgttggagcgtatgcggtacgagggggtggtggacatattccagactgtcaagatgctacggacacagaggccagctatggtacagactgaggatgaataccagttctgttatcaagcggccttagaatacctcgggagctttgaccactatgccacgtag

SEQ ID NO: 130982 - DNA, 5733 bp, synthetic construct
  misc_feature 1..5733: note = Description of Artificial Sequence: Synthetic coding sequence
  source 1..5733: mol_type = other DNA
atggcccccacctggggtcctgggatggtgtccgtcgtgggtcctatgggcctgctagtagtgctcctggttggcggctgtgcggcagaagaaccaccccgctttataaaggaacccaaagaccagatcggagtaagcggcggtgtcgctagctttgtctgtcaagccactggggatcccaaaccaagggtgacttggaataagaaagggaaaaaagtcaattctcaacgatttgaaaccatcgaattcgacgagagcgccggcgctgtgctgagaatacagcccttgaggactccaagagacgaaaatgtctatgagtgtgtagcacagaattccgtgggtgaaattacggtgcacgccaagttaactgtgctgcgggaagatcagcttcccagcggattcccaaacattgacatgggaccgcagttaaaagtggtcgaaagaactaggacagcaactatgctatgtgccgcatccggcaatcccgatcccgagattacgtggtttaaagactttttacccgtcgatccttcggcatcgaatggacgcataaagcaactacggtctggggccttacagattgagtcctccgaggagaccgaccagggaaagtatgaatgtgtagctacaaattcggccggggttcgatatagttcccctgctaatttgtatgttcgggtccgaagggtggctccacggttttccatcctgcctatgtcccacgagataatgccaggtggcaacgtgaacataacatgtgtcgctgtcggtagccctatgccatatgtaaagtggatgcagggggccgaggacctcactcccgaagacgatatgcctgttggcagaaatgttcttgaactgacagatgtgaaagacagtgcaaattatacttgcgtagccatgtcatccctgggcgtgatcgaagcggttgctcaaataaccgtcaaatcactgcccaaggcccccgggacccctatggttaccgagaacacagcaacttccattacaatcacctgggattcgggaaaccccgaccctgtatcctactatgtgatcgaatacaagtctaagagccaggatggcccgtaccagattaaagaggatattactactactcggtattctatcggtggtctgtcacctaattccgagtatgagatctgggtgtctgctgtgaattccattggccagggtcccccaagcgagtcagtagtgaccagaactggcgagcaggctcctgcaagtgcgccgcggaacgtgcaggccaggatgctatcagctaccacaatgattgtgcagtgggaggagccagtcgaaccaaatggtctcattaggggatatagagtttattacacaatggagcctgagcatcccgtgggaaattggcagaagcataacgtggacgactccttattaactaccgtgggcagtttgcttgaagatgaaacctacacagtgcgggtattggccttcacctcagtcggggacggacccctgtccgatcccatacaggtgaaaactcaacagggagtgcccggacagccaatgaacctccgggccgaggctagaagcgaaacttctatcacactctcttggtctcctccacgacaggagtccataattaagtatgagctgctctttcgcgaaggcgatcacggacgggaagtaggacgaacgttcgaccccactacatcatatgtggtcgaggaccttaagccgaataccgaatatgccttcagactcgccgccagatcgccgcaagggctgggggcatttacacccgtggttcgtcagaggacccttcagtccaaaccatctgcacctccacaggatgttaaatgtgttagcgttcggtcaaccgctattcttgtgagttggaggcctcctcctcctgagactcacaatggggctctggtcggatacagcgtcagatacaggcccctgggcagtgaggaccccgagcctaaggaggtgaatggcatccctccaaccaccacccaaattctgctggaggcactggaaaagtggacacagtaccgtattacaaccgtggcccacactgaagtagggccaggtcccgaaagctcacccgtggtggtgcgaaccgacgaggacgttcccagtgcaccacctcgcaaggtggaggcagaagcgctcaacgctaccgcaattcgggttttgtggaggtccccagcacctggtcgacaacatggccagattagagggtatcaggttcactacgtgcgaatggaaggcgcagaagcacgcggccccccccgtatcaaagatgtgatgctcgctgacgcccaggagatggtgataaccaacctgcagcctgaaactgcgtattccattactgtggccgcttacaccatgaaaggggacggcgcccgcagtaaacctaaagtcgtcgtcaccaaaggcgcagtacttggacgaccaaccctcagtgtccagcagacccccgaaggaagcctgctagctcggtgggaaccccccgcaggcacagcggaggatcaagttttgggctaccgactccaatttggtagagaggacagcactcccctagctaccctagagttccccccctctgaagatcgctacaccgcgtcaggcgtccataaaggcgccacatacgttttcagacttgctgcacgctctcgcgggggtctgggagaagaggctgccgaagtactttcaattcccgaggatacccctcgaggtcacccacagatcctggaagctgccgggaatgcttcggctgggactgtgttgctgaggtggctgccacccgtgcccgcagaaagaaacggagccatagtgaaatatacggtcgctgtcagagaagcaggggcattggggccggcccgcgagaccgaactgccggctgccgccgaaccaggggcggaaaacgcgttgactctgcagggactaaagccagatacggcttatgatttgcaggtgcgggcccacacccgtcgcggaccgggacccttttctcccccggttcggtacaggacattcctgagggaccaggttagtcccaagaattttaaagtgaagatgatcatgaaaacgtccgttctgctttcttgggagtttcccgacaactacaactcgccgaccccttataaaatacagtataatgggctcaccctagatgtggatgggcggacgacaaagaaattaataacccacctcaagccacacaccttctataattttgtgctgacgaacagaggctcctctctggggggattacagcagacagtaacggcctggacggcctttaaccttcttaatgggaagccatctgttgccccgaaacccgatgcagacggcttcatcatggtctatctcccagatggtcaatctccagtccctgtgcaatcgtatttcatcgtaatggtaccactaaggaagtcacggggaggccaatttctgacccccctaggatctcccgaagacatggaccttgaggaattgatccaggatatatcacggctgcagaggaggtctcttcgccactctagacagctagaagtaccaaggccttatatcgccgcccgattcagcgtcctgccaccaacatttcatccaggcgaccagaaacagtatggcgggtttgacaacaggggcttggaacctggccaccgctatgtactcttcgtccttgcagtgctccaaaaatcagagcctacattcgcggccagccctttttcagacccatttcagctggacaacccagatccccagcccatcgtagacggcgaggagggacttatctgggtgatcggtcctgtgctggccgtagttttcattatttgcatcgttatagccatcttactctataaaaacaaacctgacagtaaaaggaaggatagcgagcctcgtaccaagtgtttgctcaataatgctgatctcgccccccaccacccaaaagatcctgtcgaaatgaggcgaataaactttcagacacctggtatgctctcacacccccctattccgattgctgatatggccgagcacaccgaaagactgaaggcgaacgatagtctcaaactgtcacaggagtacgagtccattgatcccggccagcaattcacctgggaacatagtaacttagaagtcaataaacctaaaaataggtacgctaacgtgattgcctacgatcattcccgagtgatactgcagccgatcgagggaatcatggggagtgattatattaatgctaattacgtggatggttacagatgccaaaatgcctacatagccacacagggtccattgcccgagacctttggggacttctggagaatggtctgggaacaaaggtccgccactattgttatgatgacaaggttggaagagaagagccgtataaaatgcgatcaatattggccgaataggggaactgagacttacggattcattcaagtaacactcctcgataccattgaactcgccacgttttgtgtgagaactttcagtttacataagaatggcagtagcgagaagcgcgaggtccgacaattccaatttaccgcctggccggatcatggcgtgcctgagtatccgacaccattcctggcttttttgagacgggtcaagacttgtaaccctccagatgccgggcctatagtggtgcattgctcggccggggtaggtcggacgggctgcttcattgtgattgatgcgatgctggaaagaatcaagcctgaaaaaaccgttgacgtgtatggacacgtcaccctgatgaggagtcaaagaaactacatggtccagacagaagatcagtatagttttattcacgaggctctgcttgaagccgtgggatgtggcaacacagaagtgcctgcgcgtagcctctacgcctacatccagaaattagcccaggtggagcctggggagcacgtgacgggcatggagctcgagttcaaacggctggccaactcaaaggctcatacctccagatttatttctgcaaatctgccatgcaacaagttcaaaaaccgactcgttaatataatgccatacgagagtacaagagtgtgcctgcagccgatcagaggggtagaggggtctgattacattaatgcaagctttattgatgggtaccgacagcagaaggcatatattgccacacaagggcctttagccgagaccacggaagatttctggcggatgctttgggaaaacaacagtactatagtggtaatgctcacaaaactgcgtgagatgggccgtgaaaagtgccaccagtactggccagctgagcgtagtgcacggtaccagtactttgtggttgaccccatggctgaatataatatgccccagtacatcctgcgggaatttaaagtgacggatgcaagagatggtcaatcccgtactgtgcgccaattccagttcacagactggccagaacaaggcgtgcctaagtccggagagggattcattgactttatcggacaagtgcataaaaccaaggagcagtttgggcaagatggacccatcagcgttcactgctccgcgggcgtgggccggactggcgtgtttataacactgtccatcgtgctggagcgtatgagatatgaaggcgtggtggacattttccagaccgtaaagatgctgaggacgcagcgcccagccatggtgcagacagaagatgaatatcaattctgctatcaggccgccctggagtatctgggtagttttgatcattatgccacctag

SEQ ID NO: 130983 - DNA, 4506 bp, synthetic construct
  misc_feature 1..4506: note = Description of Artificial Sequence: Synthetic coding sequence
  source 1..4506: mol_type = other DNA
atggctcccacctgggggccagggatggtcagcgtagtagggccaatgggccttttggtggttctgctggttggcggctgtgcggccgaagagccccccagattcatcaaggagcccaaggaccagattggagtttctggcggggtcgccagtttcgtgtgtcaagctaccggcgacccgaagccccgagtgacatggaataaaaaagggaaaaaggtcaattcacagcgttttgagaccatagaatttgacgagtctgcgggggctgtgttgcggatccagccacttcggacaccgagagatgaaaatgtctatgaatgtgtcgctcaaaactctgttggtgagataacggtccatgcaaagcttactgtgttgcgcgaggatcagctaccctctggatttcccaacatcgacatggggccccagcttaaggtggtcgagcggacccggacagccactatgctgtgcgcggccagtggcaatcccgacccggagatcacgtggtttaaagactttttgcccgtagatccctccgccagtaatggccggatcaaacaactcaggagcggtgcgctgcaaattgagtcttcagaggaaactgaccagggtaaatatgaatgcgtggccacaaacagtgcgggtgttaggtactccagccccgccaacctgtatgtccgggttcgtagggttgcccccaggttcagcatcctgcccatgtctcacgagataatgcctggcggcaatgtgaatatcacctgtgtggctgtgggttctccaatgccttatgttaagtggatgcaaggagcggaggacctgactcctgaagatgacatgcccgtgggaaggaacgtcctcgaactgacagacgtgaaagacagcgccaattacacgtgtgtagccatgtcatcgctcggggttatcgaggctgtcgctcagattactgtcaagagcctgcccaaagcacccggcacccctatggtgacagaaaatactgcgacctccattacaatcacctgggatagcgggaatccagatcccgtgtcttattatgtgattgagtataagagcaaaagccaagacggtccataccagataaaagaagacatcaccacaacacgttactccattggcggcctcagccccaacagtgagtacgaaatatgggttagcgccgtgaattccattggacagggacctccaagcgagagcgtagtcacacgcacaggagaacaggctcctgcctccgccccccggaatgtgcaggcacgcatgctgtccgcaaccaccatgatcgtgcagtgggaggaaccagttgaacctaacggcttaatccggggataccgcgtgtattacacgatggagcccgagcatccggtggggaattggcagaagcataacgttgatgactcactgctcacaacggtcggctctctcctggaagacgaaacatacactgtacgggtgctggctttcacatccgtgggtgacggcccactgtccgacccaatccaggtcaagactcagcagggggtgcctggacagccgatgaacctccgtgcagaagctcgttcagaaacgtccatcacattgtcttggtcccctccaagacaggagagcatcatcaagtatgagctgctgtttcgggaaggtgatcacggccgtgaggtgggtagaacttttgatccaaccacctcttatgtggtcgaagatctgaaacccaatacagagtatgcctttcgtctcgccgcccgttcacctcaaggcttgggcgccttcacacccgtcgtgcggcaaaggactctacagagtatttcccccaaaaacttcaaagtgaaaatgatcatgaaaacgagcgtcctgctgagttgggaatttccggataactacaacagcccaaccccatacaagattcagtataacgggctaaccctggacgtggacggacgcaccaccaagaagttgatcacccatcttaagcctcacacattttacaacttcgtgttgaccaacagaggctcatccctcggcggcctccaacagaccgtgaccgcctggacagcctttaatctgctgaatgggaagccatctgtggcaccaaagcctgatgccgacggtttcatcatggtgtacctacctgacggtcagagtcccgtccccgtccagtcctactttatagttatggtaccacttagaaagagtcggggtggccagttcctcactcccttgggctcccccgaagatatggacctggaagagctcatccaggacatttcccggctgcagaggcgcagcctgagacacagtcgccagttggaggtgcctcgcccttacattgctgcacggttctcggtattaccccctacatttcaccctggcgaccagaaacaatacggcgggtttgacaatcgcgggctggagcccggccaccggtatgtccttttcgtgctggctgtactgcagaagtccgaaccaactttcgctgcttccccatttagtgatccattccaattggacaatcccgatccacagcctatcgtggacggggaagagggcctgatttgggtaattgggcctgtcctagccgtagtcttcattatttgcattgtcattgccatacttctctacaaaaacaaacctgactcaaagcgcaaggatagtgagccccggaccaagtgtctcttaaacaacgccgatctcgctcctcatcaccctaaagacccggtggagatgaggcgcattaatttccagacccctggaatgctcagtcacccacctatcccaattgctgatatggcagagcatactgaacggctgaaagcaaatgacagcttgaaattatcccaagaatatgagtcaatcgaccctggtcagcagtttacctgggagcacagtaaccttgaggtgaataagccaaagaatcggtacgccaacgttattgcatatgatcactcacgggttatactgcagccaatagaaggcataatgggaagcgactacatcaatgctaactatgtagatggctataggtgccagaacgcttatattgccacgcaggggccattgcctgaaacatttggggatttctggcgtatggtatgggaacagaggtccgccaccatcgtcatgatgacccgattggaggaaaaatcgcgtatcaagtgcgatcagtactggcccaatagagggacagaaacctacggttttattcaggtaactcttttagatacaattgaactggctacattctgcgtcaggacttttagtttgcacaagaacggcagcagcgaaaagcgggaagtccggcagtttcagtttaccgcctggcctgatcacggcgtgccggaatatcccactccatttcttgcctttctaaggagagtgaaaacttgcaatcctccagacgctggtcccattgttgtacattgttctgccggagttggcaggacagggtgcttcattgttatcgatgccatgctcgaacgtatcaagcccgagaaaacagtcgatgtgtatgggcacgtcaccttgatgcggtcacagcgcaattacatggtacagactgaggatcaatactccttcatccatgaagccttgctggaggccgtaggctgcgggaacacagaggtacctgcccgaagcttgtacgcctatattcagaaactcgcccaagttgaaccaggcgagcatgtaacagggatggaactggaattcaaaaggctcgccaatagtaaggctcatacatcacggttcatatccgccaatctgccatgcaataagtttaagaatcgattggtaaacattatgccctacgagtctacccgcgtatgtctgcagccgattcgcggcgtggagggtagtgattacataaacgcatccttcattgacgggtaccgacagcagaaggcctacatcgctacacaggggccactcgccgagactactgaggacttctggcgtatgctctgggaaaataatagtacaatcgttgtgatgttaaccaaattgcgtgagatgggacgggagaagtgtcaccaatattggcctgccgagagatccgcacggtaccaatacttcgtggttgaccccatggctgaatacaacatgccccagtatatcctgcgcgagttcaaggtgacggatgctcgtgacgggcaatctcgcacagtgcggcagttccagttcaccgattggcccgagcagggggtgcccaagagtggggaggggtttatcgactttatcgggcaagtgcataagactaaggagcagttcggccaggacggaccaatctccgtgcactgttctgctggggtcggcagaaccggcgtgtttattacattgtctatcgtgttggagcggatgcgttatgaaggagtggtagatatctttcaaacagttaaaatgctacgcacccagaggcctgcaatggtacagacagaagacgagtatcagttctgttatcaggcggccttggaatatttaggctccttcgaccactacgcaacctag

SEQ ID NO: 130984 - DNA, 5847 bp, synthetic construct
  misc_feature 1..5847: note = Description of Artificial Sequence: Synthetic coding sequence
  source 1..5847: mol_type = other DNA
atggcccccacctgggggcctgggatggtttcggtggtgggtcctatggggctgctggtcgtgctcttagttggggggtgcgccgctgaagagccccccagattcataaaggaacccaaggaccagataggagtttctgggggggtcgctagtttcgtgtgtcaggcgacaggagacccaaaaccccgggttacttggaacaagaaaggcaaaaaggtgaattctcagagatttgagaccatcgagtttgatgagtccgctggggctgtgctgcgaatccaacccttaagaacacccagggacgaaaatgtgtacgagtgcgtcgctcagaacagcgtgggagagataacagttcacgctaagctgaccgtgctgcgggaggaccaacttccctccgggtttcctaacattgatatgggcccccagctaaaggtggtcgaacggacccgcactgctactatgttgtgcgccgcaagtggtaatccagaccccgaaatcacttggttcaaggatttccttcctgttgacccaagtgcttccaatggccggattaaacagctcagatcagatcaggcctttagtcatctcccaaccggagcccttcaaattgaatctagtgaggagactgaccaagggaagtatgagtgcgtcgctactaactccgcaggagtgcgctatagtagcccagcaaatctttatgtcagggtttggaggacggttcgtagggtggctccacgcttctccatcctgcccatgagtcacgaaataatgcctggtggcaatgttaatattacgtgcgttgctgtcgggtcccccatgccctacgttaagtggatgcaaggggctgaggacctgacccctgaagacgatatgcccgtgggaagaaacgtgcttgaactgaccgacgtgaaggacagcgcgaattacacctgtgtggctatgtctagcctaggcgtgatcgaagccgtcgctcagatcaccgtcaagtcccttcccaaggctcctgggacgccaatggtgaccgaaaacacagctacctccattacaattacctgggattctggaaatcctgaccccgtctcatactacgtcatagaatataaatccaagtcccaggatggaccataccagataaaggaggacatcactacaacgagatattccataggcggtctttcccccaactcggagtacgaaatctgggtttctgctgtgaattcaataggccaagggcctccttcagagtccgtagttactaggactggagaacaagctccggcgtccgccccacgaaatgtacaggcccggatgttaagcgcaactactatgatcgtgcagtgggaagagccagtggagcctaatggcctgattagagggtatcgagtttactacacaatggagcccgagcacccagtcggtaactggcaaaagcacaatgtggacgattcattgctgacaactgttgggtccttgctggaggacgagacttataccgtgcgggtcttggcttttacatcagtcggggatggaccactgtccgaccccatccaggtgaagacccagcaaggagtgcctggtcagcccatgaacctccgcgccgaagcacgatcggaaactagcatcacactctcctggtcaccaccaagacaggaatcaattattaaatacgagcttctgtttcgcgagggggaccatggccgtgaggtgggtcgcacttttgatccaacaacaagctatgtggtggaagacttgaagccaaacacggagtatgccttccggcttgctgcgaggtcacctcaagggctgggcgccttcaccccggtcgtgcgacaacgaaccttgcagagcaaaccaagtgcacctcctcaagatgtaaagtgcgtgtcggtgagaagcaccgctatactggttagctggagacctccccccccagagactcataacggcgccctggtcggctactccgtcagatatcggcccctgggcagtgaagaccctgagcctaaagaggtaaacggaataccgccgaccactactcagatccttcttgaggctctcgaaaaatggactcagtaccgaattaccactgtagcccacacagaagtcggccctgggcctgagagttcacccgtcgttgttaggaccgacgaagatgtgcccagtgctcccccccgcaaagttgaagccgaggccctgaatgccacagcaatacgggtgttgtggcgcagtccagcacctggccgccaacatggtcaaatacgtggataccaggtgcattacgtccgcatggaaggagcagaggcgcgcggacccccccgaattaaagatgttatgctcgccgatgcacagtgggagacagacgacaccgctgaatatgaaatggtcataaccaatttacagcctgagacggcctatagtatcactgtggcagcctacacaatgaaaggcgatggggcaaggtccaaaccaaaggtggtggtgactaaaggagccgttctgggcaggccaacgttatccgtgcagcagacccccgagggcagtctgctggcaagatgggaaccccccgcaggcaccgctgaagaccaggtactggggtatagattacagtttggacgagaggactccacacccctcgcgacactcgagttccccccaagtgaagatcgctataccgcctcgggcgttcacaagggggccacatacgtcttccgactggccgcccgtagccgcggaggcctgggcgaggaggccgcagaagttctctctattcctgaagatacaccccggggccaccctcagattctggaggccgccggaaatgcgagtgcgggaactgtccttcttaggtggctgcctccagtacccgctgagaggaacggtgctattgtaaagtacactgtcgccgtgagggaggcaggcgctctgggacccgcaagggaaacagaactgccagccgcagcagagcccggcgcagaaaatgcactgactcttcagggtctaaaacctgacacggcatacgatctgcaggtgcgcgcgcacaccagacgcggtcctgggcccttcagtcctcctgtgagataccgcactttcttgcgcgatcaggtcagccctaagaatttcaaggttaagatgatcatgaagacttcagttctcctgtcttgggaatttccagacaactataattctccaacaccgtacaaaatacagtataacggactgactttagatgtggatggcagaacaacaaaaaaattgatcacacatttgaaaccacacacattttacaacttcgttctcactaatcgaggctcatccctgggcggccttcagcagacggttaccgcctggaccgccttcaatttgctgaatggaaaacccagtgtagcccccaaacctgatgcggacggcttcataatggtgtatctgccggacggccagagtcccgtgccagtgcagtcctacttcattgtgatggtgcctctgcggaagagcagagggggtcagtttctgacccccttggggtccccggaagacatggatctagaggaactcattcaagatatcagtaggctccaaaggcgatcacttaggcacagccgccaacttgaagtaccccggccttatattgccgctagatttagtgttctgcccccaactttccaccctggggatcagaaacagtacgggggatttgacaaccgggggcttgagcccggccaccggtacgtccttttcgtcctggccgtactgcagaaaagcgagcctacatttgccgcctcccccttcagcgaccctttccaactggataaccccgatccgcagcctattgtggatggtgaagagggactcatctgggtgatcgggccagtgctagctgtggtttttattatttgcatcgtgatcgccatacttttgtacaaaaacaaacccgatagcaagagaaaagacagtgaaccccgcactaagtgtcttctcaacaacgcagatctcgcgccacatcaccccaaagatccagtcgaaatgagaaggattaactttcagacacccgatagcggtctcagaagcccactgagagagccaggctttcattttgagagcatgttgagccaccctcccatcccaatagctgatatggccgaacacacagagcgcctgaaggcaaatgacagcctgaaactctcacaagagtatgagtctatcgatcccgggcagcagtttacatgggagcatagtaaccttgaagtaaacaagcccaagaacagatatgctaacgtaatcgcttatgaccacagcagggttatcctgcagcccattgaggggatcatgggctccgattatatcaacgcaaattacgtcgatggctatcgctgccagaatgcctacatcgcaacccagggaccgctccccgagacattcggtgacttttggcgtatggtgtgggaacagcgctctgcaaccattgtgatgatgaccaggctggaagaaaaatctcgaattaagtgcgaccagtactggcccaatcgtgggactgagacttatgggttcatccaggtaacactcctcgatactattgagttagctactttctgcgtgcgaactttcagcctgcacaagaacggttctagtgaaaaacgggaggtcagacagtttcagttcactgcctggcctgatcacggggttcctgaatatccaaccccatttctggccttcctaaggagagttaagacatgcaaccccccagacgctggccccatcgtagtccactgtagtgccggagttggtagaaccggctgcttcattgttatagacgctatgcttgagagaatcaagcccgaaaagacagttgatgtttatggccacgtgactctgatgaggagtcagaggaattacatggtgcagaccgaggatcagtactctttcatacatgaggcactgctggaagctgtgggctgtggcaataccgaggttcccgcacgatccctgtacgcatacattcaaaaactcgcacaagtggagccgggcgaacacgtgactggaatggagctggagtttaagaggttagctaattcaaaagcccacacaagcagatttatctctgccaatctgccatgcaataagttcaaaaatcggctggtaaacattatgccgtatgagtccacaagggtatgccttcaacctatccgcggcgtggagggtagtgactacatcaacgctagcttcattgacggatatcgacagcagaaggcgtatattgccacccagggcccactcgccgagacaacagaggatttttggcgtatgttatgggagaataattccaccatagtagtcatgctcacaaaactgagggagatgggccgcgagaagtgccaccagtattggcccgctgagcggagtgcccgttaccaatactttgtggtggatcccatggccgaatacaacatgccccagtacatccttagagaattcaaggtcactgatgccagggacggacaatccagaacagttcgccagttccaattcactgattggcctgaacagggagtgccaaagtctggagaagggttcatagactttatagggcaggtgcacaagactaaagagcagttcgggcaggatgggcctattagcgtgcattgtagcgccggggtgggccgcaccggtgttttcatcaccctatcaattgtgctggaacgcatgcggtacgagggcgttgtcgacattttccagactgttaaaatgctacggacccaaaggcctgccatggtgcagaccgaggatgagtaccagttttgttatcaggctgcgctggagtacctaggctccttcgatcattatgcgacatag

SEQ ID NO: 130985 - DNA, 4593 bp, synthetic construct
  misc_feature 1..4593: note = Description of Artificial Sequence: Synthetic coding sequence
  source 1..4593: mol_type = other DNA
atggctcctacatggggcccagggatggtatccgttgtgggacctatgggtttattagtcgtcttgctggtcggcggatgcgccgccgaggagcctcccaggttcattaaagagcctaaggatcagattggggtgtcgggtggcgttgcttctttcgtatgtcaggcaaccggagacccaaagccgcgggtcacctggaacaagaagggaaagaaggtgaacagccagaggtttgagactatcgagttcgatgaatccgctggcgccgttctgagaatccagccactccgtacgccacgtgacgagaatgtgtatgagtgcgtagctcagaattccgtaggtgagataaccgtccatgccaaactgaccgtgctgagggaagaccaactcccaagcggattcccgaatattgacatgggcccacagctgaaagtcgtggagcggacgcggacagccaccatgctttgcgcagccagtggcaatcccgatcccgagatcacttggtttaaggactttctgccagtagatcctagcgccagtaacggccgcatcaagcagttgcgcagcgaccaggctttctctcatctgcctacgggcgcactgcagatagaatccagcgaagagaccgatcagggcaagtacgagtgtgtggccacaaactctgcgggggtccggtatagttctcctgccaacctttacgtacgagtctggcggacagtccgtagagtggccccccggttttccattctgcctatgagccacgaaatcatgccaggaggaaatgtgaatattacttgtgtagcagtaggatcccccatgccttacgttaagtggatgcaaggggccgaggatctcactcctgaggatgatatgccagtggggcgcaatgtgctggagctgacagacgtcaaagacagcgctaattacacctgcgtggcaatgtcctcattaggggttatcgaggcagtagcacagatcacagtcaagtctcttcccaaggcacccggaacccccatggtgaccgaaaataccgctaccagcattacaatcacctgggacagcggaaacccagatccagtttcctactacgtgattgaatataaatccaagagccaggatggtccttaccagatcaaagaggacatcactactacaaggtactctattgggggactgagccccaattcagagtacgagatctgggtgtccgcagtgaacagcattggccagggtccaccttcggaatctgtggtgactcggaccggggagcaggcacctgcttcagcccccagaaacgtccaagcaagaatgttgtcagccacgacaatgatagtccagtgggaagaacccgtggagcccaacggcctgatccgaggttatcgtgtgtattacaccatggaacccgagcatccagtgggcaattggcaaaaacacaatgttgacgacagccttttgacaaccgtcggcagcctattagaggacgagacctacactgtccgggtgctggcgtttacaagcgttggggacggcccgctcagcgatcccatccaagtgaaaacccaacaaggggtccctgggcagcccatgaatttacgcgcagaagcaagatccgagacctctatcactttgagctggagcccccccaggcaggagtcaattataaagtacgaattgctcttcagggaaggcgatcatgggcgggaggtgggtcggacttttgatcctactaccagctatgtggtggaagacctgaagccgaacactgaatacgcatttcgactcgccgcaaggagccctcagggactgggggctttcactccagtagtccggcagcggactttacagagcatctccccaaaaaacttcaaagtcaagatgattatgaagaccagtgtcctgctgtcgtgggagtttccagacaactacaacagccccaccccttacaagatccagtataatgggctgaccctggatgtggacggcagaactaccaagaagcttatcacacacctgaagccacacaccttttacaactttgttctaactaatcgaggaagttcccttggcggcctccaacagaccgtgacggcctggacagcctttaatctgctgaacgggaaaccatctgtggctccgaaaccagatgctgacggttttataatggtgtacctccctgatggccaaagcccagtcccagtccaatcctatttcattgtgatggttccactaaggaaatcccgtggtggacagttcttgacccctttgggcagccccgaagacatggacctggaagagctgattcaggatatttcacggttgcaacgccgttccctgagacactctagacaattggaggtcccccgcccctacatagcagcacggttttccgtgttacccccaacattccatccaggcgaccagaagcagtacggaggatttgataatcgggggctcgaaccaggccataggtacgtacttttcgtgttagccgtgctccaaaaatcagaaccgaccttcgcagcctcaccattttcggaccccttccagctagataacccagacccccagccgattgtggacggagaggaaggcctgatctgggtgattgggcccgtgttagctgtggtgtttattatttgtattgttattgccatcttgctctataaaaacaagccagattcaaaaaggaaagacagcgagccaagaaccaagtgccttctcaataacgctgatttggcaccacatcacccaaaagatcctgtggaaatgcgacggattaatttccaaacccccgactcaggccttaggtcccctcttcgggaaccaggcttccacttcgagtccatgctgagtcatccaccaattccaatcgccgacatggcagaacatactgagaggctgaaagctaacgacagtctcaaactttcccaggaatacgaatccatcgaccccggccagcagttcacatgggaacatagtaacttggaagtgaacaaacccaagaaccggtacgccaacgtaattgcttacgaccactctcgagtgatcctgcagcctatcgaaggcatcatgggcagcgattatatcaatgcaaattatgtggacggatacaggtgtcaaaacgcttatatagcaacgcagggccccctgcctgaaactttcggggatttctggcgaatggtctgggaacaacgcagtgcgaccatcgtgatgatgactcgactagaagagaagtcccgaatcaaatgcgaccagtactggcctaaccgagggacagagacctacggattcatccaggtgacactccttgacaccatcgaattagcgaccttttgcgttaggaccttcagtctgcacaaaaatgggtcttccgaaaaacgcgaggtgcgacagtttcagtttaccgcgtggcctgatcacggcgtacctgaatacccaactcctttcttggcctttctgcggagggtgaagacctgtaaccctccggatgccggcccgatcgtggtgcactgcagcgccggagtagggaggactggttgttttattgtcattgacgctatgctggaacgcatcaagcccgaaaaaaccgtggatgtgtacggccatgtaaccctcatgcgatctcaacgcaactatatggtacaaactgaggatcaatactcttttatccatgaagccttgctggaggcagtgggctgtggcaatactgaggttccagcccgttctttgtacgcctacattcagaaattggctcaggttgaacccggcgagcacgtaacgggcatggagctagagttcaagaggttagccaactctaaagcacatacctcacggtttatttccgccaatcttccttgtaataaatttaaaaatagactggtcaatatcatgccatatgagtcgactagggtctgcctgcagccaattcggggggtagagggtagtgattatatcaacgcctccttcatagatggctatcggcagcagaaggcctacatcgctacccagggaccccttgcagaaaccacagaggacttttggcgcatgttgtgggaaaacaacagcaccatcgtggttatgttgacaaagctgcgggagatgggcagagaaaaatgtcatcagtattggcctgccgagaggtctgccaggtaccagtactttgtggttgaccccatggctgaatacaacatgcctcagtacattctcagagagttcaaggtgactgacgccagagatggacagagcagaacggtccggcaattccagtttacggattggcctgaacaaggagtccccaaatcgggagaggggttcatcgattttatcgggcaagtacataagactaaggagcaatttggacaggacggccccatctcagttcactgctccgctggggtgggacgcaccggagtgttcattactttgagcatcgtactggagcggatgcgctatgagggagtagtcgacatattccagacagttaagatgttgcggactcagaggccagccatggttcagactgaagatgaataccagttttgttatcaagccgctctggagtatcttggctccttcgatcattatgccacatag

SEQ ID NO: 130986 - DNA, 5820 bp, synthetic construct
  misc_feature 1..5820: note = Description of Artificial Sequence: Synthetic coding sequence
  source 1..5820: mol_type = other DNA
atggcgccaacctgggggcctggcatggtcagtgttgtggggccaatgggactcctggtcgtcttgctcgtcggaggctgtgctgccgaagagccccccaggtttattaaagagccaaaagaccagatcggagtaagtggaggagttgcctcatttgtatgtcaggccacaggggatcctaagccacgcgtgacttggaataagaagggcaagaaggtgaatagtcaacgatttgaaaccattgagttcgatgaatctgctggggcggtcttgcgaattcaacccttgagaactccacgggacgaaaatgtttacgagtgcgtggcacagaattccgtcggagagatcacagttcatgcaaagctgacagtcttacgggaggatcagcttcctagcggctttcctaacatagatatgggcccacagcttaaagtggtggaaagaactcggacagcgaccatgctgtgcgccgcaagcggtaaccccgaccccgaaataacttggtttaaagatttcctcccagtcgacccctctgcgagcaacggtaggattaagcagcttcggagtgaccaagcctttagtcacctgccaacaggggcactccaaatcgagtcctccgaggagacagaccagggtaagtacgagtgcgtggcaacgaacagtgctggagtgagatatagtagccccgccaatctgtacgtacgagtgtggaggactgtgcgccgggtggctcctcgattttcaattttgccaatgtcacacgaaatcatgcccgggggcaatgttaatattacatgcgtcgctgttggaagtcccatgccttatgtgaaatggatgcagggggcagaagatctgacccccgaggacgatatgcccgtcgggagaaacgtgctggagttgaccgatgtgaaagacagtgccaactacacctgcgtggcgatgtcaagcctgggcgtaatagaggccgtagcacagattaccgtgaagtcgcttcctaaggcgcccggcacaccaatggtgacagagaatacggccaccagtatcacaatcacttgggatagcggcaacccggatccagtgtcctattatgtgattgagtacaaaagcaagagccaggacggaccctatcagatcaaggaggatataacaaccacacgctactccataggggggttgtcccccaacagcgaatacgagatatgggtgtcagctgtgaactccataggtcagggacctccttccgagtcagtcgttacgcgaaccggcgagcaagcacccgcgtccgcgccgcggaacgttcaagcccggatgctctccgccacaaccatgatcgtccagtgggaggagccagtagagccgaacggcctgattcgaggatacagggtctactacactatggagccagagcacccagtaggaaattggcagaagcacaacgtggatgactccctcctcacaacggtcggtagccttctggaggacgagacttatactgtgagagtcctggccttcactagcgtgggagacggccccctgtcagaccccattcaggtgaagactcagcagggtgttccaggacaaccgatgaatctgagggccgaagctcgctctgaaacaagcatcactcttagctggagcccacctcggcaagaatctatcatcaagtacgaactgctttttcgcgaaggggatcatggtagggaggtcggtcgaaccttcgaccccaccacctcctatgtagtggaggatctaaaacctaataccgaatatgcattccggttggcggccagaagtccacagggactgggcgcttttacccctgtagtccggcagaggacactccagtcaaagccctctgcccctccccaggatgtcaaatgtgtgagcgtgaggtctaccgccatcctggtgtcttggcggcctcctccacccgagacacacaatggagcactggttggttatagtgtaagatatcggcctctgggctctgaggatcctgagcccaaagaagtcaacggcatccctcccaccacaacccagatcctactcgaagcactggaaaagtggactcaataccgaattacgaccgtggcacataccgaagtggggcctggtcctgaaagcagccccgttgtcgtgaggaccgatgaagacgtcccttcagctcctcctcggaaggtcgaggccgaggctctgaatgcaacagcaatccgggtgctctggcggtctcccgctcctgggagacagcacgggcaaattaggggttaccaggtacactacgttcggatggagggggctgaagcacgcgggccaccccgaataaaagatgtcatgctggctgacgcccaagaaatggtcattacaaacctacagccggaaaccgcctactccatcaccgtcgcagcatatactatgaaaggcgacggagctcgctccaaacctaaagtggtagtgactaagggagccgttcttgggcggccgaccctgtcagtccaacagacccccgagggcagcctgttggctaggtgggaaccccccgccgggaccgctgaggatcaggtgctggggtacaggcttcagttcgggagagaagattctacacccctggcaaccctggagttcccaccctcggaagaccgctatacagcttccggcgttcacaagggagctacatatgtgtttaggttagctgcgagatctcgaggtgggctaggagaagaggctgctgaggttttgtctatacctgaggatacccccagggggcaccctcagatcttggaggctgccggtaatgcgtcggccggaacagtgcttctgaggtggctaccacctgtgcccgccgaacggaacggagctattgtgaaatatacggtcgctgtaagggaagccggagcccttgggccagctcgagagacggagctgcccgctgctgcggagcctggggccgaaaacgccctgaccctgcagggcctgaaaccagacaccgcttacgacctgcaggtccgggcccacacaagaagggggcccggtccctttagtccacctgtaaggtataggacctttctgagagatcaggtctctcctaagaactttaaggtgaagatgatcatgaagacatctgttttgttgagttgggaatttcctgataactataattccccaaccccatacaaaatccagtataatgggctaacgctggacgttgacggaaggaccactaagaaactgataacccacctgaagccgcacacattttataactttgtgttgacgaacaggggcagttcactgggtgggctccagcagacagttaccgcttggacagcctttaatttgctcaacgggaaaccgtccgtggctccaaagcccgacgccgacgggttcattatggtgtatttaccagacggacagtcacccgtgcctgtgcagagctacttcatcgtcatggttccacttcggaagtcccggggtgggcagttcctgacacccctgggttccccagaggacatggatttggaggagttgatacaggacatcagtcggctccagaggcgatccctccgccatagccggcagctcgaagtgccaaggccctatatcgctgcaagatttagtgtgctcccccccacctttcaccccggtgatcaaaaacaatatggaggctttgataaccggggcctggagccaggacaccgctacgtgctgttcgtcctggctgtgctccagaagtccgagccgacatttgctgcctcaccattctcagatccctttcagttggacaacccggatccgcagccaatcgtggacggcgaggaaggtctgatatgggttattggtccagttctcgccgtcgtcttcattatctgtatcgtaatagctatcctcctgtataaaaataagcccgattccaaacgaaaagacagtgagccacggacgaagtgcctgcttaacaacgcagatcttgccccacatcaccccaaggaccccgtggagatgcgacggatcaactttcaaaccccagattcagggctcagatcacccctgcgggaaccaggtttccacttcgagtccatgctgagccacccgccaataccaattgcggatatggctgaacatacagagcgcctcaaggcgaatgattccctgaagctgagtcaggaatacgagtctattgatcccgggcagcaattcacctgggaacacagcaacctggaagtcaacaagccgaaaaaccgatacgccaatgttatcgcatatgatcattccagagtgatcctccagccaattgagggcattatgggcagtgactacatcaacgccaattatgttgacgggtaccgctgccagaacgcctatatcgcaacccagggacctctcccggaaacctttggagacttctggcgcatggtttgggagcaacgcagcgcgaccattgtgatgatgacgcggttagaagagaaaagccgaatcaagtgcgatcagtattggcccaacagaggcaccgaaacctatggtttcattcaagtgacccttcttgacacgatcgagctcgccacattctgtgtgagaacgttctccttgcacaaaaatgggtcctccgaaaagcgggaggtgaggcagttccagtttacagcctggcccgatcatggagttcccgaatatcccacaccttttttggccttccttcgtcgagtcaaaacctgcaaccctccagatgcaggccctattgtggtgcactgctctgcgggagtggggaggaccgggtgcttcatagtcattgacgcaatgctggagcggatcaagcccgaaaaaaccgtggacgtgtatggacacgtgactcttatgcggagccagcggaactacatggtgcagaccgaagaccagtatagctttattcatgaggcactcctcgaggccgtagggtgtggcaataccgaggtccccgccaggtcactttatgcttacatccaaaagcttgcccaagtggaacccggggagcacgtcacaggaatggaactagaattcaaaaggctggcaaactccaaggcacacaccagtaggttcatcagcgccaacctcccttgtaataagtttaagaaccgcctggtgaacatcatgccgtatgagtccacccgcgtatgcctgcagcctatacggggtgtagaagggtcagactacatcaatgccagtttcatcgacggatatagacagcagaaggcctacatagctacacagggcccgctggcagaaaccacggaggacttctggaggatgctgtgggagaataactccaccatagtcgtgatgttaacaaagcttcgagaaatgggtcgcgaaaagtgccaccagtactggcccgcagagcgcagtgcgagataccaatactttgtggtcgaccccatggcggagtataacatgcctcagtacattctgcgtgaattcaaggttaccgacgccagagacggacaaagccgcacggttcggcagttccagtttaccgactggcctgagcagggagttccaaaaagcggggaagggttcatcgactttattggccaggtgcacaagacgaaagagcaattcggccaagacggtcccatcagtgtacattgttccgccggtgtcggacgtacgggggtcttcattactctcagcatagtgcttgagcgaatgcggtacgagggcgtggtagatattttccaaaccgtgaaaatgcttagaacacagagacctgctatggtgcaaaccgaagacgagtaccagttctgttaccaagctgcgttagagtacctgggctctttcgaccactatgcaacgtag

SEQ ID NO: 130987 - DNA, 5847 bp, synthetic construct
  misc_feature 1..5847: note = Description of Artificial Sequence: Synthetic coding sequence
  source 1..5847: mol_type = other DNA
atggcgcctacttggggcccggggatggtatcggtcgtgggacctatgggactgttggtggtgctcttggttggcggttgtgccgccgaggagcctcccagatttatcaaagaaccaaaagaccagatcggggtgtctgggggggtggcctcattcgtctgtcaggccacaggagacccaaaacctcgggtaacatggaataaaaaaggcaaaaaggtgaactcgcaaagattcgagactattgagttcgacgagtccgccggagccgtgctcaggatccagcccctccgaacaccgcgcgatgaaaatgtgtacgagtgtgtagcacaaaatagcgtcggtgagatcactgtacacgcaaagctgacagttctgagggaggatcaactacctagtggcttccctaacattgacatggggccacagctgaaagttgttgagcggaccagaactgccaccatgttgtgtgcggccagtggaaatcccgaccccgaaataacgtggttcaaggacttcttacctgtggaccccagcgcaagtaatggcagaatcaagcagttgagatcagaaacctttgagtccactccaattcgcggcgccctacagatcgaatccagtgaggagaccgaccagggcaagtacgagtgcgtggctaccaactctgcgggggtgagatactcctccccggcaaatctgtacgtccgggagctgcgagaggtgaggagggtggcaccccgcttcagcatcctacccatgtcccacgaaatcatgccaggcggcaatgtaaacatcacatgcgtggccgtgggctcaccaatgccttacgtcaagtggatgcaaggggccgaggacttaactcccgaggacgacatgcccgtgggacggaacgtgctggagttaaccgatgtgaaagacagtgccaattacacctgcgtggcaatgtccagcctgggtgttatcgaggccgtggcacagatcacggtgaaaagtttgcccaaggcacctgggacaccaatggtaacagagaatacggcgacatcaattacaattacttgggactccggaaatccagatcctgtttcatattatgtcatcgagtataaatcaaagtcacaggatggtccttaccagatcaaagaagatattactactacccgctacagcattggcgggctgtctcctaattcagagtacgaaatctgggttagcgccgttaatagtattggtcagggtcctccatccgaatcagtcgtcaccagaactggcgagcaggcaccggcatcagctccacgtaacgttcaggccaggatgctgagcgctactacaatgatagttcaatgggaagagcccgtagagcccaatggcctcattaggggctaccgggtgtattatactatggaacctgagcaccccgtaggtaattggcaaaaacacaacgtggatgattccctgcttactactgttggctccctgctagaagacgaaacatacaccgtgcgggtcctggctttcaccagcgtcggtgacggtcctctgagcgaccctatacaggtcaagacacagcagggcgtgccgggacagccaatgaatctcagagcggaggctcggtctgagacttccattaccctaagttggagccctccaaggcaggaatctatcatcaagtacgagctcctgttcagagagggagatcatggaagagaagtgggcagaacatttgatcctacaaccagctatgtagtggaggatctaaaaccaaatacagagtatgccttccgattagccgcaagatcccctcagggcctcggtgcgtttacacctgtagtgaggcagcggactcttcagtctaaaccttcagcacctccacaggacgtcaaatgcgtgtccgtgcggagcaccgcgatactggtgtcttggagaccaccaccacccgaaactcacaacggcgcccttgttgggtattcggtccggtaccgaccccttggctcggaggatccagagccaaaggaagtgaacggaatcccaccgacaaccacccaaatcctcctagaagctctggaaaagtggacccagtaccgaataacaacggttgcgcacaccgaggtcggaccaggccccgaatcaagccctgtggttgtgcgcactgacgaagatgttccatccgcaccacccaggaaagtcgaggctgaggctcttaacgccactgctataagagttctctggaggtctccagccccgggcaggcaacacggacagatacgggggtaccaagtgcactacgttcggatggaaggagctgaagctagaggacctcctcgaatcaaggatgtaatgctagccgacgcacaatgggaaacggatgataccgcagagtatgagatggtgattactaatctgcagccggaaaccgcctacagcatcacagtggccgcttacaccatgaaaggcgatggcgctcgaagcaaacctaaagtggtggtgaccaagggggctgttttgggaagacccaccctgtctgtacagcaaactccagaagggtccctgctggctaggtgggaacctcccgcaggcacggcagaggaccaagtcctggggtacaggcttcagttcggtagagaagacagcaccccacttgcaactttggagtttccacccagcgaagataggtatactgcttcgggcgtgcacaagggagcgacctatgtgttccgcctcgccgcccgttcgcgaggcggcttaggggaggaggccgcagaggtcttgagtatcccagaagacacgcctaggggccatcctcagatcttagaggctgccggaaacgctagcgcgggcactgttctcctgagatggcttcccccggtgcctgccgaaagaaacggggctatagtgaagtacaccgtcgcagttagagaggccggtgccctgggcccggcacgagaaactgaacttccggctgctgctgaacccggagcggagaacgcattgaccctccagggacttaaacctgacacagcctatgatctgcaggtcagagcccatacccggcgcggccctgggcccttctcacctcctgtgaggtatcggaccttccttagagatcaagttagccctaagaacttcaaggtaaaaatgattatgaagacttccgtgctgctgtcctgggaattcccggataactataattcacctaccccttataagatccagtataacggtctgacactggatgtggatggacggaccactaagaagctcatcacacatctcaagccacataccttctacaactttgtgctcacaaacaggggcagctcactgggcgggctgcagcaaactgtcacggcttggaccgcattcaacctccttaatggcaagccttcagtagcgcccaagcccgatgcagacggattcatcatggtttatttgcccgacggacaatctcccgtccccgtgcagtcctacttcatcgttatggtgcctctcagaaaatctcgcggagggcaatttctgactccactggggagccccgaagatatggatctcgaagaactgatccaagacatctcccgtctccagcgtagatcattgcggcacagccgccagttggaggttcccagaccatacatcgctgcccggtttagcgtgctcccccctacctttcaccctggggatcaaaagcagtatggtggattcgacaacagaggcctggaacccggtcaccgttacgtgctttttgtcctggctgtactgcagaagagcgagcccacatttgccgcttcaccgttcagtgaccccttccagctggacaaccccgaccctcagccaattgtggacggggaggaaggcttgatttgggtcatcggcccagtcttggccgtggtgttcattatctgtatcgttatcgccatcctgctgtataagaacaaacccgattccaagcgcaaggattcagaacccagaactaagtgcctcctgaacaacgccgatctagcccctcaccatcccaaagaccccgtcgagatgagacgaattaattttcaaaccccagatagtggcctgcggtctccactgagagagcccggttttcattttgagtcaatgctgagccacccacccatacctatcgccgatatggcagagcataccgaacgacttaaggcaaacgattcccttaagttatcccaggagtatgaatccatcgacccgggccaacagtttacgtgggagcacagtaatctagaggtgaataaaccaaagaacaggtatgcaaacgtaatagcctatgaccatagccgggtcatccttcagcctatcgagggaattatgggaagtgactatatcaatgctaactacgtcgatggttacagatgtcagaatgcctatattgcgacgcagggcccgctgccagagaccttcggggacttttggaggatggtttgggagcagcggtctgccaccatagtgatgatgaccagactggaggagaagtctagaataaagtgtgaccagtattggcccaatcgggggacggagacttatggcttcatacaagtgactcttctggacactatagagctggccacattctgtgtgcgcaccttttccttgcacaagaacgggtcgagtgagaagcgtgaggtgcggcagttccaattcaccgcatggcctgaccatggggtgcctgagtatccgacacctttcttagccttcctgcgtagagttaaaacctgtaacccacccgacgctggccctatcgtcgttcattgctcagcgggcgtgggtagaacagggtgtttcatcgtaatcgacgctatgctggaaaggataaagcctgaaaaaaccgtggacgtgtacggccatgttacattaatgcgaagtcagagaaattacatggtgcagaccgaggatcagtactcctttattcacgaggcccttctggaagccgtgggctgcggcaatactgaggtgcctgccagatccctgtacgcttacattcagaagttggcccaagttgagccaggcgagcacgtgactgggatggaattggaatttaagcgcttggccaactctaaggcccataccagtaggtttatcagcgccaatcttccatgtaacaaatttaaaaatagacttgttaatattatgccttatgaatctacgcgcgtctgtctccaaccgattcggggggtcgaggggagtgactacatcaatgcaagtttcatcgatgggtacagacaacagaaagcctacatcgccacccaagggccactggccgaaacaaccgaagacttctggaggatgttgtgggaaaacaacagtacaatcgttgtgatgctcacgaagctccgcgagatggggcgtgagaagtgccaccagtattggcccgcagagcgcagcgcccgctatcagtacttcgtagttgaccccatggcggagtacaacatgccccagtatatcctgcgcgaattcaaagtgaccgacgctagagatggccaaagtcggactgttcgtcaattccagtttaccgattggcctgagcagggggtccctaagagtggagaagggttcattgattttatcggacaggtgcacaaaacaaaagaacaattcggccaagatggcccaatctcagtgcattgtagtgctggcgtcggccgaaccggcgttttcatcaccctgtcaatcgttctcgagcggatgagatacgaaggcgtcgtcgacatcttccagaccgtgaaaatgctcaggactcaaaggcctgcaatggttcagaccgaggacgaatatcaattctgctatcaagcggccctggagtacttgggatcatttgatcactatgccacctag

SEQ ID NO: 130988 - DNA, 5850 bp, synthetic construct
  misc_feature 1..5850: note = Description of Artificial Sequence: Synthetic coding sequence
  source 1..5850: mol_type = other DNA
atggctccgacgtggggacccggaatggtatccgtcgtggggcctatgggcttgctggtcgttctccttgtaggcggttgcgccgctgaggaaccgccaaggttcatcaaggagcctaaggaccagatcggggtgagcggcggagtggctagcttcgtatgtcaggcaacgggcgaccccaagccacgggtgacgtggaacaagaaaggaaagaaggtgaatagccagcggtttgaaacaatcgaatttgacgagtcggcaggcgccgtgctgaggattcaaccgctgaggaccccccgcgacgagaacgtttatgaatgtgtggcgcagaatagtgtgggggagattacagtccatgctaaactcactgtattgagagaggaccagctgcccagcgggtttcctaacattgatatgggcccccaactgaaggtggtggagcgaactcgaaccgccacaatgctgtgcgccgcctctgggaaccccgaccccgagattacgtggttcaaggactttctgcccgtcgatccgagcgcgtccaacggaaggatcaaacagctccgcagatctgagacttttgagagtacacccatcaggggggctctgcagattgagagttcagaggaaaccgaccagggtaagtacgagtgcgtggctacaaactccgccggcgtgcgatattcttcccctgcaaatctgtacgtccgcgaactgagagaggtgcggcgcgtggctccccgtttttccattctccctatgtcccatgagattatgccaggcgggaacgtcaacattacctgcgtggctgtggggtcccccatgccttacgtcaagtggatgcaaggagcagaagatctgactccagaagatgacatgccggtggggaggaacgtgttggagctgactgatgttaaagacagcgcaaattatacttgcgtggcaatgtctagtctgggtgtaatcgaggccgtcgcacaaatcacggtcaagtcccttcccaaggccccgggaacccccatggtgacagaaaatacagccacaagtattaccattacatgggattccgggaaccctgatcctgtttcctactatgtcattgaatacaaaagtaaaagccaagacgggccctaccagataaaagaagatatcaccacaacacgttatagtataggaggtctgtctcctaactccgagtacgagatttgggtgtctgcagtaaatagcatagggcagggccccccttcagaaagcgtggtgacacgtacaggggaacaggcccccgcatctgccccaaggaatgtgcaagccagaatgctgtctgctactaccatgatcgtgcaatgggaggagccagtagagccaaatggccttattaggggataccgggtttactacaccatggagcctgaacacccggtgggaaactggcagaagcacaatgtggatgactctctgttgacgaccgtaggatccctgctcgaagacgagacttacacggtccgtgtactggcttttactagcgtcggggacgggcctctgtccgatccaatccaggtcaagacccagcaaggagttccaggccagcctatgaatctgagggctgaagcacggtccgagactagcattaccctttcatggagtccccctcgtcaggagagcatcatcaagtatgaactacttttcagggaaggcgaccatggcagagaagtggggcgaacttttgatccaactactagttacgtcgtggaagacctcaaaccaaacacggagtacgcatttagactcgccgcccggagtcctcagggcctaggggcgttcactccagttgtacggcaaaggactctccaatcgaagcctagcgctccccctcaggatgtcaaatgtgtgagcgttcggagcaccgcgatcttggtgagctggcggccacccccacctgaaacacacaacggagctctggtggggtacagcgtgaggtataggcctctggggagcgaagatcctgaacccaaagaggtcaacggaatcccgcccacgacaacccagatacttctggaagccctggagaaatggacacagtacaggattaccacggtcgctcacacagaggtcggaccagggccggaatcgtctcccgtcgttgtcagaacagatgaagacgtgccaagcgccccaccacggaaggtcgaggcagaggctttgaacgccacagccatcagggtgttgtggcgaagcccagcgcctgggcgacagcacggacagatcaggggttaccaggtgcactacgtgaggatggagggagccgaagcccggggaccacccaggatcaaagacgtcatgttggcagacgcgcaatgggagactgatgatacggctgaatatgaaatggtgattacgaacctccagcctgagacagcatactctattactgttgccgcctatacaatgaagggcgacggcgccaggagcaagcccaaggtggtggtaacaaagggagccgtcctcggcaggccaactctgtctgtacagcagaccccagagggttccctcctcgcccgctgggagccgccagccggtactgcagaagatcaagtgctgggataccggctccagtttgggcgggaagattccactcctctggccacccttgaatttcctccaagcgaagaccggtacaccgcctcaggggttcataaaggcgcaacctacgtgtttcgtctggccgctcgttctcgcggtggcttaggggaggaagccgccgaggtactatcaatacctgaggacacgccaaggggccatcctcaaatattagaggctgccggcaacgcatccgccggcactgtgctgttgagatggctgccccctgtccccgctgaaagaaacggggccatagtaaaatacacagttgcagtgcgggaggcaggcgctttaggacccgcacgtgagactgagctccccgcggcagctgaaccaggtgctgagaacgccctgactcttcagggtctgaagccagacactgcctacgacttgcaggtgagggcccatacacgtaggggccccggcccatttagccctcctgtgaggtatcggaccttcttaagagaccaggttagccctaaaaactttaaagtgaagatgatcatgaaaacttccgttctgctaagttgggagttcccggacaattacaactcccctactccttataagatccagtacaacgggttaacgcttgatgttgacggccgcaccaccaaaaaacttattacacaccttaaacctcataccttttataactttgtgctcacaaataggggctcttcgctcggaggcctgcagcagacagtgaccgcctggaccgcgttcaacctgctcaacggcaagccctcggttgctcccaaaccggacgccgatgggtttatcatggtgtacttgcctgacggtcaatcacctgtgccagtgcaaagctactttattgtgatggtgcccctgcgcaaatcaagaggcgggcagtttctgactcccttagggtcaccagaggatatggatcttgaagaattgatccaggacatctccagactgcaaaggcggagtcttaggcacagtagacagcttgaggttccacggccttacattgctgcaagattctccgtccttccaccgactttccaccccggtgaccagaaacagtacggcggattcgataacagggggttggagccaggtcacaggtatgtgcttttcgtcctggctgtacttcagaagtccgagcccacgttcgcagcttctccttttagcgatccatttcagctggacaatcctgaccctcagcccatcgtggacggggaagaggggcttatctgggtcatcggacctgttctggccgttgttttcatcatctgcattgtgatcgcaatcctattatacaaaaaaaaaccacactccaagcgcaaggactccgagccccgcaccaaatgtctgttaaacaatgcggatctggccccacaccatcctaaagacccggtggaaatgagacgtattaatttccagaccccggatagtgggttgaggtctccacttagagaacctggatttcactttgaaagtatgctctcacatcctcccatccctattgccgacatggccgagcatacagagcgattgaaggctaatgacagcctgaaactgagccaggagtatgaatccattgacccaggccagcaatttacctgggaacatagcaatctggaagttaacaagcccaagaaccgctacgccaatgttattgcctacgaccactcacgcgttattcttcagcccatcgaagggattatggggtctgactatataaatgcaaactacgtggacgggtatagatgtcaaaatgcatatatcgccacacagggccccctgcctgaaacctttggagatttttggcgcatggtctgggagcagcggagtgccaccatagtgatgatgactcgcctggaggaaaagtctcggatcaaatgtgatcagtactggccaaatcgcggcactgaaacttacgggttcatccaggttacactgctggacacaatagagctggctaccttctgcgttcggacattttccctgcataagaatggcagcagtgagaagcgtgaggttcgccagttccagttcaccgcctggcctgatcatggcgttcccgagtacccaacaccattcctggctttcctcaggcgggttaagacctgcaatcctccagacgctgggcctatcgttgtgcattgtagcgccggagtgggacgaacagggtgctttatagttattgacgctatgctagagcgtattaagccagagaagactgtcgacgtgtacggccatgtaacattgatgcgctcacaacgcaactacatggtgcagaccgaagatcagtatagttttatacacgaggctctcctcgaggccgtcggctgtgggaacaccgaggtgccagctaggagcctgtacgcctacatacagaaacttgcccaggtggagcctggagagcatgttacggggatggaactggagtttaaaagactggccaattccaaagcacacacttctcgcttcatctccgctaaccttccatgtaacaaatttaaaaataggctggtaaatattatgccctatgagtcaactagagtgtgcttgcagcccattcgcggcgtcgagggctctgactacatcaatgcctcctttatagacggttacaggcaacagaaggcttatatcgccacacagggcccattagctgaaactactgaggacttttggagaatgctctgggaaaacaatagcaccatcgtagtcatgctcacaaagctgagggagatggggcgcgagaagtgtcaccagtactggcctgcagaaaggagcgcccgttatcagtatttcgttgtggatcctatggcagaatataacatgccccagtacattttacgcgagttcaaagtaaccgacgctcgagacgggcagtcgcgcacagtgcgccagttccaatttactgattggccggagcagggagtgccaaaatcaggtgagggcttcattgacttcattggccaggtgcacaaaaccaaggagcagttcggacaggatggccctatctccgtacactgttctgccggcgtgggtcggacaggtgtattcatcacactaagtatcgtgcttgaaaggatgagatatgagggtgtggttgacatttttcagaccgtgaagatgctgagaacccagaggccagcaatggtacagacggaggacgaataccaattttgttaccaggccgctttggaatacctgggatctttcgatcattacgcaacctag

SEQ ID NO: 130989 - DNA, 4683 bp, synthetic construct
  misc_feature 1..4683: note = Description of Artificial Sequence: Synthetic coding sequence
  source 1..4683: mol_type = other DNA
cgtagcgccagaggcctgagcgtcagggaccgcggagcaattccactgcagggcggcgatcgtagatccctcccatccatggctcctacctggggtccaggaatggttagcgttgtcggtccaatgggactgttggtggtgctgctagttggcggttgcgctgccgaagagccccctcgcttcataaaggagcccaaggatcagattggagtatcaggaggcgtggcaagttttgtgtgccaggcgacaggcgatcctaagccacgcgttacatggaataaaaaaggaaagaaggtgaattcacagagatttgaaacaattgagtttgatgaaagcgccggcgcagtgcttcggatccagcccctcaggactccccgtgacgaaaacgtctacgagtgtgtagcccagaactctgtgggagagatcaccgtccacgcaaagttgactgtgttacgcgaggatcaactcccgtctggatttcccaacattgacatgggaccccaactgaaagtcgtcgaaaggacacgaacagctaccatgctgtgtgcagcttccggtaacccggaccccgagatcacatggttcaaagactttctgccggttgatccaagtgcctctaatggaaggatcaaacaattgcggtctggcgccctgcaaatcgagtcgtcagaagaaaccgatcagggtaagtatgaatgcgtggcgaccaactctgccggagtgcgatattcctctcccgcaaacctgtacgtgcgggtgcggagggttgccccaagattttctattttgcccatgagtcatgagattatgccagggggcaacgttaatatcacatgcgtcgctgtaggcagtcccatgccttatgtgaagtggatgcagggagccgaagatctgaccccagaagatgatatgcctgtgggaagaaatgtgttagagctgactgatgtcaaggattccgccaattacacctgtgtggctatgagcagtctgggggtaatcgaggctgtcgcacagattaccgttaagagcctgcctaaggcaccaggcacacctatggttaccgaaaacaccgccaccagcattactattacatgggattctgggaaccccgatcctgtgtcgtactacgttattgaatataaatcaaaatcacaagatgggccctatcaaatcaaggaagatatcactaccactagatacagcatcggcgggctcagcccaaactctgaatacgagatctgggtctccgccgtcaacagcattggccaaggcccacccagcgaatccgtagttacaaggaccggggaacaggcccccgcttccgcaccccgcaatgttcaggcccgaatgctgtctgccactacaatgatcgttcagtgggaggagccggtcgaaccaaatggtctgattcgggggtatcgagtctattacacaatggaaccagaacaccctgtggggaactggcagaagcacaacgtcgacgacagccttctcacgaccgtcggatctctgcttgaagacgaaacatacaccgtgcgggttctggctttcactagcgtcggcgacggcccactttcagaccctatccaagtaaaaacacaacaaggggtgcctgggcagcctatgaacctgagagccgaagccaggtctgaaaccagtatcacattgtcttggagccctcctcggcaggaatctatcattaagtacgaactgcttttcagagagggtgatcacggtcgcgaggtgggccgcactttcgacccgaccacttcttatgtggttgaagacctgaagccaaacacagagtatgccttccgtctggccgctcgcagccctcagggactgggggccttcaccccggtggtgaggcagagaaccctgcagagcatctcccctaagaactttaaagtcaagatgataatgaaaacttcagtcctactttcctgggagttcccagacaactacaattctccgaccccctacaagattcagtacaacggtctgaccctcgatgtcgacgggcggacaactaagaaacttattacgcatctgaagccacatactttttataacttcgtgctgactaacaggggcagctccctaggcgggctgcagcaaaccgtcaccgcctggacagcattcaatttactcaatggtaaacctagcgttgctccgaagcctgacgcagatggattcattatggtttatcttccagacggccaatcgcctgtgccagtccagtcctactttatcgtgatggtgcctctacgcaaaagcagaggcggccagttcctcacccccttggggtcccctgaggacatggacttagaggaattgatccaagatatctctcgactgcagcgccgaagcctaaggcattctcgacaactggaggtgccccggccatacatcgcggcgaggttttcagtgttaccccccaccttccaccccggagaccagaaacagtacggagggttcgacaaccggggtctcgagcctggtcacaggtacgtgttattcgtgctggctgtgctgcagaagagcgagccaactttcgccgcctccccttttagcgatccattccagctggacaacccggaccctcagcccattgtggatggtgaggaaggacttatttgggtgatcgggccagtgctggctgtagtcttcatcatctgtatcgtgattgctattcttctgtacaagaataaaccagattccaaacgcaaggattcagagccaaggacaaaatgcctgttgaataacgctgatctggctccccaccatccgaaagatcccgtggaaatgcgaaggattaattttcagacgcccgactctggattgagatcaccccttcgtgagcctgggttccattttgagagcatgctgtcccatcctcctatcccaattgctgatatggcggaacacactgaaaggctgaaggcgaacgactctcttaagctgtcacaggagtacgaatccatcgatcccggacagcagtttacatgggagcatagcaatttagaggtgaacaagccaaagaaccggtacgccaacgttattgcctatgaccacagccgcgtgatcttgcaaccaatcgagggtatcatggggagtgactacattaatgccaactatgtggacggatatagatgccagaatgcctatattgctactcagggtccgctgcccgaaacctttggtgatttctggcgtatggtctgggaacagaggtcggccaccattgttatgatgaccaggcttgaggaaaaaagcaggatcaagtgcgaccagtactggcccaatcggggcactgagacatacggatttatccaggttacactgcttgacactatcgagctagccacgttctgcgttcggacttttagcctccataagaatggttcttccgaaaagagggaagtgcgtcagttccaattcacggcttggccggaccatggtgttccagagtatccaaccccctttctggcttttctgcgacgtgtcaaaacctgcaaccccccggatgccggccctattgtggtgcactgcagtgctggagtgggccggaccggatgcttcatcgtgatagatgctatgctagaaagaattaaacccgagaagacggtcgatgtgtatgggcatgtcaccctcatgcgaagtcagcgaaactacatggtccagaccgaagaccagtacagcttcatccacgaagccctcctagaggccgtgggctgcggaaacacagaagtccccgcgaggtctttgtacgcgtatatccagaaattagcacaggtcgagccgggggaacacgttacaggtatggagctggagttcaagcgcctggctaactcgaaggctcatacatcacgattcatcagtgctaacctgccctgtaacaaattcaagaaccggctagttaacattatgccgtacgagagcacccgagtgtgcctccagcccatacggggcgtggaaggcagtgactatattaatgcgagcttcatcgatggctacagacaacaaaaagcatacatcgccacccagggaccacttgcagagacaacagaagatttctggcgtatgctgtgggaaaacaattccactattgtggtgatgctcactaaactccgggagatgggccgcgaaaagtgtcatcaatattggccagccgagaggagtgccaggtatcagtacttcgtggtggatcctatggccgagtataacatgcctcagtacattctaagggaatttaaagtcacagacgcgcgagatggccagtccagaaccgttcggcagttccagttcaccgactggccagagcagggggtacctaagtccggggagggctttattgatttcataggccaggtgcacaaaaccaaggaacagtttggccaggacggaccgatcagcgtgcactgttcagctggggtagggcgcacaggagtattcataacactgtctatcgtgcttgagcgtatgcgatacgaaggtgtggtcgacatctttcagactgtcaagatgctgagaacccagagacctgccatggttcagacagagactgaaagccgaccaggctggtcagctgtcgcccagagtcgcctgacggccagctctgcttcatggattcatgccatcctgctgcctcaaccgcccgaatggttaggcctccaggtctag

SEQ ID NO: 130990 - DNA, 4518 bp, synthetic construct
  misc_feature 1..4518: note = Description of Artificial Sequence: Synthetic coding sequence
  source 1..4518: mol_type = other DNA
atggctcccacatggggccccggcatggtgagcgtggtcggaccgatgggactgttagtcgtgctgctcgttggtggttgcgctgcggaggagcccccgcgtttcatcaaggaacctaaggatcagattggggtgagcgggggtgtggcatcttttgtgtgtcaagctacaggcgatccaaagcctcgggtcacatggaacaaaaagggcaaaaaagtgaactcacagaggtttgagaccatagagtttgacgagagcgccggtgcagtgctgcgcatccagcctctgcgcacacctagggacgagaatgtctacgagtgcgtggcgcaaaatagcgttggcgagatcacagtgcacgccaagctgacagtactgcgtgaggatcagctcccatctggctttcccaacatcgacatgggtcctcagctaaaagtggtggaacggaccagaactgcgaccatgctatgcgccgcttctggcaatcccgatcctgagattacctggttcaaggactttttgcctgttgatcccagtgcctctaacggcagaattaaacagttgagatccggcgcactgcagatcgaatcatctgaggagaccgaccaggggaagtacgagtgcgtggcaaccaatagtgccggagtacgctatagctctccagcaaatctctacgttagagctctgcgcgaggtgcggcgcgtcgcgccccgattttcgatactgcctatgtcccatgagataatgccagggggcaacgtgaatataacctgcgtcgctgtgggatcacccatgccctacgtcaagtggatgcagggagctgaggatctgacacctgaagacgatatgcccgttggtcggaatgtgctggagctgactgacgtcaaagactcggctaactacacgtgtgtagccatgtcctcattaggagtgattgaagcggtagcgcagattacggtaaagtcactgcctaaagcaccaggaacaccgatggtcacagagaatacagcaacgtctatcaccattacatgggattccgggaatccggatcctgtctcttactatgtgatcgaatataagagtaagagccaggatggcccgtaccagattaaagaggatattacgaccacacggtattccattggcggactcagtcctaattccgaatacgagatctgggttagcgcagtcaacagtatcggccagggaccaccaagcgagtcagttgtgacacggacaggagagcaggctcccgcctctgctcccagaaacgttcaggcccggatgctgtcagcaactacaatgatcgtgcagtgggaggagcctgttgagcctaatggccttattcgcggctaccgcgtgtactataccatggagcctgagcatccagttggtaattggcaaaaacacaacgtagatgattctctgctaaccactgtcgggagcctgctcgaagacgagacctacaccgttcgtgtcctggcattcacaagtgttggagacggtcccttgtccgatcctatccaggtgaagacccaacagggcgttccgggccaacccatgaatctgagagccgaggctcggtccgaaacatcgattaccttgtcttggtcacctccacgccaggaatcgatcattaagtacgaactgctgttcagggagggtgatcatggacgcgaggttgggaggactttcgatccgaccacttcctacgttgtggaagacctgaaacctaataccgaatatgccttcaggctggcggccaggtctccgcagggcttaggcgcattcacacccgtggtgcggcaaaggacactgcagtccattagtcctaagaatttcaaagttaaaatgataatgaagacctcagtcttactgagttgggagttcccagacaactacaacagcccgaccccttataagattcagtataacggactcacactagacgttgacggcagaacaacaaagaagttgataactcacctcaaacctcacacgttttataattttgtgcttacgaatagaggcagttctctgggcggacttcagcagacagtgactgcgtggaccgccttcaatctccttaatgggaagcccagtgtggctcctaagccggacgcggacggcttcatcatggtttatctgcctgatggccagtcgcctgtccctgttcagagctactttattgtaatggtgcccctgcgtaagagtcggggggggcaatttctgacaccactcggaagccccgaagacatggacctggaagagctcattcaagatatatccaggttacagaggcgctccctgagacacagccggcaattagaggtaccccggccttatattgcggccagattcagcgtgctgccccccacctttcacccaggagatcagaaacagtacggcggcttcgataatcgcggcctggagcccggtcataggtacgtgctgttcgtgctggccgtgcttcagaagtcggaaccgacattcgcagcgagtcccttttcagatcccttccaacttgataaccctgaccctcagcccatcgtcgacggagaagaggggctaatctgggttatcggcccagtcttagccgtggttttcataatttgcattgtgattgccatcctgttatataagaacaagcctgatagcaagagaaaggactcagagcctagaacaaagtgtttgctcaacaatgctgatttggcaccacaccatccgaaggatccagtggagatgcgccggattaactttcagacgcctggtatgctgagccacccgcccatccccatcgccgacatggccgagcataccgaaagacttaaagctaatgattctctcaagctctcacaagaatacgagtccatagatccaggacagcagtttacatgggaacacagtaacctggaggtaaataaacccaagaacagatatgctaatgtaatcgcttatgaccactccagggtcatcctgcagccaatcgaaggaataatggggagtgactatatcaatgctaactatgtcgacggctaccgctgccagaacgcttacatcgctacccagggcccattgcccgaaaccttcggcgacttctggagaatggtatgggaacagagaagcgccacaatcgtgatgatgacacgccttgaggaaaaatcccgcatcaaatgcgaccagtattggcctaatagaggtactgagacctatggctttatccaagttacgttactcgatacaattgagttagccactttttgtgtgcgaaccttcagcctgcacaaaaatggaagcagtgagaagcgtgaggtgcggcaattccaattcactgcctggcctgaccacggggtacccgaataccctaccccgttcctcgcctttctacgacgtgtcaaaacctgtaatccacctgacgcaggaccaattgtggtgcattgttccgccggtgtgggccgcacaggatgcttcattgtaatcgacgctatgctggagcggattaagcccgagaagacagttgatgtgtatggccacgttacgctaatgcgctctcagcggaattatatggtgcaaacagaggaccagtactccttcatccacgaagccttattagaggccgtaggctgcgggaacaccgaggtacccgcgcggtctctgtacgcgtatattcaaaagttggcccaggtcgagcctggagagcatgtcactgggatggagctagagttcaagcgattggctaactcgaaggcacataccagtagatttatatcggcaaatctaccatgtaacaagtttaaaaaccggctggtgaacattatgccctacgagagcactcgcgtgtgcctacaacctataagaggcgtcgagggcagcgattacatcaacgcatcatttattgacgggtaccgacagcaaaaagcttatatcgctacccagggccctctcgcagaaacgaccgaggacttttggagaatgctgtgggagaacaactctacaattgttgttatgctgaccaaactgagggagatgggccgggaaaaatgccaccagtactggcccgcggaacggtcagctcgctaccagtattttgtggtggatccaatggccgagtataacatgccacagtatattctgcgcgagttcaaggtcactgatgctagggatggccagtcgcgaacggtgaggcagttccagtttacagattggcctgagcagggagttcctaaatccggagaagggtttattgattttattggacaggtacataagacaaaagaacagttcggacaagacgggcccatcagcgtccactgttccgctggagttgggcgaacaggtgtcttcatcaccctgagcatcgtactcgaacggatgagatatgagggtgtggtggacatctttcagaccgtgaagatgttgcgcacgcagagacccgctatggtgcagaccgaggatgagtaccaattctgctaccaagccgccctggaatatctggggagcttcgatcactacgctacctag

SEQ ID NO: 130991 - DNA, 4329 bp, synthetic construct
  misc_feature 1..4329: note = Description of Artificial Sequence: Synthetic coding sequence
  source 1..4329: mol_type = other DNA
atggcaagggcccaggccttagttcttgcccttacatttcagctgtgtgctccagagaccgagacccccgctgctgggtgcacctttgaagaggctagcgatcctgcagtgccctgcgagtactcacaagcccaatacgatgactttcagtgggaacaggtgagaatccatccaggcacccgggcacctgcggatttgccacatggcagctatctgatggttaacacctcacagcatgctcccggccagcgagcacatgtcatttttcagagcctgagtgagaatgatacccattgcgtccagttcagctacttcctctattcccgggacggtcattcgcccggtacactgggcgtctacgttcgcgtgaatggtgggcccctgggaagcgccgtctggaacatgaccggctcacatggtcggcagtggcaccaggccgagctggcagtttctacattctggcccaatgaatatcaggtcttatttgaggctctgatttcaccagatcgacggggatatatgggcctggatgatatcctgctgctaagctatccatgtgctaaggcacctcacttcagcaggctcggcgacgtggaggttaatgccggtcaaaatgcctctttccagtgtatggctgctgggagagccgcggaggcagagaggtttttactccagcggcagagtggggcgctggtccctgccgccggcgtacgccatattagccataggaggttcctcgcaactttcccccttgccgcagtgagtcgggcagaacaagatctataccggtgcgtatcacaagcgccacgtggtgcaggcgtctcaaatttcgctgagctgatagttaaagaaccgccgacacccatcgctcccccccagctcctgcgcgctggtcctacctacctgattattcagttgaatactaattcaattattggggacgggcctatcgtccggaaggagattgagtatcggatggcaagagggccctgggctgaagtgcacgccgtctcactgcagacctacaagttatggcatctggatcctgatactgagtatgagatttcagttttgcttaccaggcctggtgacggtggaaccggcagaccgggcccgcccttgatcagtcggaccaagtgtgccgagcccatgcgcgcccctaaaggactggcattcgctgaaatacaagcacgccagcttaccctgcaatgggagcctctcggctacaacgttactaggtgccatacatacacggtcagcttgtgttatcactacactttaggatcctcacataaccagaccatccgcgagtgcgtgaagactgagcagggcgtgtctcgatacacgattaagaacctgcttccatacagaaacgtccacgtgcgcctcgtcctgacgaaccccgagggtcggaaggaagggaaagaggtcacgttccagacagacgaggacgttccttccggaattgctgctgagagcctcacatttacccctttggaagacatgattttccttaagtgggaggaaccgcaggagccgaatgggctcattactcagtacgagataagctatcagtctatcgagagctctgatccagccgtgaatgtgcccggccccagaaggacaatctcaaaattaagaaatgagacatatcacgtcttctccaatctccaccctggcacaacctacctctttagcgtgcgggccaggactggaaagggctttgggcaggctgcactcactgagatcaccacaaacatcagcgctcctagcttcgattatgcagatatgccatcccctctgggcgaaagcgagaataccatcactgtccttctgagacctgctcaggggcgcggggcaccgatctccgtgtaccaggttatcgtcgaagaagaaagggcccgaagactgcggcgggaacctggcggacaggattgttttccagtcccactgacctttgaggcagccctggcacgggggctagtgcactacttcggggcagaattagctgccagctccctgcctgaagctatgcccttcaccgtgggagataaccaaacgtatagaggattctggaatccaccactggaaccacgcaaagcctatctgatatatttccaggccgcatcccacttgaagggggaaactcgcttgaactgtatccgcattgctcgcaaagccgcatgcaaggagtctaagcgacctttggaggtgagccagcggtctgaggaaatgggactcattttgggcatttgtgccggcggactcgccgtgttaattctgctgctcggcgcaataatagtcatcatcaggaagggcaagcctgtcaacatgaccaaggcgactgttaactaccgccaggaaaagactcacatgatgtctgccgtggatagatcttttactgaccagtccactcttcaggaagacgaacgacttgggcttagctttatggatacacacggctattcgaccaggggagatcaacgctcagggggtgtcaccgaagcttcctcgttgctcggaggctctcctaggaggccctgcggccggaaggggtctccttaccatactggtcaactccaccccgccgtaagggtcgctgatcttttgcagcacatcaatcagatgaaaaccgccgaagggtacgggtttaagcaggaatacgagtctttttttgaaggctgggatgcgaccaagaaaaaagacaaggtgaaagggagccggcaagaacccatgccagcctacgatcgacaccgcgtgaagcttcatccaatgttaggggaccccaacgccgactacatcaatgccaactatattgatctgcgcggtggaagaacgggttatcaccgaagcaaccacttcattgctacccagggcccaaaacccgagatggtatacgacttttggcgcatggtgtggcaggaacactgttcgtcaatcgtaatgattacgaaactggtcgaggtgggccgcgtgaagtgctctaggtattggccagaggactcagatacttacggcgacatcaagatcatgctggtaaagacggagactttggccgagtatgtagtcaggacattcgctctagagcgcaggggatattctgcccgtcacgaggtaaggcagtttcatttcacggcttggcccgaacacggggtgccatatcatgcaactggtttgctcgcatttattaggagagtgaaagcaagtaccccccccgacgcgggccccatagtgattcattgctcagccggcaccggcagaactgggtgttatattgtgctcgacgtaatgctggatatggctgagtgtgagggcgtggtggacatttataactgcgtaaaaacgctgtgcagtagacgcgtgaacatgatccagaccgaagagcaatatatttttattcacgacgcaatccttgaggcttgcctgtgtggcgagacaacaataccagtgagcgaattcaaagctacatataaggaaatgatcaggattgacccacaatccaatagcagtcaactcagggaagaattccagactctgaattctgtgaccccccctttggacgtggaagaatgttctatcgccctgttacccagaaaccgcgacaaaaacagatccatggacgtcttacctccagacaggtgccttccctttctcatcagcacagacggggacagcaataattacatcaacgccgccttaacagacagttatactcgctccgccgcctttatcgtcactctgcacccacttcaaagcacaacccccgatttttggagactcgtatatgactacggctgtactagcattgtgatgctgaatcagctcaatcagagtaatagcgcttggccctgcctgcaatactggccggagcccgggcgccaacagtacggcctgatggaagttgaattcatgagcggtacagccgacgaggatctcgttgcgagggtgtttcgggtgcaaaatatcagtcggctgcaagaggggcacctgctggtccggcattttcaatttctacgctggtcagcttaccgcgacactcccgattccaagaaggcttttcttcacctgcttgctgaagtggacaaatggcaggccgaatcaggcgacggcagaactattgtgcattgtctcaacggggggggtcgcagcggcaccttttgtgcatgcgcgaccgttctggagatgatccgctgccacaatctggtcgacgttttcttcgctgccaagaccttgcggaactataagcccaacatggtcgagaccatggaccagtatcacttttgctatgacgtggccctggagtaccttgaaggcctcgaatcacgctag

SEQ ID NO: 130992 - DNA, 4341 bp, synthetic construct
  misc_feature 1..4341: note = Description of Artificial Sequence: Synthetic coding sequence
  source 1..4341: mol_type = other DNA
atggcccgggctcaggctctagtcttggcattgacatttcagctgtgcgcaccagagactgagaccccagccgctggctgtaccttcgaggaagcgtcggatccggctgtaccgtgcgagtactctcaggcacagtatgacgactttcagtgggaacaggtgcgcattcatcctggtacaagggcaccagcagatctgccacacggctcctacctgatggtgaacacatcgcagcacgcccccggccagcgagcccacgtcatctttcagtcattgtctgagaatgatacacactgcgtccagttcagctatttcctctactctcgtgacgggcattctccaggcaccctaggcgtgtatgtgcgagtcaacggtggtcccttggggtccgccgtctggaatatgacaggctcccacggcaggcaatggcaccaagccgaattggctgtgtctactttctggcctaatgagtaccaggtactgttcgaagcacttatatcacctgatcggcgcggttatatggggctggatgatattcttctgttgtcttatccctgtgccaaagccccccacttcagccgcctgggggatgtggaagtgaacgcaggacagaacgcctcctttcaatgtatggccgccgggcgcgccgccgaggccgagcggttcctcctccaacgccagagtggagccctcgtacccgctgcaggagtccgccacataagccacaggagattcctggcgacgttcccactggccgcggtgtcccgcgctgagcaggatctgtaccgctgtgttagccaagccccacggggtgccggcgtgagcaacttcgctgagctgattgtgaaagagcccccgacccccattgctccgcctcagttactacgagcaggtccaacttatttgattattcaactgaacaccaatagcattatcggagatggcccaattgtgagaaaggaaatcgagtataggatggctagagggccatgggcagaggtccacgcagtaagtctccagacctacaaattatggcatttggatcctgacacagagtatgagattagcgttcttctgacacggccaggagacggaggaacaggtcggcccggaccaccactgattagtagaaccaaatgtgccgagccaatgagagcacctaaaggactggcctttgcggagatccaggcgaggcagctgacactccagtgggaaccacttggctacaatgtgaccaggtgccatacttacaccgtgagtttgtgctaccattatactttgggaagttcccacaatcagaccatcagagagtgtgtcaaaacagagcagggagtcagcaggtacacaattaagaaccttctcccctaccgtaatgttcatgtgaggctagttttgacaaaccccgagggcaggaaggagggaaaggaggtcaccttccagaccgatgaggatgtgcctagcggcatcgccgctgagtctttaacgtttacacctcttgaagacatgatttttctgaaatgggaagagcctcaggagccgaatggactcatcacacagtacgagatctcttaccagtcaattgagagcagtgaccctgccgtgaatgtgccaggacctaggcggactatctccaagctgaggaatgagacataccatgtattcagcaatctccatccaggtacaacctacttattctccgtgcgagctagaactgggaagggcttcggccaggcagcgctcacagaaattacaactaatatttctgctccttctttcgattacgccgatatgccttccccacttggcgagagtgaaaacactattaccgtgctcctgcgtcctgctcaaggacggggtgcaccaataagtgtctaccaggttattgtggaagaggaacgcgctcggcgccttcggcgagagcccggcggccaggactgttttcccgtccccctgactttcgaggcggctcttgctcgcggactcgtacactacttcggagccgagctggctgcttcctctctcccagaagccatgccctttactgtgggtgacaaccagacctataggggcttttggaatccacctcttgaaccaagaaaggcctacttgatttattttcaggctgcgagtcatcttaaaggcgaaacccgccttaactgcatccggatcgcccgaaaagctgcatgtaaggagagcaaaaggccactagaagtgtcacaacggagtgaggagatggggctcatcttgggtatatgcgcagggggcctcgcagtgttgatcctcctgctcggagcgatcatcgtgataatacgcaaggggcgggatcattatgcctacagctactacccaaaacctgtcaacatgacaaaagccactgttaattataggcaagaaaagacccacatgatgtccgccgttgatcggagttttaccgaccaaagtacactccaggaagacgagcgcttgggcctctctttcatggatacacacggttattccacgagaggggatcagcgaagcggcggcgtgacagaggcttcctccctcctcggcggtagcccacgacgcccctgcggcagaaaggggagcccatatcacacgggccaactgcatcctgccgtgcgcgtggctgacttgcttcagcacatcaaccagatgaaaacggctgagggatatggtttcaaacaagagtacgagagcttttttgaaggttgggatgccactaaaaagaaagataaagtgaagggctctcggcaagagcccatgccagcttatgaccggcaccgggtgaagttgcacccaatgctgggggaccctaacgccgactatattaatgccaattatatcgatgggtatcaccgttctaaccacttcattgcaactcagggacccaagccagaaatggtctacgatttctggcgtatggtttggcaggaacattgctcctccatagtcatgattactaagttggtggaggttggtcgcgtgaagtgctcacgctattggcccgaggacagtgacacctacggcgatatcaagattatgctcgtaaagacagaaacactggcagagtacgtggtgaggacctttgcgctggagcgccgcggctactcagcacggcacgaggtgcgccagttccactttaccgcctggcccgagcatggagtgccttatcatgcaacaggtctgcttgcatttatccgtcgtgtgaaggcttctactccccctgatgcggggccaatagtcattcactgctctgccgggaccggccgcacagggtgctacattgtactggacgttatgttggatatggcggagtgcgagggggtcgtagacatttataactgtgtgaaaacactgtgctcgcgccgggttaatatgatccagacagaagaacagtacatctttattcacgatgccattctcgaggcttgcttgtgcggagaaactaccattcctgttagtgagttcaaggccacatataaggaaatgatcaggatcgatccccaaagcaatagcagccagctcagggaggagttccagacactgaacagcgtgaccccacctctggatgtggaggagtgtagtatagcactccttcctcgcaatcgcgacaagaatcgcagtatggacgtgttaccccctgatagatgtctcccttttctcatctccaccgacggcgatagcaataattacatcaacgctgcgttgacagattcatacactcgatctgccgccttcatcgtgactctacatcccttgcagagtaccacacctgatttctggagactggtgtatgattatgggtgcaccagcatcgtgatgctgaatcagcttaatcagtccaattccgcttggccttgcctacaatattggcccgagccgggcaggcagcagtacgggctgatggaagtggaattcatgtcggggaccgcagacgaggacctcgtggccagagtatttcgggttcagaacatttcccggttgcaggaaggccatctgctcgttcgacattttcagttcttgagatggtccgcctacagagataccccagactccaagaaagcttttctccacctactggctgaggtggacaagtggcaggccgaaagcggcgacggtcgaacgattgtgcattgcctgaatggaggcggccggtccgggaccttctgcgcttgtgcaacagtgctggagatgatccggtgccacaacctggtggatgtgttctttgcagctaagaccctgaggaactacaaaccaaatatggtggagactatggaccagtaccacttttgttacgacgtggctttggagtatctagaggggttggagtccagatag

SEQ ID NO: 130993 - DNA, 4329 bp, synthetic construct
  misc_feature 1..4329: note = Description of Artificial Sequence: Synthetic coding sequence
  source 1..4329: mol_type = other DNA
atggccagggctcaggctctggtgctggccctgaccttccaactatgtgcccctgagactgagacccccgccgctggctgcacattcgaggaagcctccgatccagccgtgccttgtgagtactcacaggcgcagtatgacgactttcaatgggaacaggttcgtattcatcctgggacgcgcgccccagctgatcttccacacggctcttacctgatggtcaatactagccaacacgctccgggacagagagcacacgttatctttcagagcctgtcagagaacgatacccattgcgttcagttctcatactttctttatagcagagacggccacagcccagggaccctgggtgtatacgtgcgagtgaatggggggccccttggtagcgctgtttggaatatgactggctcacacggcagacagtggcaccaagccgagctagctgtatcaaccttttggcccaacgaataccaggtcctgttcgaggccctgatctctcccgaccgtagaggctacatgggtctggacgacattcttctgctgtcttatccctgcgctaaggcacctcacttctccaggttgggagatgtggaggttaacgcaggtcaaaacgcatcttttcagtgcatggcagccggtcgggcagccgaggcagaacgattcctgctacagaggcagtcaggcgctctcgtgcctgccgccggagtaagacacatcagtcacaggaggttcctcgctacttttccacttgctgcagtttcaagggccgagcaggacctgtataggtgtgtatcccaggccccgagaggagctggtgtgtctaacttcgccgagttgattgtcaaggagccacctacccccatcgcaccaccacagctcctcagagcaggacccacatacttgatcattcagctgaataccaatagcatcattggggatggcccaattgtgcggaaggagatcgagtaccgtatggcgcgcggcccgtgggctgaagtccacgctgtatctctgcaaacttacaagctgtggcacctcgacccagacaccgagtacgagatctccgttcttttgactcgccctggggatggagggaccggacggcccggaccgccactgattagcagaacaaaatgcgctgagccaatgcgagcacccaaaggactggcctttgcagagattcaggcacgccagctcaccttacagtgggaaccgcttggatacaacgtgaccaggtgtcatacgtatacagttagcctttgctaccattataccctggggagttcccacaatcagactatccgtgagtgcgtcaagacagaacaaggggtttcgcgctacacgattaagaaccttcttccatacagaaatgtccatgtaagattagtgctaaccaatcctgagggccggaaagaaggtaaggaggtcacttttcagacagatgaagatgttccaagcggcattgccgccgaaagcctgacgttcacaccattggaggatatgattttcctcaagtgggaggagccccaggaaccaaacggactcatcactcagtacgaaatttcataccagagcatcgagagttctgaccctgccgtaaacgtccccggccctcggagaaccatatccaagctgaggaatgaaacgtatcatgtgttttccaatctccatcctggcacaacttatctcttttccgttagagcgcgcacaggcaagggttttggacaggctgctttgaccgagatcacaacaaatatttcggcccccagctttgactacgccgatatgccttcaccattgggtgagtccgaaaacacaatcaccgtcctcctgcgacccgcacagggacggggggcacctatttccgtgtatcaagtaatcgttgaggaggagagagctagacgactccgaagagaaccgggcgggcaggattgttttcctgttcccctgacctttgaggccgcactggcacgcggtttagtccactacttcggggctgaattggcggccagctccctccctgaagctatgccatttaccgtaggagacaaccagacgtataggggcttctggaacccccccttggagcctcgtaaagcatatctgatttattttcaggccgcttcacacttgaaaggggaaacacgtctgaattgtatccgaatcgctagaaaggcggcttgcaaggagtctaaacgacccctggaggtgtcccagcggtctgaggaaatggggttaattctggggatctgcgctggcggccttgctgtgctcatcctactgttaggcgctattatcgtgatcataaggaaaggtaagccagtgaacatgacgaaagctacggtgaattacagacaagagaagactcatatgatgagcgccgtggatcgctcatttacagaccagtccacacttcaggaggacgaacgtctaggactctcgtttatggacacccacgggtatagtactcgaggcgaccagagaagcggcggcgtgaccgaagcctccagcttactgggcgggtctcctcgtcggccatgcgggaggaaagggtctccctatcacacagggcagcttcacccggccgtgagggtggcagatcttttacagcacattaaccagatgaaaacagctgagggctacggcttcaaacaggaatacgagtccttctttgaagggtgggatgccaccaagaagaaagacaaagtgaaaggttcgagacaggaacccatgcctgcctatgatcgacacagagtgaagttacaccccatgctcggcgatcccaatgctgattacatcaacgcgaattacattgatatcagaattaacagggaggggtaccacagatctaatcattttatcgcgactcaaggccccaagcccgagatggtatacgacttttggcggatggtgtggcaagagcactgttcaagcattgtcatgataacaaaactcgtggaggtggggagagttaaatgttcacgctattggcccgaggatagtgacacctatggagatataaaaattatgctggtcaagacagagacactggctgaatacgtagtcaggacatttgcactggagaggcgggggtactctgccagacacgaagtgcgacaatttcatttcacagcttggccagaacatggagtcccatatcatgcgaccggactactggcctttatacggagagtgaaggcgagcacaccgccggatgccggcccaatcgtgattcactgctcagctggtacaggcaggactggatgctatattgtcttggacgttatgcttgacatggccgagtgtgaaggagttgtggacatctacaattgcgtaaaaactctgtgctcgcgtcgagtcaacatgatccagaccgaagagcagtacatcttcattcacgatgcaatcctggaagcttgcttgtgcggcgaaacaaccattcctgtgtccgagttcaaggcgacatacaaagagatgattagaattgatccccaatctaattcatcgcagctgagagaggaatttcagaccctgaactcagtgacccctcctttggatgtcgaggagtgtagcatagccctgctaccccggaacagggataaaaaccgcagtatggacgtattaccaccagatcgctgcctgcccttccttatctccactgacggcgattccaataactatattaatgcagcactcaccgattcttatactcgaagcgctgccttcattgtaacattgcatccactccagtccaccacaccagacttttggcggctggtgtatgattacggctgcacatccatagttatgcttaaccagcttaaccagagcaattccgcatggccctgccttcagtattggcccgagcccggcaggcagcagtacgggctaatggaggttgagttcatgtccggcactgcagatgaggatctagtagctcgagtgttccgcgtacaaaatatctccagactgcaggaaggtcacctcctggtgcggcatttccagttcctacgctggtcagcttatcgcgacacgcctgatagtaaaaaagcctttcttcatctcttggccgaggtagacaagtggcaagcagagtccggtgatggtagaaccatcgtacattgcctgaacggagggggaagatcgggcactttctgtgcatgtgctactgtgcttgagatgatccgctgccacaacctggtagatgttttttttgcagctaagactctcaggaattataaacccaatatggtggagactatggatcagtatcatttttgttacgacgtggcactagaatacctggaaggattggagtcacgatag

SEQ ID NO: 130994 - DNA, 4311 bp, synthetic construct
  misc_feature 1..4311: note = Description of Artificial Sequence: Synthetic coding sequence
  source 1..4311: mol_type = other DNA
atggctcgggcacaggcactcgtcttagcacttaccttccaactgtgcgccccagagacggagacacccgcagcgggctgtacttttgaagaggcttctgatcctgcagttccctgcgagtacagtcaggcccaatatgatgacttccagtgggagcaggtccgaattcaccccggtactagagctcctgctgatctgccgcacggttcttacctgatggttaatacttctcagcatgcgcctggccagagagcacacgtgatattccagagtctgagtgaaaatgatacacactgcgtacaattttcttatttcctctatagccgagacggacactctcctggcactttaggagtttacgttcgagtcaatggaggtcctttaggttctgcggtgtggaatatgactggctctcacggacgccaatggcatcaagcagagcttgccgtgtccaccttctggcctaacgagtaccaggtcctgtttgaagccctgattagccccgaccgcagaggatacatgggactcgacgacatacttctgctctcgtatccctgcgcaaaggctcctcattttagtcgcctaggagatgtggaagtgaatgccggccaaaatgcatccttccagtgtatggccgccgggcgagctgcggaggccgagagattcttattgcagcggcagagcggtgcacttgtgcctgctgcaggggtgagacatatctcacacaggaggttcctggcgacttttcccctagcagccgtaagtagagccgagcaagatctgtatagatgtgtaagccaagctccacgcggggccggggtgagtaacttcgcggagttgatagttaaggagccgccgacaccgattgcccccccacagctgctgagggctggcccaacctacttgatcatccagctaaacaccaacagcataatcggcgacggcccaatcgtgagaaaagagatcgagtaccggatggcccgcggaccttgggcggaagtgcatgctgtctccctccaaacatacaaactttggcatctcgaccctgacaccgagtatgagatctccgtcctgctgactagacctggagatggcggaactgggaggcctggcccacccttgatcagcagaactaaatgtgctgagccaatgagggccccaaagggattggcttttgccgagatccaggcaagacaattgactcttcagtgggagcctctggggtacaacgtcacacgttgccatacttacactgtctcactgtgctaccattataccctgggctccagccataatcaaacgatccgcgaatgcgtcaagactgagcaaggtgtgagccgatacaccatcaagaacctcctgccctaccggaacgtgcatgtacgactggttctcaccaacccagaagggcgcaaggagggcaaggaggtgacctttcagaccgacgaagacgtgccatctgggatagcagcggagtctcttacatttacacccttggaggacatgatcttcctcaagtgggaggaaccccaagagcccaatggcctaatcacccagtatgagattagttatcagagcattgaaagttccgacccagctgtaaatgtgcctggacctcggcgaacaatctccaaactgcgtaatgagacctaccacgtcttctcaaatcttcaccctggaacgacatatctctttagtgtccgcgctagaacaggaaaagggtttggtcaggccgcactcaccgaaattactacaaacatctcagccccatcgttcgattatgccgacatgccctcccccctgggggaatctgagaacactataaccgtgctcctccgccccgcacagggccggggcgccccaatctcagtgtatcaggtaatcgtggaggaagaaagagccagaaggttacgcagggaaccaggaggacaggattgtttccccgtgcctctcacttttgaagccgcactggctcgggggctggtacactacttcggcgctgagctggccgcttcaagccttccagaggctatgccatttacagtcggagataatcagacgtaccgcggattttggaatcctcctctggaacccaggaaagcctatctgatttactttcaagctgctagccatctgaagggcgagacacggctgaattgtataagaatcgcccgcaaagccgcctgcaaggagtccaagagaccactcgaggtgagtcagcgatctgaagaaatgggcctcattctaggtatatgcgcgggcgggctcgcagtgttgatccttctgctgggtgctattattgttataatcaggaaggggaaacccgtgaatatgacaaaagccaccgtgaactatcgtcaagaaaaaactcatatgatgagcgccgtcgaccggtctttcacagaccaaagcactctgcaagaagacgagagactgggattaagttttatggacactcatggctattcaacccgtggggaccagcggagcgggggtgtaacagaagcttcatctctgcttggggggagcccccgcagaccgtgtgggaggaaaggcagcccgtaccacaccggccagctacatccagctgttagagtagcagacctgctccagcatatcaatcaaatgaaaactgctgaaggttatggcttcaaacaggaatacgaaagctttttcgaaggttgggatgctacgaagaagaaggacaaagtaaaaggtagtaggcaggagcctatgcccgcatatgatagacacagggtgaagttgcacccaatgctgggagaccctaatgccgattatatcaacgccaactacattgacggatatcatcgatctaatcacttcatagctacacagggacccaagcccgaaatggtgtacgatttttggaggatggtctggcaggaacactgctcaagcatcgttatgattacaaagctcgtcgaagtgggaagagttaagtgttctaggtactggcctgaggattcagatacatacggagatatcaagatcatgctggtgaagactgaaaccttagccgaatacgtcgtgagaacttttgccctcgagaggagagggtactccgcgcggcacgaagtgcgccagttccacttcacggcttggcccgagcatggggtgccctatcacgccactggcctcctggcattcatccgccgggtgaaggccagcacgccgcctgacgccggcccaatcgtgatccactgttctgccgggacaggcaggactgggtgttatattgtgctggatgtgatgctggacatggctgagtgcgagggggtggtcgatatctataattgtgtaaaaactctctgcagcagacgcgtcaacatgatccagaccgaagagcagtacattttcatacacgacgctatcttggaggcttgcctgtgcggggagactaccatcccagtttcagagtttaaggctacatataaagagatgattaggattgatcctcagtcaaatagctcccagctacgagaggagtttcagaccttgaacagcgttacaccacctcttgatgttgaggagtgctctattgcccttcttccaaggaatcgggacaagaacagatccatggacgttttgcctccggacaggtgtctcccttttctgatttcaaccgatggagactcgaacaactacattaatgccgcacttacggattcctacaccaggtccgctgccttcatcgttacactgcaccccctccagagcactacacccgatttttggagattagtgtatgattacggatgtacatccatcgttatgctgaaccaactaaaccagagtaacagcgcctggccttgtctccaatactggcctgagcctggaaggcagcagtatggtttgatggaagtcgaattcatgagcgggactgccgacgaggacctggtagcccgcgtatttcgggtacagaacatctcacgtctccaggagggacatctgctcgtgcggcattttcagtttctaagatggtccgcgtatcgcgacactcccgactcaaagaaggccttcctacatctcctggcagaggtggacaaatggcaggctgagtctggcgatgggagaactattgttcactgcctgaatgggggtgggcgcagcggtactttctgtgcctgcgccacagtcctcgaaatgatcaggtgccataatctggtcgatgtcttttttgccgctaagaccctccgtaactacaagcccaacatggtggagaccatggatcaataccacttctgttacgatgttgctctcgaatatctcgaaggtctggagtcacgctag

SEQ ID NO: 130995 - DNA, 4302 bp, synthetic construct
  misc_feature 1..4302: note = Description of Artificial Sequence: Synthetic coding sequence
  source 1..4302: mol_type = other DNA
atggctcgtgcacaggcactcgtcctggccttaacgttccagctctgtgcaccagaaactgaaacaccagcagcaggctgtacatttgaggaggccagcgatccggccgtgccatgtgaatactcgcaggcccagtacgatgacttccagtgggaacaagtgcggattcatcctggtacacgggcgcccgccgacctcccccacggcagttatctcatggtgaacacaagtcaacacgcacctggtcagcgcgcccatgttattttccagtccctcagtgagaacgacacacactgcgtccagttcagttatttcctgtacagtcgagatgggcacagtcccggaaccctgggagtttacgtcagagtgaacggcggacctctgggttcagcagtgtggaacatgactggctcccatgggcgccaatggcaccaggccgaattggccgtctcgactttctggcctaacgagtaccaagtgctgttcgaggccctcatatctccagacaggcggggctatatgggcctggacgacatcctgcttctcagttatccatgtgctaaagctccacacttctctagattaggagacgtggaagtcaacgccggacagaacgcctctttccaatgtatggctgctggacgggctgccgaagctgaacggttcctgctacagcggcaatccggagccctcgtgcctgccgcaggggtgaggcatatctcacatcgccgctttctggccaccttcccgctggctgctgtttcgcgggccgagcaagacctctacagatgcgtctcacaggccccacggggcgccggagtctctaattttgccgagctcattgtgaaggagcctccaacaccaatcgccccgcctcagctgctccgggcaggtccaacctacttaatcatccagctgaacacaaactccattattggggacggcccaattgtcaggaaggaaatcgagtatcgcatggccagagggccttgggccgaggtgcacgccgtgtctctgcagacatacaaattgtggcacctggaccccgatactgagtacgagatatcagtgctgctgactcgccctggagacggaggtactggacgacccggccctcctcttatctcaagaactaagtgtgcagagcccatgcgggcccccaaggggctggcctttgccgaaatacaagctagacagcttactttacaatgggagcccctgggatacaacgtgacccgctgccatacctacactgtctcactctgttaccactatacccttgggtcctcacataatcagacaatcagagaatgtgttaaaaccgagcagggagtctcccggtacacaatcaaaaatttactcccctacaggaacgtccacgtgcggctggtgttgactaaccctgaaggccgaaaagaaggaaaagaagtgaccttccagactgacgaggatgtcccttcagggatcgcggccgagagcctgaccttcacccccctggaggacatgattttcctgaagtgggaggaaccccaggaacctaacggtctgatcacacagtacgaaatcagctatcagtctattgagagcagtgatcccgctgtaaacgtacccggaccacgccgaactattagcaagctgaggaacgagacttaccatgtgttctccaatctgcatccgggcaccacatacctattttccgttcgtgcaaggaccgggaaaggcttcgggcaggcggcactgacagagatcacgaccaacatctcagcaccgtcctttgactatgctgacatgcctagccccttaggggagtctgaaaatacgataacggtgctactccgccctgcccagggaaggggagcccctatttctgtctaccaggtaatcgtcgaggaagaacgcgcgagacggctgcgtcgggagccaggcggtcaggactgttttccagtgcctctgacctttgaagcagctctcgcaaggggactagtacattacttcggcgctgaacttgccgccagtagcctacctgaggctatgcccttcaccgtgggagacaaccagacttatagggggttttggaaccctccgcttgagcctagaaaagcctacctgatctattttcaagcagcatcacatcttaaaggcgaaacccgcctgaattgcattcgaattgcaagaaaggccgcttgcaaggagtctaagaggccattggaagtttctcagaggagcgaggaaatgggcctcattctcggaatttgcgcggggggcctggccgttctgatcctgctgctgggcgccattatcgtgattattcgaaagggaaagcccgtcaacatgacaaaggccaccgtcaactatcgacaggagaagacacatatgatgtcagccgttgaccgcagcttcactgaccagtctactctgcaggaggacgaacgcctgggactgtcctttatggatactcacggttacagcacaaggggagaccagagaagtggaggcgtgactgaagcctctagccttttgggcggcagcccaaggcgaccgtgtgggaggaagggatccccgtaccacacaggtcagctgcaccctgccgtgcgggttgctgatttgctgcagcatattaaccaaatgaaaactgccgaggggtacggctttaagcaagaatatgagtcctttttcgagggatgggacgcaaccaagaaaaaggataaagtcaagggatctcgacaggagccaatgcccgcctacgatagacatcgtgtgaaattgcatcccatgttgggagaccctaatgctgattatatcaacgctaactacattgacggatatcatcggtccaatcacttcatcgccactcaaggtccaaagcccgagatggtgtatgatttttggcgcatggtctggcaggagcactgcagttcgattgtaatgattaccaaattggtcgaggtgaaatgctccagatactggcccgaggatagcgacacatacggagatattaaaataatgctggtcaagacagagaccttggcagagtacgttgttagaactttcgcactggaaagaagggggtattctgccagacatgaggtgcgccagtttcactttaccgcctggcccgaacatggcgtcccctaccatgccactgggctgttggcgtttatccgcagggttaaggcctccactcctcccgacgccggcccaatcgttatccactgcagcgcgggcaccggtaggacaggctgctacatagttctggatgttatgcttgacatggcggagtgtgagggtgtggtcgatatctacaattgcgtcaaaacgctttgcagtagacgggttaatatgatccagacagaggagcagtacatttttatccatgacgcgattctggaagcctgtctatgcggggagaccaccattccagtgtccgagttcaaagcaacttataaagaaatgatccggatcgacccccagagtaacagctcccaactgcgggaagagttccagaccttgaactctgtaaccccacctttagacgtcgaggaatgcagtatagctctgctgccaaggaaccgtgacaaaaaccgttccatggatgttctaccccccgatcggtgcctgccttttcttatttccacagatggagatagcaacaactacatcaacgcagcccttacagactcatatactcggtcagcagctttcatcgtgacactacacccgttgcagagtaccaccccggacttctggcgtctggtttatgactatggttgcacttcaattgtcatgctcaaccagctgaaccagtccaacagtgcttggccctgtttgcagtactggcccgagccaggacgacagcagtacggcttaatggaagtcgaattcatgtctggaacggccgacgaagatttggtggcaagggtcttccgagtgcagaatatttccagattgcaagaagggcatcttcttgtccgccacttccagtttctgagatggagcgcctaccgggacacgccagattccaagaaggcatttctgcacctgctggccgaagtcgacaagtggcaggccgagtctggcgatggccgtacgatagtgcattgtctgaatggaggagggagatccggcaccttctgcgcctgcgctaccgtgctggagatgattcggtgccacaatctggtggacgtctttttcgcagcgaagaccttgaggaattacaagccaaatatggtggagaccatggatcagtaccatttctgctacgatgttgcactggagtacctggaaggcctcgagtcgcggtag

SEQ ID NO: 130996 - DNA, 6948 bp, synthetic construct
  misc_feature 1..6948: note = Description of Artificial Sequence: Synthetic coding sequence
  source 1..6948: mol_type = other DNA
atgagaatactgaaacggttcctggcctgtattcagcttttgtgcgtttgcaggttggattgggctaatggatattaccgccaacaaagaaagctcgtcgaggaaattggctggagctacaccggagctctaaatcagaagaactggggaaagaaatatccaacatgtaattcccccaaacagagccctatcaatatagatgaggatctgacacaggtaaatgtgaacctgaaaaaactgaagtttcagggctgggacaagacttccctggaaaacactttcatccacaacactggcaagacagtagaaattaacctgactaatgactaccgcgtgtcaggcggggtgtcagaaatggtgtttaaagctagcaagataacattccactggggtaaatgtaatatgtcatcagatggatccgaacactcacttgagggccaaaagttcccactcgagatgcagatctattgcttcgacgcagataggttctctagttttgaagaggctgtcaagggaaaggggaagcttagagccttgtctatactgttcgaagttggcacagaggaaaaccttgatttcaaagcaattatcgatggagttgagtcggtgtctagatttggaaagcaggccgcgctagaccctttcatcttgctcaaccttctgccaaacagtactgacaaatattatatatataacggaagtctcaccagcccaccctgtactgatactgtggattggatcgtgttcaaggataccgtctcaatcagtgaatcccaacttgcagttttttgcgaggtgttgaccatgcagcaatcgggttatgtgatgctcatggattatttgcagaacaattttagagagcaacagtataaattttcgagacaagtgttctcatcttacacaggaaaagaagaaattcacgaggctgtgtgttcaagcgagccggagaatgtccaggctgatccagagaattacacctcgttgctcgtgacctgggagcgaccccgcgtggtgtacgacaccatgatcgaaaagttcgcagtcctatatcagcagcttgatggcgaggatcaaactaaacatgagttcctgacggatggctaccaggatcttggcgctatactgaacaatctgcttccgaatatgtcatatgtgttacaaatcgttgctatctgtacgaacggtctctacggaaaatactccgaccaattaattgtggatatgcccacagacaatccagagctggatctatttcctgagctcataggcactgaggaaattatcaaggaagaagaggaaggcaaggacattgaggagggagctatcgtcaacccaggcagggattcagcaacaaaccaaattagaaagaaggaaccacagatctccacaacgacccattataatagaatcggaaccaagtacaatgaagcgaaaacaaaccggtcccccaccagggggagcgagttttccgggaagggggatgtgcccaacacctctctcaatagtacttcccagccagtgacgaagctagccaccgaaaaggacatttctctgaccagccagaccgttacagaactgcccccccacaccgtggagggcacaagtgcatccctaaacgatggaagtaaaactgttcttaggtcccctcatatgaatctctccggcaccgcggagtctctcaacacggtctctattaccgaatacgaggaagaatccctgctgaccagtttcaaactggacaccggggccgaggactcaagtggatccagccccgccacatccgctatacccttcataagtgaaaacatttcccaggggtatatcttttcctcagagaatccggagacaatcacttatgatgtgctgattccagaaagcgctaggaatgcatcagaagactcgacctcctcaggtagcgaggagtctctgaaggatccttctatggaaggtaatgtctggttcccgtcctctacggacatcaccgcgcaacctgatgtggggtccggaagagagtccttcctccaaacaaattacactgagatccgcgttgatgagagtgaaaagacgacaaaatccttttctgcaggacctgtcatgtcccaagggccgtctgtgactgacctcgagatgccccactactccacatttgcttattttccaaccgaggttacccctcacgctttcacgccctcctctcgtcagcaagacttggtttcaacagtgaatgtcgtgtattcccagactacacagccggtgtataatggggagacccctttacagcccagctacagctctgaggtgttcccacttgtgacgcctctcctgctggataaccagattctgaataccactccggctgcatcttctagcgacagtgctctgcatgcaaccccagtcttccctagcgtggatgtgagtttcgaaagtatacttagcagctatgatggtgcgcctcttctcccattctccagcgcaagctttagttctgaactgtttaggcacctgcataccgtaagccagatcctgccccaggtaaccagtgcaacagagtctgacaaagtgccattacacgccagcctgcctgtggccggcggcgaccttctcctggaaccttccttagctcagtacagcgatgttctgagtactactcacgctgcctcggagacgctagaatttgggagtgagtccggagtgttgtacaaaaccttaatgttctcacaggtggagcctcctagctcagacgccatgatgcacgcgcgctcttcgggccctgagcccagctatgcgctcagcgacaacgaaggatctcaacacatcttcaccgtcagttacagttccgctattcctgtgcacgacagcgtgggtgtaacttatcagggtagccttttttctggcccctctcatattccaatcccaaagagttctcttataacgccaactgcctccctgctgcagccaacccacgccctcagcggggacggtgagtggagcggcgcatcatccgactccgagttccttctaccagatacagacggcctcaccgcgctcaacatttcttccccagtctccgtagctgaatttacctacactacatccgtgttcggagacgacaacaaggctttgtcaaagtcagagataatttacgggaacgagaccgagctgcaaattccgtcctttaacgaaatggtttacccgtccgaaagtactgtcatgcccaatatgtacgataatgtgaataaactgaacgcttcattacaggagacatcggtgtccattagtagcactaaaggaatgttcccaggatctcttgcgcacacaaccaccaaggtttttgatcatgagatctcgcaagtgcccgaaaataatttcagcgtgcagcctacccacacagtgtcccaggctagcggcgatacatctcttaagcctgtcctgtcggctaactccgagcctgcatcaagcgacccagcgtcatccgagatgctcagcccttcaactcagcttttgttttatgagaccagtgcttcctttagcaccgaggtactgttgcagccctcatttcaggcgagcgacgtggacacactccttaaaaccgtgttgcccgccgtcccgtccgacccaatactagtggagaccccaaaagtcgacaaaattagttccaccatgctacacttgatcgttagtaactcagcctcttcggaaaacatgctacattcaacgtcggtgccggtgtttgacgtgtctccaacatcccacatgcattcagcgagcttgcaaggcctcaccatttcttatgcctccgaaaagtatgaacccgtgctgctgaagagcgagtctagtcatcaggttgttccttctctatactcaaatgatgaacttttccaaacagctaacctcgagattaaccaggcacaccctccaaagggtaggcacgtgttcgctaccccagtcttgtcgatcgacgagcccctgaatactctgatcaacaaattaattcatagcgacgagatcttgaccagcactaaaagttcagtcactggcaaagtgttcgcaggtatcccaaccgttgcctccgatacttttgtgtctaccgaccactccgtccccattgggaatggacacgtcgcaatcacggcagtcagtcctcaccgtgatggcagcgtcacaagcaccaaactcttgttcccctctaaagccacatctgaactgtctcattccgccaagtctgacgcagggctggtgggtggcggcgaggacggcgatacagacgacgatggcgatgacgacgacgacgacagagggagcgacggcctatctatccacaaatgcatgagttgctcttcataccgcgaaagccaggagaaggtgatgaacgacagcgatacccacgagaactccctgatggatcagaacaatcctatttcttattcactctctgagaactcggaggaggacaaccgggttacctccgtctcgagtgacagccagacaggaatggacaggtcccccggcaagtcccctagtgcgaatggtctgtcccagaaacataatgatggcaaggaagagaacgacatacaaaccgggtccgctttattgcccctgtctcctgaaagcaaggcttgggccgtcctgacctccgatgaggagtcaggcagcggccagggaacctccgattctttaaacgaaaatgagactagcactgatttctctttcgccgataccaatgagaaggatgcggacgggatccttgctgccggagacagtgagatcacacctggcttcccacagtcgccgacaagtagtgtgacctcagagaactcggaggtatttcacgtctcagaggctgaggcgtctaacagctcccacgaaagtcggatcggcttggccgaaggtctcgaatcagagaaaaaggctgtgatccccctggtcattgtgagcgcactcacattcatttgccttgtggttctagtgggtatactcatctactggaggaagtgcttccaaacagctcacttctacctggaggattccacgagccccagagtcatcagcacccctccaacacctatctttcctatctcagatgacgttggtgccattccaatcaagcatttccccaaacacgtagctgatttgcacgccagtagcggctttacagaagagtttgaaaccttgaaagaattctatcaggaggttcagtcctgcaccgtagacttgggtatcacagccgactcctctaaccaccccgacaataaacataaaaatagatatatcaacatcgtagcctacgaccactcccgggtgaaacttgcgcaactcgccgagaaggacggcaaacttaccgactacatcaatgccaattacgtggatggttacaacagacccaaagcttatatcgccgctcagggccccttgaagtctacagccgaggatttctggcggatgatctgggaacataacgtcgaggtcattgtgatgatcaccaacctggtcgagaagggacggcgcaaatgtgaccaatactggcctgccgatggctccgaagagtatggcaattttctggttacccagaaatctgtgcaagtgttggcgtattacactgtgcggaatttcacactgaggaatacgaaaatcaagaaaggctcacaaaaaggacgaccctccgggcgcgtggttacccaataccattacacgcagtggccggacatgggggtcccagaatactcactgcccgtgctcacgttcgtgcgaaaagcggcatacgcaaaaaggcatgctgtgggccccgtggtcgtgcattgcagcgctggcgtggggcggacgggaacatatatagttttggactcaatgctccaacaaattcagcatgagggcacggtaaacatcttcgggtttttgaagcacattcggtcacagcggaattacctcgtacagaccgaggaacagtatgtatttattcacgatacactggtcgaagccatactgtccaaggagacagaggtcctggattctcatattcatgcgtacgtgaacgcattactgatcccaggtcccgcaggcaagactaagcttgaaaagcagttccagttgctctctcagtcaaatattcagcagtcagactattcggccgcactgaagcagtgcaacagagagaaaaaccggacctcatctatcatccccgtggagcggtctcgggtcgggatctctagcctaagcggcgaaggaaccgattatattaatgcctcctatatcatgggctattatcagtcaaacgaattcatcatcactcaacaccctctgttacacaccataaaagacttttggcgtatgatctgggatcacaacgctcagctggtggtgatgattcccgacggtcagaacatggcagaggacgagtttgtgtattggccaaataaagacgagccaattaattgcgaaagtttcaaagtgaccctgatggccgaggaacacaagtgcctcagtaacgaggaaaaactgataattcaggactttatattagaggccactcaggacgattatgtgttggaggttcggcacttccagtgccccaagtggcccaatcccgactcacccataagcaaaaccttcgaactcatctcagtgattaaagaggaggctgccaaccgtgacggccccatgatcgtccatgatgagcacggaggggtaacagccggtacgttctgtgccctgaccacactgatgcaccagttagagaaagaaaactctgtcgacgtttaccaggtggccaaaatgatcaatttgatgcggcccggcgtattcgccgacatcgagcagtatcagtttctctacaaagttattttatcattggtgagcacaagacaggaagagaatccctcgaccagcttggatagtaatggcgctgcactgcccgacggaaacatcgcagaatcgctcgagtcccttgtttag

SEQ ID NO: 130997 - DNA, 474 bp, synthetic construct
  misc_feature 1..474: note = Description of Artificial Sequence: Synthetic coding sequence
  source 1..474: mol_type = other DNA
atgggccgcctgactgaggccgccgccgcaggatccgggtcacgagcggctgggtgggcggggagtccaccaacactgctacccctcagtcctacatcaccccgttgcgcggccaccatggcctccagtgacgaggatggaacgaatgggggtgcatcggaagcaggagaggaccgcgaagctccaggcgagcgccgcaggctgggcgtgctggctacagcctggctgactttttatgacatcgctatgacggcaggtcgcctcatcctgagccctcggctggagtgcatcggagccatctccgcccattgccagcctcaaccgcctgagttcaagcgattttcctgccttggtctgagatccagctgggattataagcgcggtccaccacgaccaatcaatttttgtattttcggccgagatcgcgtttccccttgctggccaggctggagccgcacccctgatttgaaatag

SEQ ID NO: 130998 - DNA, 867 bp, synthetic construct
  misc_feature 1..867: note = Description of Artificial Sequence: Synthetic coding sequence
  source 1..867: mol_type = other DNA
atgggcaggctcacagaagccgcggctgccggaagtggcagcagggccgctggctgggcagggagtccccctactctcctgccactcagccctacatctccccggtgcgccgccactatggccagctcagacgaagacggcactaacggtggagcttcagaagctggggaagaccgcgaggcgccaggggagaggagaaggcttggagtactggccactgcttggttaacattttacgatatcgctatgactgctggctggctcgtgctggccattgccatggtgaggttctacatggaaaagggaacccatcgtgggttatataagtccattcagaagactctgaaattcttccaaaccttcgcgctgcttgaaatcgtacactgcctcataggaattgtgccaacatcagtcatcgtgaccggcgttcaggtttcttcacggatttttatggtgtggctgattactcactcaatcaagccgatccagaatgaggagtccgttgtactttttctagtggcctggaccgtcacagaaatcactaggtattcattttatactttctccttactggaccacctcccttatttcataaagtgggctcgctacaattttttcattatcctctaccccgtgggagtggctggagaactgcttaccatatacgcagctctgccccacgtgaagaagaccgggatgttttcaattaggcttcctaacaagtacaatgtgagttttgattattactacttccttttaatcacaatggcatcctacatacctcttttccctcagctctactttcacatgctgagacaacgccgcaaagttctgcacggcgaggtgattgtcgaaaaagatgattag

SEQ ID NO: 130999 - DNA, 1269 bp, synthetic construct
  misc_feature 1..1269: note = Description of Artificial Sequence: Synthetic coding sequence
  source 1..1269: mol_type = other DNA
atggctggctgcgtgcccctgttacaggggttggtgctggttttagccctgcacagggtggaaccctcagcgacctccctgaaggaacgccatggcctgcactcagactcagcctgcacaggcgtacaggaatccctgttcctaccagcatctaaggcaaacgatgtgctggtaagatggaaacgcgccgggagttatttgctggaagagctgttcgagggcaatctagagaaagagtgctatgaggaaatctgcgtgtacgaggaggctagagaagtctttgagaacgaggtcgttaccgatgaattttggcgcagatacaaggggggatctccttgcatttcccagccttgcctgcacaatggatcctgccaggatagcatctgggggtacacctgtacatgtagcccagggtatgagggctccaattgtgaactagccaagaatgagtgccatccagagcgcacggacggctgtcagcacttctgtttgcctgggcaggagtcttatacatgttcatgcgcacagggatatcggctgggagaagatcataaacagtgcgtgcctcatgaccaatgtgcgtgtggagtcctgacgtcagagaagagagcccctgatctgcaggacctaccttggcaggtgaagttgactaactctgagggcaaagacttctgcggcggtgtcatcatccgcgaaaacttcgtgctgacaacagccaaatgttccttactgcataggaatattactgtgaaaacgtattttaaccgaacgtcccaggatcctctgatgatcaaaatcactcacgttcacgtccacatgaggtatgatgcggacgccggggagaacgacctcagccttctggagctcgaatggccaattcagtgcccgggcgcaggcctgcccgtatgcactcctgaaaaggacttcgccgagcacttgctcatccccagaacacgaggactcctgagcggatgggccagaaacggcaccgacctgggaaacagcttgaccacccggcccgtgacactggtggaaggcgaagaatgtggtcaggtgctgaacgtaacagtcaccacacgaacctattgcgagcgatcctcagtcgcagcaatgcactggatggatggtagtgtggtgacgagggagcatcgcggaagctggttcctaaccggagttctcggatctcaacctgtgggaggtcaagcccacatggtccttgtgacaaaagtgtcccggtattccttgtggtttaaacagatcatgaactag

SEQ ID NO: 131000 - DNA, 1203 bp, synthetic construct
  misc_feature 1..1203: note = Description of Artificial Sequence: Synthetic coding sequence
  source 1..1203: mol_type = other DNA
atggctggctgcgtcccccttttacaaggcctcgttctcgtccttgctctgcatagggtggagccctccgtcttcctgccggcttccaaagccaatgatgttttggtacggtggaaaagggctggctcttatctcttggaggagctgtttgaagggaatctcgagaaggagtgttacgaggagatctgcgtatatgaggaagccagagaggtgtttgagaatgaggttgtcactgatgagttttggcgccggtacaagggagggtctccctgcatcagccaaccttgcctacacaatggctcatgtcaggacagcatatggggctacacttgcacatgctcacccggctatgaagggtctaactgtgaattagccaaaaatgagtgccacccagaaagaaccgatggatgccagcatttctgcctaccgggacaagagagttacacatgcagttgtgcccaggggtataggctgggggaagatcataagcagtgcgtacctcacgatcagtgcgcttgtggggtcttaacctcagaaaaacgagctcccgaccttcaagatctgccttggcaggtcaaactcactaatagtgagggcaaggacttctgtgggggtgttatcattagggagaacttcgttctcaccaccgcaaagtgttccctgctgcaccgtaacatcacggtaaagacctacttcaatcgcaccagccaggaccccctgatgattaagattacccacgtgcatgtccacatgagatacgacgcagacgctggcgagaatgatctctcactgctcgagctcgaatggcctattcaatgcccaggcgccggactcccggtatgtacgcctgagaaagatttcgccgagcatctgctcatccctcggaccaggggccttctctcggggtgggctaggaatggcacagatctgggtaacagtcttacaacacgtccggtaaccttggtggagggcgaggaatgcggccaggtgcttaatgttaccgtgacaactcggacctactgcgagcgctctagtgtggctgcaatgcactggatggacggaagcgtggtgacccgagagcaccgaggctcgtggtttcttactggggtgctgggatctcagccagtcggcggccaggcccatatggtgctggtaaccaaggtttcccggtattcactgtggtttaaacagatcatgaattag

SEQ ID NO: 131001 - DNA, 1053 bp, synthetic construct
  misc_feature 1..1053: note = Description of Artificial Sequence: Synthetic coding sequence
  source 1..1053: mol_type = other DNA
atggagcccaaacggatacgtgaagggtatctggtgaaaaaaggcagcgtgtttaatacctggaagcccatgtgggtggtcctgctcgaggacggcattgagttctacaagaagaagtccgacaatagccccaaggggatgatccccttgaaagggtcaactctgacctctccttgccaggatttcgggaaacgtatgttcgtgttcaagattaccaccaccaagcagcaggaccacttctttcaggcggccttcctggaggaacgcgacgcttgggtgcgggacatcaagaaggcgatcaagtgcatcgagggcggccagaaattcgcccgcaagtcgacccggcgaagcatccgcctgccggaaacaattgacctcggcgccctctatctgtcaatgaaggatacggagaaaggtattaaggaactgaacctggagaaggacaagaagattttcaaccactgtttcacaggtaattgtgtcatcgactggctcgtctctaatcagtccgtgagaaatcggcaggagggccttatgatagcctcaagcctgcttaacgagggataccttcaacctgccggagatatgtccaaaagcgcagtggacggtactgcagagaaccctttcttggataatcctgacgccttttattatttcccagattccggatttttctgtgaggagaattcatcagatgatgacgtgatcctgaaggaagagtttagaggagtcattatcaaacaggggtgcctccttaaacagggacatcgaaggaagaactggaaagtgcggaagttcattctgcgggaggaccccgcatatttgcactattatgatccggccggggctgaggaccccttgggggctatacaccttcgtggctgtgtcgtcacatctgtggaatcaaatagtaatggccgcaagagtgaggaagagaatctgttcgagattattactgcagacgaggttcactacttcctccaggcggccacgcctaaagagcgtacagagtggatacgggccatccaaatggcctcccgtactggaaaatag

SEQ ID NO: 131002 - DNA, 648 bp, synthetic construct
  misc_feature 1..648: note = Description of Artificial Sequence: Synthetic coding sequence
  source 1..648: mol_type = other DNA
atggcgtcgctccagatgcggggtaaccctgggagtcatttttgcggcggcacactgatccatcccagctttgttctaacggctgcccattgtctgagggatatcccccagaggcttgtcaatgtagtgctgggcgctcataacgtccgcacccaggagcctactcagcagcatttcagtgttgctcaggtgttcctgaacaactacgatgctgagaacaagttaaacgatgtcttgctgatccaactgagttcccccgccaacctcagcgccagcgtcgcaaccgtgcagctgccacagcaggaccagcccgtgcctcacggcacacagtgccttgctatggggtggggcagagtcggtgctcacgatccccccgcccaggtccttcaggagctgaacgtcacagttgtgaccttcttctgtaggccacataacatctgtacctttgtgccacggcgaaaggctggtatctgtttcggagacagtggaggaccactaatctgcgatgggatcattcaaggcatagactcctttgtgatctggggatgcgccacgagactgtttccagacttttttacccgggtggctctgtatgtcgactggatcagatcaactctgcgacgggtggaggctaaaggcaggccgtag

SEQ ID NO: 131003 - DNA, 858 bp, synthetic construct
  misc_feature 1..858: note = Description of Artificial Sequence: Synthetic coding sequence
  source 1..858: mol_type = other DNA
atgcccggtgccagaagcggaggctctggcggtgatggcagtaattctgggtcttacagtggggatgccagcggagccgtaactgtatgggaggtggtatctttgcttggaaagttgctgggcaccgtcgtggctttaaaggtggtgctttaccttctcagagtgtgtctggccatggcttggaagagcggcggagcaagtcatagcgaactcattcataatcttcggaagaacggaatcatcaaaacagacaaagtgttcgaggtcatgctagccacggatcggagccattacgcaaagtgcaacccatatatggacagtcctcagtcaatcggctttcaggctacgatttccgctccacacatgcacgcctatgccctggagctcttgtttgatcaactccatgaaggcgctaaagccctcgacgtgggcagcgggtctggcattttaaccgcttgcttcgcgaggatggtcgggtgtaccggcaaggtaatcggcatcgatcatatcaaggaactggttgacgactcggtgaacaatgtcaggaaggatgatcccaccttgctcagctcaggtcgcgtgcaattagtcgtaggggacggtagaatgggttatgctgaggaggctccctatgatgcaattcatgtgggagcggctgctcccgtggtgcctcaggctctgatcgaccagctgaaacccggtggcagactcatcctgccagtcggtccggccggcgggaatcagatgctggagcagtacgataaactgcaggacggatcaattaaaatgaaacctctgatgggcgtaatttatgtgccgctgaccgataaggaaaagcagtggtccagatggaagtag

SEQ ID NO: 131004 - DNA, 684 bp, synthetic construct
  misc_feature 1..684: note = Description of Artificial Sequence: Synthetic coding sequence
  source 1..684: mol_type = other DNA
atggcttggaagtcaggtggagctagtcatagtgaattaattcataatctgcgcaagaacggaattatcaaaaccgacaaagtttttgaggttatgctggccactgaccgtagtcactacgccaagtgcaacccatatatggattcaccacagagcatcggcttccaagctacaataagtgcaccgcacatgcacgcatacgcactagaactgctctttgaccagttgcacgagggagctaaggccctggatgtcgggagcggtagcggaattctgacagcgtgcttcgccaggatggtcggatgtacaggaaaagttatcgggatagatcatattaaagagctcgtggatgactctgtaaacaatgtgagaaaagacgacccgaccctgctttcgtctgggcgagtgcaactggtcgtgggtgatgggcgaatgggatatgccgaagaggcgccatatgatgccatacatgttggggccgccgcaccagtcgtccctcaggcgctcattgatcagttaaagccgggcgggaggctgattctccctgttggcccagccggggggaatcagatgctggagcagtacgacaaactgcaggacggaagcatcaaaatgaagccactgatgggtgtaatttacgtccccttaaccgataaggagaaacagtggtcaagatggaaatag

SEQ ID NO: 131005 - DNA, 861 bp, synthetic construct
  misc_feature 1..861: note = Description of Artificial Sequence: Synthetic coding sequence
  source 1..861: mol_type = other DNA
atgcctggagcccgttcaggcggctccggaggggatggctctaattcaggctcttactctggagacgcaagcggggcggtcactgtctgggaggtcgttagcctgctgggcaaactcctgggcaccgtggtcgcactcaaggtcgttctgtatttgctcagggtgtgtcttgctatggcctggaaatccggaggggcaagccacagcgagctgatacacaatctcaggaagaatgggatcatcaaaactgataaagtgtttgaggtgatgctggccactgataggagtcattatgctaagtgtaacccatacatggactctccacaatctattggctttcaggcaactatctcagccccgcacatgcatgcttatgctctggagctgctgttcgaccagctgcacgaaggcgccaaggcgctcgatgttggctctgggagcggcatccttacggcgtgctttgcccgtatggttggctgcacaggaaaggtgattggcatcgaccacatcaaggagctcgtggacgattccgttaataatgttcgcaaagatgaccctacgctcctgagcagtgggcgtgtccagctggtggtgggagatggccgaatgggatacgccgaggaagccccatatgatgccattcacgttggcgcagccgctccagttgtgccccaggctttgatagatcagctgaagcctgggggtcggctgatactgccagttggccccgcaggcggaaatcagatgttagagcagtacgacaaactccaagatggcagtattaaaatgaagccattgatgggtgtgatctacgtgccgctgactgataaagaaaagcaatggagccgggacgaactgtag

SEQ ID NO: 131006 - DNA, 858 bp, synthetic construct
  misc_feature 1..858: note = Description of Artificial Sequence: Synthetic coding sequence
  source 1..858: mol_type = other DNA
atgccgggcgccagatcaggaggatccgggggtgacgggagtaacagcggctcatattctggtgatgcctccggcgcggtgactgtgtgggaagttgtctccctgcttggaaaattgctggggaccgttgtcgctctgaaggtggttttgtatttattgcgggtctgtcttgcaatggcttggaagagtgggggcgcgtcacactccgagcttatccataatctccgtaaaaatggcattattaagactgacaaagtgtttgaggtgatgttggcgaccgatcgctctcactatgccaagtgtaacccctatatggactcacctcagagcattggttttcaggctaccatctcagcaccccatatgcacgcatatgctttggagctcctttttgatcagctgcacgaaggggcgaaggccctggacgtgggatccggatctggaatattaacagcctgtttcgcccggatggtggggtgcacagggaaggtgattgggattgaccacatcaaagagctcgtcgacgatagtgttaataatgtccggaaagacgatcccacactgctgagttcaggcagagtacagctggttgtgggtgacggaagaatgggctacgccgaggaggcaccgtacgacgctatccacgtaggagcagcggcacctgtggtgccccaggccctgatagatcagctgaagcctggtggcaggctgatactccccgtgggcccagcaggcgggaatcagatgcttgagcagtacgacaaattgcaagacggatccatcaagatgaaaccgctgatgggagttatctatgtacctctaacagataaggagaagcagtggtctcgatggaaatag

SEQ ID NO: 131007 - DNA, 579 bp, synthetic construct
  misc_feature 1..579: note = Description of Artificial Sequence: Synthetic coding sequence
  source 1..579: mol_type = other DNA
atggcttggaagtcaggcggcgcctcccactcggagctcattcacaatctccgctcttttcaagccactatctcagctccccatatgcacgcctacgcccttgaactgttgttcgaccagctacatgaaggagccaaagccctggatgttgggtcagggtccggtattctgaccgcttgttttgcccggatggtcggctgcacaggaaaagtcattggcatcgatcatatcaaggagctggttgacgattctgtgaacaatgtgaggaaagacgacccgacgcttttaagttctgggagagtgcagctagtcgtcggcgatgggcggatgggctacgctgaggaagcaccttacgacgccattcacgttggagccgccgcgcctgtggtgccacaggcgctgatcgaccaactcaagccaggcggacggctcattctgccggtcggacccgccggtgggaatcagatgctggaacagtacgacaagctgcaagacgggtccatcaaaatgaagcccttgatgggagtgatctatgttccactcaccgacaaagaaaagcagtggagcaggtggaagtag

SEQ ID NO: 131008 - DNA, 2016 bp, synthetic construct
  misc_feature 1..2016: note = Description of Artificial Sequence: Synthetic coding sequence
  source 1..2016: mol_type = other DNA
atgaaacaaattttctttctagatgatagcggcccccctttcggacacatggtcctggctctaggcggatatcttggtgggtttgatggtaattttctgtggaaccggatcggcgccgagtacagctcaaacgtgccagtgtggtccctgcggttgctccccgcactcgcaggtgcgctgtcggtccccatggcctatcagattgtgttagagctccacttctcacattgcgcagcgatgggcgcggctttactgatgctgatcgagaatgcactgatcactcaatctaggctgatgctgctcgaaagcgttctgatcttttttaaccttctggccgtgctgtcctacctgaaatttttcaactgtcaaaagcactcccctttctcactgagctggtggttctggctcaccctcactggtgtggcatgtagctgtgccgtcggcattaaatacatgggggtgttcacctatgtcttggtcctcggcgtggctgcagtccatgcctggcatcttttaggcgaccagacgctctccaacgtgtgtgtcttctgccacctgctagcacgcgccgtggcactgttggtgatccctgtggtgttgtacttactgttcttttacgtccacttgattctggtctttcgatcgggacctcacgatcagattatgagctctgcttttcaagcctccttagaaggcgggctggcacgaatcacccaaggccagcccctggaggtcgctttcggctcacaggttacactgcgcaacgtctttggaaaacccgttccatgctggctccattctcaccaggacacatatcctatgatatatgagaatggtcgcggttcttcccaccagcagcaggttacttgctacccatttaaggatgtgaacaattggtggattgtgaaggatccccgccgtcaccagctggtagttagctcccctccaaggccggtccgccacggagatatggtgcagctggtgcatggaatgacaacgagatcattaaacacacatgatgtggctgctcctctgtcaccccactcacaagaggtgtcatgttatatagattataacataagtatgcctgcgcaaaatctttggaggctggaaattgttaataggggaagtgacaccgatgtttggaagacgatcttgtcagaagtcaggttcgttcacgtcaacactagcgctgtgcttaaactctccggcgcccatctccccgattgggggtacagacagttggagattgtcggagaaaaacttagtcgcggctaccacgggtctacagtgtggaacgtggaagaacaccggtatggtgcatcccaggagcagagagaacgcgagagagaattacattctccagcccaggttgacgtcagccgcaatctatccttcatggcaagattctctgaattgcagtggcgtatgttagcattgagatctgatgactctgagcataagtacagcagctctccactggagtgggtaactcttgacaccaacatcgcatattggcttcatcctaggacaagtgctcagatccacttactcggtaacattgtgatttgggtgtccggatctctcgccctggctatctatgccctgctgagtctatggtacctgcttcgccgcaggcgcaatgtccacgacttgccccaggacgcctggcttagatgggttctggctggcgctctttgcgcaggggggtgggcagtcaactatctacccttttttctgatggagaagaccttgttcctctatcactacttacctgctctgacattccaaatcttgctcctgcctgtggttctccaacacatcagcgaccacttgtgtcgttcccagctgcagaggtccattttctccgccctcgtagtggcctggtactcctccgcctgccacgtctccaacaccctgcgacctctcacctatggggataaatccctgtcacctcacgagctgaaggctttgcgatggaaggacagttgggatatcctgatccggaaacattag

SEQ ID NO: 131009 - DNA, 2088 bp, synthetic construct
  misc_feature 1..2088: note = Description of Artificial Sequence: Synthetic coding sequence
  source 1..2088: mol_type = other DNA
atgtggggtttcctgaaacgaccagtggtggtgactgccgatataaacttgtcgctggtggccctcactggcatggggttgctctccagactgtggagactgacgtacccccgagccgtggtgttgtttcgcaggatacggtggcagtttttcgtcgaacagaattggagttcagttgtcgcttttcctgaatacagttctaatgttccagtgtggtcactgcgccttctaccagccctggcaggagctctgagcgtgcctatggcttatcagatcgtgctcgaacttcattttagccactgcgcagcaatgggagccgccctgctgatgttgatcgagaatgcactgattacacagtctagattaatgttattagaaagcgttctgatttttttcaatttgctcgctgtgttgtcttatcttaagttttttaattgccagaaacactctccattctcccttagctggtggttctggctcacattaacgggcgtggcctgttcttgcgctgttgggattaagtacatgggagtttttacttacgtgctggtcctaggagtcgcagcagttcacgcgtggcacctgctcggcgaccagactctgtctaacgtttgtgtcttctgccacctcctcgcacgggccgtagcactgttggtcatcccagttgtgctctacctgctgttcttctacgtgcatttgattttggtcttccgcagcggaccccacgatcagatcatgtcatcagcttttcaggcctctttagagggcggtctggctcgtatcactcaggggcagcctctggaagtggccttcggatctcaggtgactttgcgaaatgtgtttggaaagccggtgccttgctggctacacagccaccaagacacctatccaatgatttacgaaaatggaaggggcagtagtcatcagcagcaggtgacctgctacccctttaaggacgttaataattggtggatagtgaaggatcccaggcgccaccagctcgtagtgtcgtccccaccccgcccggtgcgacatggagatatggtacaacttgtccacgggatgacaaccagaagcctgaatacccacgatgtagcagctcctctgagcccccactcacaggaagtctcttgctatattgactataatatctcaatgcctgctcagaatctctggcggctggaaatcgtcaatcgcggttccgataccgatgtctggaagaccattctgagtgaggtccgctttgtccacgttaatacctccgctgtcctgaaactgtccggtgcgcacctgcccgactgggggtacaggcagcttgagatcgtaggggagaagctgtcacggggatatcacggatccactgtgtggaacgtggaggagcatagatatggcgcctcccaggagcagcgagagagggagcgggaacttcatagccctgctcaagttgatgtgtctaggaacttatcatttatggccagattcagcgaactgcagtggcggatgttggcactccgcagtgacgatagcgaacacaagtacagcagctcccccctggaatgggtgaccctagataccaacattgcatattggctgcaccccaggacaagcgcccagattcacctgctgggcaacattgtgatttgggtgagcggctctctggctttagctatctacgccctgttgtcactgtggtacttgctccggcggaggcgtaacgtgcatgacctgccccaggatgcgtggttgcgttgggtgcttgcgggcgccctgtgtgcaggaggctgggccgtcaactacctcccgttctttctaatggagaaaacactctttctgtatcactacctgccagcacttactttccagatcctattgttaccggtcgtgctgcaacatatatccgaccatttgtgccggtcacaactgcagcggtcaattttctcagcattggtcgtcgcctggtacagttccgcatgtcacgtgagcaatacacttcgcccacttacttacggcgacaaatcattgtccccacatgagctgaaggcactccgatggaaagattcgtgggatattctcatccggaagcattag

SEQ ID NO: 131010 - DNA, 1041 bp, synthetic construct
  misc_feature 1..1041: note = Description of Artificial Sequence: Synthetic coding sequence
  source 1..1041: mol_type = other DNA
tggcgaggaggcggttgcactagccccgcaacgctaggggctgccagaggggcagttggaattggcaaggaggggcagtaccagcccctcattgctagcctgacctgggggttggtgccacttagccaggcgcaggagatcgtaaatcggggcagcgacaccgatgtctggaagaccatcctctcagaagtgcgtttcgtgcatgtcaacaccagtgcagtactgaagctcagcggtgctcacctcccagattgggggtacagacagctggaaatcgtgggggagaaactgagcaggggctaccatggcagtacggtgtggaatgttgaagagcatcgatatggcgcaagtcaggaacagcgggaacgggaacgggagctgcatagccccgcgcaggtggacgtgagtaggaatctgagcttcatggcccgattctccgagctgcaatggcggatgctggcccttagatctgacgactctgagcacaagtatagctcgtctcctttggagtgggtcacgctcgatacaaacatcgcctactggttgcacccgaggacttcagcccagatccatctcctgggaaacatagtcatttgggtgtcgggctccctggccctagccatctacgcactgctcagtctgtggtatctactgcgacggcggcggaacgtccacgatctgccccaagacgcatggctgcgatgggttctagctggggcactgtgcgctggggggtgggctgtaaattacctgccctttttcctgatggaaaagaccttgttcttgtaccactacctgcccgctcttacattccaaatcctgctcttgcccgtcgtccttcagcatattagtgaccatttgtgccgcagccagctgcagagatcaatctttagtgccctcgttgtcgcttggtatagctcggcttgtcacgtatcaaacacgctccgacccctcacatacggtgacaaaagtctgtctccacatgaactgaaggctctgaggtggaaggactcttgggatattctgatccgcaagcattag

SEQ ID NO: 131011 - DNA, 471 bp, synthetic construct
  misc_feature 1..471: note = Description of Artificial Sequence: Synthetic coding sequence
  source 1..471: mol_type = other DNA
atggcataccagatagttttagaactccacttctctcattgtgctgccatgggagctgccctgctgatgctgattgagaatgcactcatcacccagtccagattgatgttactggaaagtgttctcatcttcttcaacctgctggcagtgctcagttacctgaagttcttcaactgccagaagcactcactgcctctatgggcccctcggcccaatcacgtccaatgtctgcccggacaactgcgaggtcgcacaagttctgaccactccgggagcgcaactggtggtggactttgggtgccagggcattccgaagagaggctgtgggaaacttgtgctctgctcgcttctttcccccctggccatttgcctcacgatgtgcgctatgaaaatggccggggatcttcacaccaacagcaggtgacatgttatccattcaaggacgtgaacaactggtggattgtgaaatag

SEQ ID NO: 131012 - DNA, 2244 bp, synthetic construct
  misc_feature 1..2244: note = Description of Artificial Sequence: Synthetic coding sequence
  source 1..2244: mol_type = other DNA
atgtggggatttctaaaacgtccagtcgtggtaacagctgatatcaatttgagcctggttgcactcaccggcatgggattgctgtcccggctgtggcgccttacataccctagagctgtggtcttcgatgaagtatactatgggcaatacatctccttttatatgaagcagatctttttccttgacgacagtggcccaccctttggccacatggtcttggcattggggggctacctgggcggcttcgacggcaattttttatggaatcggattggggctgaatactcttctaacgtgccggtgtggagcttgcggctcctgccagctcttgcgggggccttatccgtccctatggcctatcagatcgtcctcgaactgcacttttcccactgcgccgccatgggcgcagcactcctgatgcttatcgagaatgccctgatcacccagtccagactgatgcttttagaaagcgttctgatcttctttaaccttctcgcagtgttaagttacctgaagtttttcaactgccagaaacactcacctttctcactgagttggtggttctggcttacactcacgggagtcgcctgctcctgcgctgtgggaatcaaatacatgggcgtgtttacttatgtgctggtgttaggtgtcgccgccgtgcacgcctggcacctcctgggagatcagacactatcaaatgttggagcagacgtgcagtgttgcatgcggccagcgtgcatgggacagatgcagatgagccagggagtttgtgtgttctgccacttgctcgccagagccgtggctctgttggtcattcctgtcgtgttgtacctgctgtttttctatgtccatttgatccttgtctttcgcagtggcccccacgaccagataatgtcttctgctttccaggcatccctcgagggaggcttagccaggattactcaaggccagccacttgaggtcgccttcggatcccaagtgaccctccgtaatgtctttgggaaaccagtgccgtgctggctacattcacaccaggatacatacccaatgatctacgaaaatggaaggggcagctctcatcagcagcaggtgacctgctaccccttcaaagacgtgaacaattggtggatagtaaaggatcctaggcgccaccaactcgttgtgtctagcccgccgagacccgtgcggcacggtgatatggttcaactggtgcatggtatgaccacgaggagtctgaatacacatgacgtagccgcaccactgagtccccacagccaggaggtgtcttgttatattgattacaatatttctatgcccgcccagaacttgtggcgcctggagattgtcaaccgagggagcgacacagatgtgtggaaaactatcttgtccgaggtgagatttgttcatgtgaacacaagtgcggtgctgaaattgtctggggcccaccttcccgattgggggtataggcagttggagattgtaggtgagaaactgtcccggggataccatggctccaccgtgtggaacgtcgaagagcacagatatggtgcttcccaggaacagagggaaagggagagagaactccatagtccagctcaggtagacgtgtccagaaatttaagtttcatggctaggttttccgaattacagtggcggatgttggcactgcgctccgacgattccgagcacaaatattcgtcatccccactggagtgggtgacactcgacacaaacatagcatactggttacacccacggacttctgcgcaaatccatctcctcggtaacatcgtgatatgggtatctgggtccctggctttagctatctacgctctattatcactgtggtatttgcttcggcggagacggaatgtacatgatttaccacaggacgcgtggctgaggtgggtgctggcaggtgcattgtgcgctggtggttgggctgttaactatctgccctttttccttatggagaaaactctatttctttatcactacctgcctgctcttacattccagatcctgctgctgccagtcgtactccagcatatatccgatcatctgtgcaggagtcagttgcagcgcagcatcttctccgcactggtggtcgcctggtacagtagcgcttgccacgtgagtaacactctaaggccacttacttacggggataagagtttaagtccccacgagcttaaagctctgcgttggaaagatagttgggatattttgataaggaaacattag

SEQ ID NO: 131013 - DNA, 2178 bp, synthetic construct
  misc_feature 1..2178: note = Description of Artificial Sequence: Synthetic coding sequence
  source 1..2178: mol_type = other DNA
atgtgggggttcctaaaaagacctgtcgttgtaacggctgacatcaatctgagtctagtcgctctgacaggaatgggactcctctcacgcctatggagacttacctatcctcgggctgttgtcttcgatgaggtttattacggacagtatatctcattctatatgaagcagattttttttttggatgatagtggtcctccatttggtcacatggtactggctctgggcggctatctgggcggattcgatgggaacttcctttggaaccgtatcggcgccgagtacagcagcaatgtgccagtgtggagcttgcgacttctccctgccttggctggagccctctctgtgccgatggcctatcaaatagtgttggagcttcacttttcacactgtgctgccatgggtgccgccttactgatgcttatcgagaatgcactcattacccagtctcggctgatgttgctagagagcgtgctcatctttttcaacctcttggctgtcctgagctacttgaagtttttcaactgtcagaagcactcccctttctctttgagctggtggttttggttgactttgacaggcgtcgcatgttcttgtgccgtgggcattaaatacatgggggttttcacatacgtcctggtgttgggcgtcgcggctgtccacgcatggcaccttctgggtgaccagaccctgtccaacgtttgtgttttctgccacctgctagcacgagccgtggctttgctggtgatcccagtcgtgctgtacctgctgttcttttacgtgcaccttatactcgtctttcgctctggcccgcatgaccaaatcatgagtagcgctttccaagcatctcttgagggggggctggcacggatcacccagggacagccacttgaagtggcctttggcagccaggtgactttgaggaatgtgtttggcaaacctgttccctgttggctgcactcccaccaggacacctacccgatgatttatgagaatgggcggggaagctcccaccaacaacaggtaacgtgttatcctttcaaggacgttaacaactggtggattgtgaaggatccgaggcggcaccaactcgtggtaagctcacctccacgtcccgtccgtcacggagacatggtgcagctggttcacgggatgactactaggagccttaacacccacgatgtggctgcacccctgtctcctcattcccaagaagttagttgctacatagattacaacatctccatgcccgcccaaaacctgtggcgccttgaaatcgtcaacagaggctccgataccgatgtgtggaagaccatattgtcagaagtgcggtttgtgcacgtcaacaccagcgccgtcctgaaactcagcggggcgcacctgcccgactgggggtaccgccaattggaaattgtaggcgagaagttgtctcggggctatcacggctccacagtgtggaacgtagaagagcacaggtatggtgcatctcaggagcagagagaaagagaacgcgaactgcattccccagcacaggttgacgtgtctcgaaatctgtccttcatggctagattctctgaactgcagtggcggatgcttgccttgcgtagtgatgactcagaacacaaatattctagcagtccactggaatgggtaacattggataccaatatagcttactggttgcaccctcgcacaagtgctcagattcacctgttggggaacatcgtcatctgggttagcggttctctggccttggcgatatacgccctcttatctttatggtacttgctgaggagaagacgcaatgttcacgaccttcctcaagacgcatggctgcggtgggtgttggctggcgccctgtgcgcaggaggttgggcagtgaactatcttccattctttttgatggaaaaaacgctctttctgtatcactatctccccgcactgacgttccagattttacttttgccagtggttcttcagcatatatccgaccacttatgcaggagtcaactgcagcgatctatatttagcgccttggtcgtggcctggtatagtagcgcctgtcacgttagcaacaccctccgccctttaacgtacggcgataaatcattaagcccgcatgaactcaaggccctgcggtggaaggatagctgggacatcctgattagaaagcattag

SEQ ID NO: 131014 - DNA, 1827 bp, synthetic construct
  misc_feature 1..1827: note = Description of Artificial Sequence: Synthetic coding sequence
  source 1..1827: mol_type = other DNA
atggcttatcagatcgtgctggaactccatttcagccactgtgccgctatgggtgcggccctcctgatgctaatagagaatgccctgattacccagtcccggctgatgctgctcgaaagcgttctcatctttttcaatctgctggctgtgctatcttacctcaagtttttcaactgccagaaacactcccccttttctctctcttggtggttttggctcaccctaacaggggttgcatgctcatgcgctgtgggtattaagtacatgggggtgttcacgtacgtgttggtgctgggtgtagcagcagtgcacgcttggcacttgctgggggaccagactctgagtaatgtgtgcgtgttttgtcatctgcttgcccgagctgtggcattgctggtgattccagtggtactgtatcttcttttcttttacgtccatctcattctggtgtttagatcagggccccatgatcagatcatgtctagtgccttccaggccagcttggaaggggggttggcccggatcacccagggacagcctcttgaggtggcatttggcagtcaggtgactctgagaaacgtgttcgggaagcctgtgccctgttggttgcacagtcaccaggatacctaccccatgatttatgaaaacggacggggctccagtcatcagcagcaggtgacatgctatcccttcaaggatgtgaataactggtggattgtgaaggaccccaggagacaccaactagtagtttcatcaccccccaggcctgtgcgtcacggggacatggtgcagctagtacatggcatgactacccggagtttgaacactcatgacgtggccgcaccactgagcccccactcacaggaggtctcctgctatatcgactacaatatctccatgccagcccagaacttgtggagactggagattgtgaatcggggaagtgacaccgatgtgtggaaaaccatcttatctgaagttcgtttcgtgcacgtgaataccagtgctgtgctcaagctctcaggggcacacctcccagattgggggtaccggcagctcgagatcgtcggagaaaagctaagccgagggtaccatggctctactgtctggaacgtggaagaacaccggtacggtgctagtcaggagcaaagagaacgggagagagaactccactcacctgcccaggtggatgtctctcgaaatctgagctttatggcccgatttagcgaactccagtggaggatgctcgccctgcggagcgatgattcggagcacaaatattcgagctcaccactagaatgggtcaccctggacaccaatatagcctactggttacacccgcgtacaagtgcccagattcatctcctcggcaatattgtgatctgggtgtctgggagtctcgctctcgccatctatgcattattatctctgtggtacttactgaggcggcgtaggaatgtacacgacctgccccaggacgcctggttgcgatgggtgctggccggagcgttgtgcgccggtggttgggcagtaaattatctacctttcttcctcatggagaagactctgtttttatatcactatctccctgccttgacattccagatcctccttctgccagtggtgcttcaacatatctccgatcacctgtgcaggtctcagctccagagatctatcttctctgccctggtggttgcttggtactcaagtgcttgccacgtgtcgaataccctccgccccctcacctacggcgacaaatccctatctccccacgagctcaaggccctgaggtggaaggactcttgggacatacttatccgtaagcattag

SEQ ID NO: 131015 - DNA, 471 bp, synthetic construct
  misc_feature 1..471: note = Description of Artificial Sequence: Synthetic coding sequence
  source 1..471: mol_type = other DNA
atggcctatcagatcgtccttgagctgcatttctctcactgtgctgctatgggtgcggcactgttgatgctgatcgagaatgctctgatcacccagtcaaggctgatgcttcttgagagtgtactgatattctttaacctgctcgcagtactctcttatttaaagttcttcaattgccaaaaacacagcttgcctctgtgggcccccaggccaaatcatgtccagtgtcttcctggacagctgcgtgggaggaccagcagcgaccactccgggagtgccaccggcggcggattgtgggtgcctggtcattctgaagaaagactgtgggagacatgcgctctgctggcctctttcccacctgggcatttgccacatgatgttcggtatgagaatggccgcgggtcttcccatcagcaacaggtgacgtgctatccatttaaagatgtgaacaactggtggatcgtgaagtag

SEQ ID NO: 131016 - DNA, 429 bp, synthetic construct
  misc_feature 1..429: note = Description of Artificial Sequence: Synthetic coding sequence
  source 1..429: mol_type = other DNA
atgtggggtttcctcaagagaccagtggtggtgacggctgacatcaatctgagcttggtagctctcaccgggatgggactgctgtcccgcctctggaggctaacatatccacgcgcagtcgtgtttgatgaagtttattatggacagtacatcagcttttatatgaagcaaatcttctttctcgacgactcaggaccccccttcggtcacatggtgcttgctctaggagggtatctgggcggatttgacgggaacttcctttggaatcgtattggagccgagtacagcagcaatgttcctgtctggtcactgaggctacttcccgccttggccggagctctgagtgtgccaatggcctaccagatcgtactcgagctgcacttcagccactgtgcggccatgggagctgcgctgcttatgttaatctag

SEQ ID NO: 131017 - DNA, 1722 bp, synthetic construct
  misc_feature 1..1722: note = Description of Artificial Sequence: Synthetic coding sequence
  source 1..1722: mol_type = other DNA
atgctcctggagagtgttttaatattctttaatcttttggctgtgctgtcatacttgaagtttttcaattgtcagaagcactccccattctcactaagctggtggttttggttaactctcaccggcgtcgcctgcagctgtgcagtggggatcaaatacatgggcgtcttcacctatgtgctggttctaggtgttgccgcagtgcatgcatggcacctgctgggggatcagacactgtctaacgtctgcgtgttctgtcatctcctggcccgggctgttgctctgctggtcattccagtggtcctatatctcctcttcttctatgtgcacctcatcttggtgtttcgcagtggtcctcatgatcagatcatgtcgtcggctttccaggccagtctcgagggggggcttgctagaatcacccagggtcagccactagaagttgcctttgggtcccaagtgaccctcaggaacgtcttcggaaagcctgtcccttgctggttgcatagccaccaggacacttaccctatgatttatgaaaatgggagagggtcatcgcaccaacaacaggtgacctgctatccctttaaagatgtgaacaactggtggatagtcaaggatcctcggagacatcagcttgttgtctcttcacctcctcggcccgtccgtcatggcgacatggtgcagctcgtacatggtatgactacaaggagcctcaatactcacgacgtcgcagccccacttagtccccatagtcaagaggtgtcctgctacattgattataacatttcaatgcctgcccagaacctgtggcgtctcgagattgttaaccggggatcagacactgatgtgtggaaaacaatcctcagtgaggtgcggttcgtgcacgtgaatactagcgctgtcctgaagctgtccggagcgcatttgcctgattgggggtaccggcagctggaaatcgtcggtgaaaaactgagcagagggtatcatggcagtaccgtgtggaatgttgaggaacaccgatacggagccagtcaggagcaacgtgagcgagagagggaattgcacagccccgcacaagtggatgtcagtaggaacttgagtttcatggctaggtttagtgagctgcagtggagaatgctggcactcagaagcgacgactcagagcataagtactctagcagcccccttgaatgggtgaccctagatacaaacatagcctactggttacatccaagaacctccgcacagattcacttgctcggcaatatcgtaatctgggtcagcgggagtctcgccctggcaatttatgcccttctgagcctgtggtacctcctcagacgtcgccgaaacgtgcacgatcttccacaggacgcttggctgcgatgggtgctggccggggccctctgtgctgggggttgggcggtcaactaccttcctttttttctaatggagaaaaccctatttctctatcattatctgcccgcgcttacctttcagatcctgctgttgcctgtggtgctgcagcacataagtgatcacctctgtaggtcccagttgcagcgctctattttttcagcccttgtagtcgcttggtactcatcagcatgccacgtatccaacactcttagaccactgacctacggtgacaagtctctgtccccacatgagttgaaagctctgcgatggaaggatagttgggatattttgatccgcaaacattag

SEQ ID NO: 131018 - DNA, 2178 bp, synthetic construct
  misc_feature 1..2178: note = Description of Artificial Sequence: Synthetic coding sequence
  source 1..2178: mol_type = other DNA
atgtggggttttctgaaaaggcccgtggtggtgactgcggatatcaatctttctctggtggctctcaccggaatgggactgctatcaagactttggagactgacatatccccgcgctgttgtgtttgatgaggtgtattatgggcagtatataagtttttacatgaagcagatcttcttcctcgacgactctggccctcctttcggacacatggttcttgcactcggtggctatctcggcggattcgatgggaactttctgtggaaccgaataggggccgaatactccagtaacgttccggtgtggtctttgcgactattgccagctctcgcaggggccttgagcgtccccatggcctatcagatcgtgctcgagctacacttttcccactgcgcagctatgggagcggcccttctgatgttgattgaaaacgctcttatcactcagagcaggctcatgctcttggagagcgtgttaattttcttcaatcttctcgctgtcctgtcctatctgaaattctttaactgccagaagcattccccattctcactgtcttggtggttttggctcaccctaacgggcgtggcttgcagctgtgcagtgggcatcaagtacatgggagtcttcacatatgtccttgtacttggcgtggctgctgtacatgcatggcacctgctaggcgaccagacgctatctaacgtgtgtgtgttctgtcatttactagccagggctgtggcactgctcgtcattccggtggtactgtatctgctgtttttctatgttcacctcattcttgttttccgaagcggtccccatgaccagatcatgagctcggcgtttcaggcttccctggagggaggtctcgctagaataacccaggggcagccgctggaagtggcattcggcagccaagtgaccctaagaaacgtctttgggaaaccggtgccatgttggcttcattcacatcaggacacctacccaatgatttacgaaaatggaagaggtagttcccaccagcagcaggtgacatgttatcccttcaaggatgtgaataactggtggatcgtaaaagaccctcggcggcatcagctggtcgtgtccagtcctccccgacccgtgcgccacggcgacatggtacagctggtacacggaatgaccacaaggtctcttaatacccacgatgtggccgcgcccctctctccgcactcacaggaggtttcatgctatattgactacaacatttctatgcccgcacagaacctttggcggctcgagattgtcaatagaggctcagacactgacgtatggaagactatcctttcggaggtcagatttgtacacgttaatacctccgcagttctcaagctgtccggagcacatttgcccgattggggctaccgacaattggaaatagtgggggagaaattaagccgggggtaccacggatccacagtatggaatgtcgaagaacacaggtatggagcgagtcaagagcaaagagaaagagagagggaactgcactccccagcgcaagtagatgttagcaggaatctgagttttatggcacgcttctccgagctccagtggcgtatgctagctctgcggagcgacgacagcgaacacaagtactccagcagtccacttgagtgggtcacgctggatacgaacatagcatactggctgcacccccggactagcgcccagatacacctgctcggtaatattgtgatctgggtgagtggaagtctcgccctggctatttacgctctactcagcctttggtacctactgcgcagaagaagaaatgtccacgatctaccacaagatgcttggttgcgatgggtcctggcaggtgctctgtgcgcaggcggatgggcagtcaactacctcccgtttttcctgatggagaaaacgctttttctgtatcactacttaccagccttaactttccagatcttgctgctacccgtggtcctccagcatatttctgaccacctgtgtaggagtcagcttcagcgctccatattctccgcgctcgtagtggcttggtattccagtgcatgtcatgtgtccaacaccctccgaccactcacttacggcgacaagtcactgtcaccgcacgagctgaaggctctgcgatggaaggacagctgggatattctaatccgcaaacattag

SEQ ID NO: 131019 - DNA, 507 bp, synthetic construct
  misc_feature 1..507: note = Description of Artificial Sequence: Synthetic coding sequence
  source 1..507: mol_type = other DNA
atggcctatcaaattgttctcgagcttcatttctctcattgcgccgctatgggggctgccctcctgatgcttattgaaaatgctttgataactcagagccggctcatgctgctggagagcgttctgatattttttaatctgttggctgtgctcagctatttgaagttctttaattgccaaaaacattcacccttttcactttcatggtggttttggttgacactgaccggcgtggcgtgctcctgtgccgtgggtataaagtatatgggggtgtttacatatgtcttagtactcggagtggctgccgtgcacgcatggcacctattgggagatcagacacttagtaacgtctgcgtgttttgccaccttctggccagagcagtggccctcttggtgattcctgtagtgctgtatttgctgtttttctatgttcacttaatattggtcttccgctctggtccccacgaccagattatgtcctccgcattccaggcatctttggaatag

SEQ ID NO: 131020 - DNA, 894 bp, synthetic construct
  misc_feature 1..894: note = Description of Artificial Sequence: Synthetic coding sequence
  source 1..894: mol_type = other DNA
atggcatatcagatcgtgctggagctgcacttttcccactgcgccgctatgggcgccgccctcttaatgctcattgaaaacgccctcatcacacagtctaggctgatgttgctggaatctgtgttgatcttctttaacttgttggccgtgctgtcgtacctgaaattctttaactgtcagaaacactccccgtttagtcttagctggtggttctggctcaccttgacgggggtcgcttgctcgtgcgctgttggtatcaagtacatgggagtattcacttatgttctggtactgggagtggccgcagtacatgcgtggcatctactgggtgatcagaccctgagcaacgtgggagcagacgtccagtgctgtatgcggcccgcctgcatgggtcaaatgcaaatgagtcagggcgtatgtgtgttttgccacctgttggcccgcgccgtggcactcctggtaatacccgttgtcctctacctgctcttcttttacgtccatttaatattggtcttccgttccggacctcacgaccagatcatgtcttccgcgtttcaggccagccttgagggcgggttggcccgcatcacgcagggtcaacccctagaggtggcttttggtagtcaggtcacactgaggaacgtgtttggcaaacctgtcccctgctggcttcactcacaccaggacacctacccgatgatttatgagaatggccgggggtcttcccatcagcagcaggttacatgttatccttttaaggacgtcaacaactggtggattgtcaaggatccacggcgccatcagttggtcgtctctagcccaccacgccctgtccgccatggcgatatggtacagctcgtacacggcatgaccacaaggtcgcttaacacatag

SEQ ID NO: 131021 - DNA, 657 bp, synthetic construct
  misc_feature 1..657: note = Description of Artificial Sequence: Synthetic coding sequence
  source 1..657: mol_type = other DNA
atgaagcaaatattctttctggatgactcgggccccccttttggacatatggtgctggccttggggggatacctgggaggtttcgatggcaactttttatggaaccgcattggagcagagtactcatcaaatgtgcctgtatggagtctccgattgcttcccgctctagcgggagcactctctgttcccatggcttatcagattgtgctggagttacacttcagtcactgcgccgcaatgggagcagccctgctgatgctgattgagaatgccctgatcactcagagtcgccttatgctcctcgaatctgtgcttatctttttcaatctgctggcagtgcttagttaccttaagttcttcaactgccagaagcattctcctttttcgctctcttggtggttttggctgacgctgacaggggtagcctgttcgtgtgccgtgggtattaagtatatgggcgtgttcacatacgtgctggtactaggagtggcagctgttcatgcgtggcatctgttaggtgatcagaccctgagtaatgtgggcgcagatgtacagtgctgcatgagacctgcgtgtatgggacaaatgcagatgtctcagggtgtatgtgtgttctgtcacctgcttgctcgggccgttgccctcctagtgatatag

SEQ ID NO: 131022 - DNA, 1398 bp, synthetic construct
  misc_feature 1..1398: note = Description of Artificial Sequence: Synthetic coding sequence
  source 1..1398: mol_type = other DNA
atggcaatcttttgtggcaccgagctggagcaggtgtgcgtattttgtcacctgttagcaagggccgtggcgctgctggtgattccagtggtcctctacctattgtttttttatgttcatttgatcctagtcttccggagcggcccccacgaccaaatcatgagctccgcctttcaggcaagccttgaaggcggtctggcacgcatcacccaaggtcagcctctggaagtggcttttgggtcacaggtgaccctcaggaacgtgtttggaaaacccgtgccctgttggttgcatagtcaccaggatacctatcctatgatttacgagaacggccgcggatcttcacaccagcaacaggtgacttgctatcccttcaaagatgttaataattggtggatcgtaaaagaccctcgtcggcaccagttggttgtgtcctccccacctaggccagtcagacacggcgacatggtgcagttagtccatgggatgaccacaagatccctgaatacgcacgacgtggcagcgcccctaagcccacactcccaggaggtcagttgttacatagactataacatttccatgccagcccagaatttgtggcgtctagagatagtgaaccgaggctcagataccgacgtctggaaaactatactttcggaggtgagatttgtgcatgtgaatacgtctgctgtgctcaaacttagcggcgcccatctcccggactggggttaccgccagctggaaatcgtgggggaaaaactgtcacgcggctatcacgggtctactgtgtggaatgtggaggaacatagatacggagccagccaggagcagagagagcgcgagagagagctgcattcccccgcccaagtcgatgtcagccgtaatctttcttttatggccaggttcagcgaactgcaggcccagattcacctactgggcaacatcgtcatctgggtgtctggttcactggccctcgctatttatgccttgctgtccctctggtatcttctgcggagaagaagaaacgtgcacgacctgcctcaggacgcctggctcaggtgggttctcgccggcgctctctgtgctgggggatgggcggtaaactatttaccttttttcctgatggaaaagaccctatttctttatcattatctgccagcactcaccttccagatcttgctgctgcccgtggtcctgcagcacataagtgaccatctctgcagatcacagctccaaagaagcatcttctctgcactggtggtggcctggtactcatcggcatgccacgtgtcgaacaccctgaggcctctgacatacggagataagtcgctgtctccccatgaattaaaagctctccgatggaaagactcttgggatatcctcattaggaagcattag

SEQ ID NO: 131023 - DNA, 2253 bp, synthetic construct
  misc_feature 1..2253: note = Description of Artificial Sequence: Synthetic coding sequence
  source 1..2253: mol_type = other DNA
atgcctcccgcaacaggaggcggtttggctgagagcgagctgcggcctcgaagaggccgctgcggacctcaagccgctagagctgcgggacgtgacgtggccgcggaagcagtcgcacgcagccctaagcgtccagcctggggcagtcgccggtttgaagctgtgggatggtgggctctcttggccttggtgacccttctctctttcgccacaagattccaccgccttgacgaacccccacacatttgctgggacgaaacacatttcgggaagatgggttcctattatatcaaccgtaccttcttttttgacgttcacccccccctgggtaaaatgctgattggtttggccggatacctatctggctacgacggcacctttttgtttcagaaacctggggacaagtacgagcaccactcatacatgggaatgagaggcttctgcgccttcctggggagctggcttgtccccttcgcttacctgaccgtgctcgacctgtctaagagtctctctgccgcgctgttaactgctgctcttcttaccttcgatactggatgcttgaccctgtcacagtatatcctgttagaccctatcctgatgttctttatcatggcagctatgctgagcatggtaaagtacaatagctgcgcggatagacctttttccgcaccctggtggttctggctgtccttgaccggtgtttccttagccggcgcgctgggggttaaattcgtgggcctatttatcatactgcaggtcggcctcaatacgatcgctgatctctggtacctgtttggagacctgtcccttagcctggtcaccgtgggcaaacatctaaccgcccgcgtactctgcttgattgtgctcccactggcattgtacacagccacttttgcggttcatttcatggtactgagcaagtcagggccaggagatggtttttttagctcagcatttcaggcgcgtctctccggtaataacctgcataacgcatccatccctgagcacctcgcttacggcagcgtgatcacagtgaaaaaccttcggatggccatcggatatctgcatagccatagacacctgtatccagagggcataggcgccagacagcagcaagtgaccacttatttgcataaggactataacaatctgtggattataaagaaacacaatacgaatagtgacccgcttgacccctccttccccgtcgaattcgtcagacacggcgatatcatcaggttggaacataaagagaccagccgaaatcttcattcccactatcatgaggcaccaatgactcgcaaacattatcaggtcactgggtacgggattaatggaaccggtgattccaatgacttctggaggatagaagtagttaatcggaagttcggcaaccgaatcaaggtgctacggtccaggatccggttcattcacctggtgacaggatgtgtgttaggctctagcgggaaggttctgcccaaatggggttgggagcagcttgaggtcacttgcactccatacctgaaggaaacgctgaattctatctggaatgtagaagaccacataaaccccaaacttcctaacatctccctggacgtccttcagccttcattccctgaaattctccttgaatcccacatggtgatgattcggggcaactccggtttaaaacccaaagacaacgagtttacaagtaagccgtggcactggcccatcaactaccaggggctcaggtttagtggggtcaacgacactgactttcgagtctacctactgggcaatccagttgtctggtggctgaacctcctctctatcgccctgtacctcttaagcggcagtataatcgccgtcgctatgcagagaggggctcgactgccagccgaagtggcagggctatcgcaggtgctgttaaggggcggcggtcaagtgcttctaggctggaccctgcattatttccctttcttcctgatgggcagagtgctgtactttcaccactattttcccgctatgctgttctcctcaatgctcactggcatcctgtgggatactctacttaggctgtgtgcatgggggctcgcatcctggccgctcgcaagggggatacacgtcgcaggcatcctaagtctgctactcggcacagcctattccttttatctcttccaccccctggcttacggaatggtgggaccgttggcccaagaccctcaatctcccatggccggcctgcgttggctcgactcttgggatttctag

SEQ ID NO: 131024 - DNA, 669 bp, synthetic construct
  misc_feature 1..669: note = Description of Artificial Sequence: Synthetic coding sequence
  source 1..669: mol_type = other DNA
atgaaactgccactcctcctcgccctactgtttggagccgtgagtgcactgcatttacggtctgaaacctccaccttcgaaaccccactgggggccaagacactccccgaggacgaggagacaccagagcaggaaatggaggagactccatgccgggagcttgaggaggaggaggagtggggatcaggctcagaggacgcctccaagaaggacggggccgtggaatctatttcagttcctgacatggtcgacaagaaccttacgtgcccagaggaggaggacaccgtgaaggtagttgggatcccgggatgccagacttgcagatatctccttgtccgctccctacagaccttttcccaggcttggtttacctgtcgaaggtgctatcgcggtaacctcgtaagtatccacaattttaatatcaattatcggatccagtgcagtgtctccgcactgaatcagggacaggtttggatcggggggcggatcactgggtctggacgatgcagacgatttcaatgggtagatggaagccgatggaacttcgcctactgggcggcgcaccagccttggagccgtggagggcactgtgtagcgctgtgtacccgcggcggccactggcgcagagcacattgcctccgccggttgcccttcatctgctcatattag

SEQ ID NO: 131025 - DNA, 669 bp, synthetic construct
  misc_feature 1..669: note = Description of Artificial Sequence: Synthetic coding sequence
  source 1..669: mol_type = other DNA
atgaagttgcccctcttactggcactcctctttggggcagtttccgctctgcatctgagaagtgagacatccactttcgaaaccccactgggagccaaaaccttgccagaggatgaagagacgccagaacaggagatggaggagaccccatgtagagaactcgaagaggaggaagaatggggttccggcagcgaggatgcgtcgaaaaaagacggggccgtggaaagtatttctgtccccgacatggtcgacaagaacttgacgtgccccgaggaggaagataccgtgaaggtggtgggcattccaggttgccaaacctgcagatatttactggtgcgcagccttcagacttttagtcaagcatggtttacctgtagacgttgctaccggggcaacctcgtttccatccataacttcaatattaactataggattcaatgttccgtgtccgcacttaatcaggggcaggtttggatcggtggaagaatcaccggatccggacgttgccgccgatttcagtgggtggacgggtcccggtggaacttcgcctattgggccgcccatcagccctggtcacggggagggcactgcgttgcgctctgcactcgcggtggacactggcggagagctcactgccttaggcggctgcctttcatctgcagctactag

SEQ ID NO: 131026 - DNA, 636 bp, synthetic construct
  misc_feature 1..636: note = Description of Artificial Sequence: Synthetic coding sequence
  source 1..636: mol_type = other DNA
atgaaattgcccctcctgttggccctgctgttcggtgctgtgtcagccttgcacttgcggagcgaaacatccacctttgaaacccccttaggggccaagaccctgcccgaggacgaagaaactcccgaacaggaaatggaggagacaccctgccgtgaactggaagaggaagaggagtggggttctggctctgaggatgcctcaaaaaaagatggtgctgtggaatctatcagtgttccagatatggtggataaaaacctcacatgtcctgaggaggaggatactgtgaaggtggtgggaatcccaggctgtcagacctgtcgttatttgctctttacctgtaggcgatgctacagagggaatcttgtgagcatccataacttcaacatcaactataggatccagtgctcagtcagtgcactgaaccaaggccaggtatggatcggaggaagaatcactggatccggcagatgcaggagattccagtgggtggatggctcccggtggaacttcgcttattgggctgcacaccaaccctggtcgcgagggggccactgtgtcgctctctgcaccaggggcggtcactggcgccgcgcccactgtctgcgaagactcccatttatttgcagctactag

SEQ ID NO: 131027 - DNA, 678 bp, synthetic construct
  misc_feature 1..678: note = Description of Artificial Sequence: Synthetic coding sequence
  source 1..678: mol_type = other DNA
atgcagtgtctgcttctactcccgtttcttctgctcgggaccgttagcgcattgcacctcgagaatgatgccccccacttggagagcctcgaaacccaggcagatcttggacaggacctggatagcagtaaggagcaggagagggacctcgccttaacagaagaagtgatccaggctgaaggagaggaggtcaaagccagtgcgtgtcaggacaactttgaagacgaagaggccatggagtccgaccccgccgccttggacaaagattttcagtgtccaagggaagaggacatcgtcgaggttcaaggctctccacgatgtaagatatgcagatacctgctagttcggacaccgaaaacgttcgctgaagcccaaaacgtctgcagccggtgctacggagggaacctcgtctccattcatgactttaatttcaactaccgaatacagtgctgcacatccacagtaaatcaagcgcaagtctggatcggaggtaatcttagagggtggtttctttggaagcggttctgttggacagacgggtcacattggaactttgcctactggtcgccgggacagcctggtaatgggcagggtagctgcgtggctctctgtactaaagggggatactggcgaagggcccagtgtgataaacagcttcctttcgtctgctccttctag

SEQ ID NO: 131028 - DNA, 4092 bp, synthetic construct
  misc_feature 1..4092: note = Description of Artificial Sequence: Synthetic coding sequence
  source 1..4092: mol_type = other DNA
atggcctggaaaacactgcctatctacctgttacttctgctctcagtctttgtgatccagcaagtgtctagccaggaattatcgtgcaagggaagatgttttgagagtttcgagcgcggaagagagtgcgactgcgacgcacagtgtaagaagtatgataaatgttgtcccgactacgagtcattctgcgctgaggttcacaatccgaccagcccgccaagttctaagaaagccccgcctccaagtggcgcctctcaaactattaagtcaactactaagagaagtcctaaacccccaaacaaaaagaaaaccaaaaaggttattgaatccgaggagatcaccgaggaacactctgtgtccgagaatcaggaatcatcaagttcctcctcttcctcctcttcatcctccacaatcaggaaaatcaaatcatcaaagaatagtgcagccaatcgtgaattgcagaagaaactgaaagtgaaagataataagaagaacagaactaaaaaaaagccaacccctaaacctcctgtggtggacgaagccggctcgggattggataatggggattttaaggtcacaacccccgatacgagcacaacccagcacaacaaggtaagtacctctccgaaaattacaacggcaaagcccatcaacccgaggccaagtctgccccctaatagtgatacatccaaggaaacctctttgaccgtgaataaggagacaacagtggagaccaaagagacaactacaaccaataagcagacctctactgatggcaaggaaaaaacaacctctgcaaaagagactcagtcaatagaaaagacttccgctaaagacctcgcccccacctctaaggttctggccaagccaacaccaaaagctgaaactaccacaaaggggccagctttaactaccccgaaagagcccacccccaccacgcctaaagaacccgcaagtacgaccccaaaagaacctacacctacaacaatcaagagcgctcctacgactcccaaagagccggcccctacaactaccaaatccgccccaacgacacccaaagaacctgccccaacgactaccaaggagcccgcaccaactaccccaaaggaacctgccccaactactacaaaagaaccagcacccaccacaacaaagagcgcgcccactactccaaaggaacccgcgcccacgacccctaaaaaacccgcccctaccaccccaaaggaaccggcgcccacgactcccaaagagccgacccccactacaccaaaggaaccagctcctacaaccaaggagcccgctcctacaacaccaaaagagccggcccccacagcccccaaaaagccagctcctacgacaccaaaagagcccgcccccacaacccccaaggagcccgcccccaccaccaccaaggaaccatcacctactacacctaaagagccagcaccgactaccacgaaatccgccccaacgactaccaaagagcctgcccccactacgactaagagcgctccaaccacaccaaaagagccttcccccaccactactaaggaaccggcccctaccacaccaaaagaaccagcccccactacacctaaaaaaccagcacctactacgcctaaagagccagcccccacaactccaaaggaacctgctccaacgacaacgaagaagccggcaccaactacccccaaggaacccgccccgaccacgcctaaagaaaccgcaccaacaactcccaaaaagctcacgcctaccacaccagagaaactggctcccaccactcccgagaaaccagctcctaccacgcccgaagaactcgccccaacaacacccgaggaacccacgcctacgacgccagaagaacctgcacccaccactcccaaggccgcagcccccaacacacccaaggagcccgccccaactacacccaaagaacctgctcctactacacctaaagaacctgctccaaccacgcccaaagaaacagctcctacaaccccaaaaggtaccgctccaacgacattgaaggaacccgcccctactacacccaagaagcccgcacccaaagagctggccccaacgacaacaaaggaaccgacttccacgacatgtgataagcccgcaccaactacccctaaaggcactgcacccacaacgccaaaggagcccgcacctacaacaccaaaggaacctgcaccgacaacacccaaggggacagcaccaacaactctaaaggaaccagcccctactactcccaaaaagcccgccccgaaggaacttgctccgacaaccacaaaaggccccacgagcacaacatccgataagcccgcaccaacaaccccaaaagagaccgcgcccaccacccccaaagaacctgcacccacaacccctaagaagccggctccaactacaccggaaactcctcccccgaccacctctgaggtttcaaccccaacaactaccaaagagccgacgactattcacaaatcaccggacgagtctaccccagagttaagcgcagagcctacccctaaagctctggagaatagccccaaagaaccgggagtccccacaacaaagactcccgcagccaccaaaccagagatgacgaccacggccaaggataaaacaacagagcgagaccttagaacgacccctgaaaccacgaccgctgcccccaagatgacaaaggagaccgccacaacgacagagaagaccactgagagtaaaattaccgccaccaccacccaagtgacttcaactacaacacaagataccacccctttcaagatcacaaccctgaaaacgaccactctcgccccgaaggtcactacaacaaaaaaaaccatcaccacaactgaaattatgaacaaaccggaggaaacagccaaacccaaagatcgagcaaccaactccaaagccactacgccgaagcctcaaaagcctacgaaagcccccaagaagcccaccagcacgaaaaaacccaagacaatgccaagagtgagaaaaccgaagaccactccaactccaagaaagatgaccagcaccatgccagagctgaaccctacctcaaggattgctgaggccatgctgcaaaccactaccaggcccaaccagacccctaactccaagctcgtagaggtgaatcccaagagcgaggatgctggcggagccgagggcgagactccccatatgttattgcggccccatgtgttcatgcctgaagtgacacctgatatggattatcttccccgggttcctaatcaagggatcattatcaacccaatgctgtccgacgagaccaacatctgcaatggcaaaccagtagacggcctcaccactctgagaaatggaaccctcgttgccttcaggggacactacttttggatgttaagtccattctcaccaccctccccagctcgcagaatcaccgaggtgtggggaatcccatcccccatagataccgttttcacaagatgcaattgcgagggaaagacgttctttttcaaggactcccaatactggcgattcactaacgatatcaaggatgccggataccccaaaccaatcttcaagggttttggtggcttgacagggcaaatcgtggctgctctgagcactgccaagtataagaattggcctgaatctgtgtacttctttaagagggggggcagcattcagcaatatatttataaacaagaacctgttcagaaatgccccggcagacgcccagcactgaactaccccgtatacggcgagacaactcaggtgcgaaggcgcaggttcgagagggccatagggccgagccaaactcacaccatcaggatacagtacagtccagcaaggctcgcgtaccaggataagggagtgctccataatgaagtgaaagtgtccatcttgtggaggggactacctaatgtggtgacctctgccatctcattgcccaacatcaggaaaccagatggttacgactactacgcctttagcaaggatcagtactacaacatagacgtgccgagcagaaccgccagagcaatcaccacacgatctgggcaaaccctgagtaaggtatggtacaactgcccatag

SEQ ID NO: 131029 - DNA, 2802 bp, synthetic construct
  misc_feature 1..2802: note = Description of Artificial Sequence: Synthetic coding sequence
  source 1..2802: mol_type = other DNA
atggcctggaagacactccctatttacctgcttttgctgctgagcgtgttcgtgatccagcaagtgagctcgcaggaattaagctgcaagggccgctgtttcgagtcatttgagcggggccgggagtgcgattgcgacgcccagtgtaagaagtatgacaagtgttgccccgactacgagtcattctgcgccgaagtccacaacccaacctcaccccccagctccaagaaggcgccacctccatccggcgcgagccagacaattaagagtaccactaagcgctccccaaaacctccaaacaaaaaaaaaaccaaaaaagtgatcgaaagcgaggagattaccgaggaacattctgtaagcgagaatcaagagtcctctagtagcagctccagcagttccagtagtagtacgatacgaaaaatcaaatcatctaagaactcagcggctaaccgggaactacagaaaaagctcaaggtgaaagacaacaaaaaaaacagaactaagaagaaacccactccgaaacctcctgtggttgacgaggcgggaagtggactcgataacggagacttcaaagtaactacaccagacacatccaccacgcaacataacaaagtttctacatcgcctaaaatcacaacagctaaacccattaacccaagaccatcgcttccgccgaattcagatacatctaaggagaccagcttaaccgtaaataaggagactacagtggaaacgaaagagaccacaaccacaaataaacagaccagcacggacgggaaggaaaagacgacgtcagctaaggagacgcagtccatcgaaaaaacaagcgctaaggacttggcccccactagtaaggttttagccaagccgacaccgaaagctgaaaccactacgaagggccccgctctgaccacacctaaggaacccacacccactactccgaaagagcctgcttccacgactccaaaagagcccacaccaaccacaatcaaaagcgctcccaccacccctaaagaacctgcaccaacaactacaaaaagcgcccccaccacccccaaggagcccgccccaaccacgacaaaagagccagctcccactacaccgaaaaaacccgcccccacaactcctgaaacacctccacctactacttccgaagtgagcaccccgactaccactaaggagcctactacaatccataaaagccctgacgagagtactcccgagttgtctgctgaacccacacccaaggctctagagaattcaccgaaggaaccgggggtgcctactaccaagacccctgctgcaaccaagcctgaaatgaccaccaccgccaaggacaagacaacagagagagacctccggaccactcctgagactacgacagcggcccctaaaatgaccaaagagaccgccacgacaaccgagaaaaccacagaaagtaagatcaccgcgaccactactcaggtaacttcaacaactactcaagacactacgcccttcaaaatcactaccctgaaaacaaccacgctggctccgaaggtgactactactaaaaaaacaataacaaccactgaaattatgaataaacccgaagagactgctaaacccaaagacagagctaccaattccaaagccaccacgcctaagccgcagaagccaactaaagcccctaagaagcctacttcaacaaagaaaccaaagacgatgccccgcgtccgaaagccaaagactacccctaccccacgcaagatgacatcaactatgccagaactcaacccgactagtcgcattgccgaggccatgctgcagactacaacccgtcccaaccagacaccaaatagtaaactggtggaagttaatccaaaatctgaagacgcagggggtgccgaaggcgagacaccacatatgcttctgcgccctcacgtgtttatgccagaagtgacacctgacatggactacctcccacgggtgcctaaccagggtatcattattaacccaatgttatcggacgagaccaatatatgcaacggaaagccagtggacggcctcactaccctcagaaatggcactctcgtggccttccggggacattatttttggatgcttagccctttttctcccccgtcacccgcccgtagaattacagaagtgtggggcatcccatcaccaatcgacacagtgtttaccagatgcaattgcgaaggaaaaactttcttcttcaaggacagccagtactggcggtttacaaacgatataaaggacgccggttatccaaagcctatctttaagggcttcggtggactcaccggccagatagttgccgccctctctacagccaagtataaaaattggcccgaatcagtctatttttttaagcgcgggggcagcatacagcaatatatctacaaacaggaacccgtacagaagtgtcctggccggaggcccgcactcaactacccagtctatggggagactactcaggtgaggaggcggaggttcgagagagccattggcccaagtcaaacacatacaatccggattcagtattccccagcgagactagcgtaccaggacaaaggagtccttcataacgaggtaaaagtaagcatcttgtggcggggactgcctaatgtcgtgacctccgctattagcctgcccaacattcgaaaacccgatgggtacgactactacgcattttccaaggaccagtattacaatatcgacgtgccatcacgtacggcccgcgcaatcaccacgagaagcgggcagacgctgtcaaaggtctggtacaactgtccctag

SEQ ID NO: 131030 - DNA, 3936 bp, synthetic construct
  misc_feature 1..3936: note = Description of Artificial Sequence: Synthetic coding sequence
  source 1..3936: mol_type = other DNA
atggcttggaaaacattaccgatctaccttctgcttctgctgagcgtcttcgtgattcagcaggtgtcatcccaggacctgtcctcgtgcgcgggtcgttgtggcgaaggctactctcgggacgccacgtgcaattgcgactacaattgccagcattacatggaatgttgccccgactttaagagagtatgtacagcagagctgtcttgcaagggacgctgcttcgagagtttcgagcgagggagagagtgcgactgcgatgctcaatgtaagaagtacgataagtgctgtccagactacgagtccttttgcgccgaggtgaaagacaataaaaagaatcggacgaaaaaaaagccaacccctaaaccccctgtcgttgacgaggccggctcagggctggataatggtgactttaaggttacaacccccgacacctcaaccacccagcataacaaagtgtctacctcccctaagataacgacagcgaagcctatcaacccccgacctagcttgccacccaactccgacacgtcgaaggagacctccttgaccgtgaataaggagacgacagtcgagactaaggagactaccactaccaataaacagactagtaccgatggcaaagaaaaaaccacctctgccaaggagactcaaagcatcgaaaaaacttctgcaaaggatttggctcctacctccaaggtgctagccaagcctacacctaaagctgaaaccaccaccaagggccccgctctaacaacgcccaaggaacccaccccaacaacccctaaggagccagctagcacaacaccaaaagagccaacccccacaactatcaaatcagcgcccaccactcctaaagaacccgcccctaccacgacaaaatcagcgccaacgacaccaaaagaaccggccccaacaaccacgaaagaaccagccccaaccacgccaaaagagccagccccgactacaactaaagagccggcgcccacgacaaccaaatcggcccctacaacaccaaaagaaccagcacctacaaccccgaaaaagcccgcccccacaacccctaaggagcccgcgcccacaacccccaaggagccaacaccaacaacacccaaagagcctgcccctacgaccaaggaacccgctcccacgacacctaaagaaccagctccaacggctcctaaaaaaccagcccctaccacgcccaaggagccagcacctacaaccccaaaggaacccgcacctaccaccactaaggaaccatcaccaaccactcccaaggagcctgctccaacaaccaccaaaagcgcccccaccaccactaaagagccagccccaacaactactaaatctgcgcctactacgcccaaagaacccagccccactactactaaagagccagctcccactacgccaaaggagccggctcccaccacacccaaaaagcccgcaccaaccacgcctaaggagccggcccctactacgccaaaggaacctgctccaacgacaactaaaaagcccgctccaacaactccaaaggagcctgcaccaacaactcccaaggagacagccccaactacgcctaagaagttgactcctacaactcccgagaaactggctccaactactcccgagaaaccggcccctacgactcccgaggagctggcacctacaactcctgaggaacctacccccacaacccctgaggagcccgcaccgacaactccgaaagccgccgctccaaatacacctaaagaacctgccccaaccactcccaaagagcccgcccctaccaccccaaaggagccggctcccaccacccctaaagagacagccccgaccactcccaagggaactgcccccaccaccctcaaggaaccagcccccacaactcctaagaaacccgcccccaaagagctcgcgcccacaacaactaaagagccaacaagcactacatgtgacaagccggcgccgacaacacccaagggcactgccccgaccacccctaaggagcccgcccctactacgccgaaggagcccgcacccaccaccccaaaagggacagcaccaaccactctaaaggaaccagctcctaccacacctaaaaagccggcccctaaggaactcgctccaaccactacaaagggacccactagcacgacatctgacaagcctgcccctaccacaccaaaagagaccgcccctacgacaccaaaagagccagcccccacaactcccaagaagcctgctccaactacccccgaaacccctcctcctactacctctgaggtgtccacaccgactacaactaaagagcctacgacgattcacaagtctccagatgaatccacgcccgagctgtccgccgaacctacaccgaaggcactggaaaatagtccgaaagaacctggggtccccacgaccaagacccctgcggccacaaagccagagatgaccaccactgcaaaggacaagactacagaaagagacctccgtaccacgcctgaaactactaccgctgctccaaagatgaccaaagaaacagccactacaacagagaaaactaccgaatccaaaattaccgctacaacaacacaggttacttctacaaccacccaagatactacccccttcaagattacaactttaaaaacaacaacccttgcccccaaggtgacaaccactaagaaaacaattacaactaccgaaatcatgaataaaccggaagagactgccaagcctaaggatcgtgccaccaactctaaggcaaccacccccaaaccccagaagcccacaaaggccccaaaaaaaccaacatccactaagaaaccaaagactatgccgcgtgtgcggaaaccaaagaccactcctactccacgcaaaatgacctcaactatgcccgaactgaatccaacctcacgcatcgccgaggccatgctccagacaactacgagacctaaccaaacccccaatagtaaactggtggaggtgaatcccaagagtgaagacgccggaggcgctgaaggtgaaacccctcacatgttgctgagacctcatgtgtttatgccagaagtgactcccgatatggattatttaccacgagtacctaaccaaggcatcataattaatcctatgttgagcgacgagactaacatttgcaacggaaagcctgtggatggcctgacaacattgagaaatggaactctggtcgcgtttagaggccactatttctggatgctctcaccgttttccccacccagccccgccaggagaatcacagaggtgtggggtatccccagcccaattgacactgtgtttactcggtgtaactgtgaagggaaaacctttttcttcaaggatagccagtattggaggttcactaacgatatcaaagacgccggttatccaaaaccaatcttcaagggctttggcggcttaactggacagatcgtcgccgccctctccactgccaaatacaaaaattggcctgagtccgtgtactttttcaagagaggtggtagcattcagcagtatatttacaagcaggagcctgtccagaaatgtccaggtaggcggcctgcactgaactatcctgtctacggagagacgacccaggtgcgacgccgaaggtttgaaagagcaatcggcccttcacagacccatactatacgaatccaatacagcccagcccggctagcttaccaagataagggcgtcctccacaatgaggtgaaagtctctatactctggaggggtcttcccaatgttgtaacatccgcgatctccttacccaacatccgaaagcctgatggttatgattactatgccttcagcaaagatcagtactacaacatcgacgtgccgagtagaacagcacgcgctattacaactcgctccggccagacattgtcgaaggtgtggtacaactgcccatag

SEQ ID NO: 131031 - DNA, 4086 bp, synthetic construct
  misc_feature 1..4086: note = Description of Artificial Sequence: Synthetic coding sequence
  source 1..4086: mol_type = other DNA
atggcttggaaaaccctccccatctacctcctcctgctcctgtccgttttcgttattcaacaggtcagctcccaggacctcagcagctgcgctggccgctgcggagaaggttacagccgcgacgcgacatgtaactgtgactataattgccagcactacatggaatgctgccctgatttcaagagggtgtgcacagccgagttatcctgtaagggccggtgctttgagtccttcgagcgaggccgagagtgcgattgtgatgcccagtgcaaaaaatatgataagtgttgtccagactatgaatccttctgtgctgaggtacacaacccaacctccccccccagttctaaaaaggccccaccacccagcggcgcaagtcagaccatcaagtccactaccaagcgaagtcccaagcccccaaataaaaaaaagaccaagaaggtgatcgagtctgaggagatcactgaggtcaaagacaataaaaaaaacagaactaagaaaaaaccaacaccaaaaccgcctgtggtcgacgaagcagggagcgggttggacaatggcgactttaaagtgaccactcccgacacatccactacccagcacaacaaggtgtccacttcaccaaagatcacaaccgccaagcccattaaccccagaccatcccttccacccaacagcgatacaagcaaagagacctctttaaccgtcaataaagaaaccacggttgaaacaaaggaaaccaccacaaccaacaagcaaacttccaccgacggtaaagaaaagacgacatctgctaaggagactcagtctattgagaagactagtgcaaaagatttagccccaacgtccaaggttctggccaaacccacccccaaggcggaaactacaactaagggacccgcgctgaccacccccaaagagccaactccgactacgcccaaagaacccgcctccacgaccccaaaggagcctacacccacgaccataaaatccgcgcctacaaccccaaaagaacctgcacctactacaaccaagagtgcgccaaccaccccaaaggaacctgcccctaccactaccaaagagcctgctcccaccacgcccaaagagcccgcccccacaaccacaaaggagcctgcacctacaacgactaaaagcgccccaaccacaccaaaggagccagcccccaccaccccaaagaaacccgccccgacaaccccgaaagagcccgcacctactaccccaaaagagccgacccctacgacccccaaagaaccagcacccactacaaaggagcccgctccgaccacaccgaaggaacctgcccccacggcccccaagaaaccagccccaacaactcctaaagagccagcacccacgacacccaaagagccagcgccaaccacaactaaggaaccgtccccgaccactccaaaggaaccagcccccacaacgaccaaaagcgcccccaccaccaccaaggagcccgctccgactactaccaagtctgccccgactacccctaaggaaccttccccaaccactaccaaggagcccgcccccactacccccaaggagcccgcccccacaacacccaagaagcctgcacctaccacccctaaggaaccagctccgactactccaaaagagccagcgccaactaccacaaagaagccagctcccaccacgcccaaagagccggcccccacaaccccgaaagagacggcacccacgacccctaaaaagctgacccccactactcctgaaaaactagctccaactactcctgaaaagccagcaccgacaaccccggaagaattagccccaactacccccgaggaaccaactcctacaaccccggaggagcccgcaccaacgacccctaaagctgctgcccctaatacaccaaaggaacccgcacctacaacaccaaaagaaccagcccccaccacacccaaagagcctgcacccacaacccctaaggagaccgcccccaccacccctaagggaactgctccaacaactttaaaagaacccgccccaacgacacctaaaaagccagctccaaaggagcttgctccaaccaccaccaaagaaccgacatcaaccacctgtgacaaacctgcccccaccaccccaaagggtacagcgcccactactccgaaggagcccgccccaaccacccctaaagaacctgcgccaacaacaccaaaggggacagcacctactactctgaaggagcctgcacccactacacccaaaaagccagcccccaaggagctcgcgcccaccacaactaaagggcctacatctaccacatcagataaacccgctccaactacacccaaggaaaccgcccccacgacccctaaagagcccgccccaacaacccccaagaagcctgccccaacaacccctgaaacccctcctcctaccacgagcgaagtatctacccccacgacaacaaaagagcctacgacgatccataagtctccggatgagtccacaccagagttgagcgccgagccaactccaaaggctctggaaaactcccccaaagagcccggggtgccaacaacaaagactccagccgccaccaagccagagatgactaccacagccaaggataaaacaactgagagagacctccgcacgactcctgagactacaactgcggctcctaagatgacgaaagaaaccgctactaccaccgaaaagacaaccgaaagcaaaattacggcaactaccacacaggtgacatccactacaacacaggatacaacccccttcaagataactactctgaaaacaactaccctcgcccccaaggtcacgacgacaaaaaaaaccatcacgacgacagagattatgaataagccggaggaaaccgctaagccaaaagaccgggccacaaacagtaaggcgaccactcccaagccccagaagccgaccaaagcccctaagaaacccacgtctactaagaagccgaaaaccatgcctcgcgttcggaagccaaagacaacacctacccctcggaaaatgaccagtaccatgcctgaactcaaccccacaagtagaattgccgaggcgatgctgcaaaccacaactcgacccaaccagacccctaatagcaagcttgtcgaagtgaacccaaaatcagaagatgctgggggagcagaaggagaaacgccccatatgctgctccgcccacacgtattcatgccagaagtgacccccgacatggactatttgccaagggtcccaaatcaagggatcataattaatccaatgcttagcgatgagaccaatatttgtaacgggaagcctgtagacgggcttactaccctgaggaatggaactctggtcgccttccgcggccactacttctggatgctgtctccattttcccctccatcacccgcaagaagaattaccgaagtatgggggatccccagcccaatagataccgtgttcacccgttgcaactgtgaagggaagactttcttctttaaagattctcagtactggcgcttcactaatgatatcaaggatgccggctatccaaagccaatctttaagggttttgggggcttaacaggccagatagtggccgcactgtctacagccaagtacaaaaattggcctgagtccgtgtacttctttaagcggggcggttccatccagcagtatatttacaaacaggagccggtgcagaaatgtccaggacggagaccggcactaaattacccagtgtatggcgagacgacacaggtgcggcgtaggaggttcgagagagctattggtccaagtcagacacacacaatccgcatccaatacagtcctgcccggttggcctaccaagacaagggagttcttcacaacgaagtgaaagtgagcattctgtggagaggactgcccaatgtggtaactagcgcaatcagcctgcctaatattcgcaagcccgacggttacgattattatgccttcagtaaggaccagtattacaatatagatgtcccctctagaaccgctcgcgctatcaccacaagatctgggcaaacattgagtaaggtttggtataattgtccgtag

SEQ ID NO: 131032 - DNA, 4215 bp, synthetic construct
  misc_feature 1..4215: note = Description of Artificial Sequence: Synthetic coding sequence
  source 1..4215: mol_type = other DNA
atggcctggaaaactcttcctatttacctgctgctcctcttatctgtcttcgtgatccagcaagtgtcctctcaagatctgtcctcctgtgccggtaggtgcggagaaggatatagcagggacgcaacttgtaattgcgattacaactgtcagcactatatggagtgttgccccgatttcaaacgggtatgtactgcagagctgagctgcaaaggtcgatgctttgagtcttttgagaggggcagagaatgcgattgcgatgcccagtgtaaaaaatacgacaagtgttgtccagattacgagagtttttgtgccgaagtccataatcccactagcccacctagctctaaaaaagctccccccccaagcggggcttcacagactattaaaagcacaacaaagaggtcccccaaacctccgaacaagaaaaagactaaaaaggttatcgagtcggaggagatcacggaggaacacagcgtgagtgaaaaccaagaatcatcgagctccagttctagcagtagttcttcaagtaccattagaaagattaaaagcagtaagaacagtgccgccaatagggagctccaaaaaaagctcaaggtgaaagacaacaagaaaaaccgaactaaaaagaagccaacccccaagcctcccgtggtagatgaggcggggtcaggcctggacaacggggattttaaggtcacaacccctgatacttctacaacccaacacaataaggttagcactagtccaaaaataaccactgccaagccaataaatcctcgtccgtcacttccaccgaatagtgacacatcaaaggaaacctcgctgaccgttaacaaggaaaccaccgtcgagactaaagagaccaccacgacgaataagcagacgtcaaccgatggcaaggagaaaactacaagtgctaaggaaactcagagtatagagaaaactagcgccaaggacctggcaccaacaagcaaggtgttagctaagcctacacctaaggccgagaccaccacgaagggacccgcccttacaacccctaaggagcctacgcccaccacgccaaaggagccagcttctaccacaccaaaggagccaacgcccacgaccatcaagtccgccccgaccactcctaaggaacccgccccaacaacaaccaagtctgcacctactacacccaaagagccagcgccgaccacaacgaaagagccagcacctacaacacccaaggagcccgcacctacaactaccaaagagccggccccgaccacgaccaagtccgccccaactacaccaaaggagccagctcctaccaccccaaagaaacccgcccccaccactccaaaagagccagcaccaaccacacctaaagagcctacccccactacccccaaggaacctgcccccacaactaaggaacccgcccctactaccccgaaagaaccagcacccacggcccccaagaagccggcaccgactactccgaaagaacccgcacccaccacaccaaaagaaccagccccgactacaactaaggagcccagcccaaccacacctaaggagcctgcccccacgactacaaaatcagctcctacaacaaccaaggagcccgcaccaacaaccaccaagtctgcaccgaccacacctaaggaaccgtctcctaccactactaaggagcccgctcctacgacacctaaggagcccgcgccgaccactcccaagaaacctgctcccacaacacctaaggagccggcccccaccactccaaaagagccagcacccaccacaacaaaaaaacccgcccctaccactcccaaagagcccgccccgacaacaccaaaggaaacagcgccaaccacacccaaaaagctcactccaacaacgcctgaaaagcttgcaccgactacccccgaaaagccagctcccacgacacctgaggaactcgcacctaccaccccggaagagccaacccctaccacacctgaggaaccagcgcctaccacgcctaaggcggccgcccccaacacacctaaggaaccggctccgacaaccccgaaagaacctgctccaacgactcctaaggagccagcaccaacaactccaaaggagacggcaccaaccactcccaagggaactgctcctactacactcaaggaacctgccccaactactccgaaaaaaccagcccccaaagagctcgccccgacaacaactaaggaaccgacttcaaccacctgtgataaaccggccccaacgacacccaagggcactgcgcccacgacgccaaaagaacctgccccgacaacgcccaaagagcccgcaccaacaacacccaagggaacagcacccactacactgaaggaacccgctcccactactcctaaaaagcctgccccgaaggaattagctcccaccaccaccaagggtccaacatcgaccacgtctgacaaacccgcccccacgacccccaaagagacagctcctaccactcctaaagagccagcccctaccacacccaagaaacccgctcccactacaccggagaccccgcccccaacaacaagcgaagtaagtacccccaccaccaccaaggaacctactactatccacaaatccccagacgagtctacccctgaattaagtgcggaaccaacaccgaaagcgctggagaatagcccgaaggagcctggtgtcccaaccactaaaacccccgcagctacaaagcccgagatgactactacagccaaggataagaccaccgaaagggacctcaggactacacccgagacaaccaccgccgcccctaagatgacgaaagagacggccaccaccacagagaaaactacagagtcaaagatcaccgcaacaacgacccaggttacttctacaacaacacaggatactaccccatttaagattaccacactcaaaaccaccaccctcgcacccaaagtgacaactactaagaaaaccattacaactactgaaatcatgaacaagcccgaggaaactgcaaaaccaaaagacagagctaccaatagcaaggcaactaccccaaagcctcagaaacctactaaggctccgaaaaaaccaacatcgaccaagaagcccaagacgatgcctagagtgaggaagcccaagactacacctactcctcggaaaatgacctcaaccatgccagaattgaatcctacttcccgaattgcggaggctatgctccagacgacaaccagacctaaccaaacacccaactcaaaattggttgaggtaaaccccaagtccgaggatgcaggcggtgctgagggggaaacaccccatatgttactccgaccccatgttttcatgcctgaagtaactcccgacatggactacctccctagggtgccaaatcaaggtattataatcaatcccatgctgagcgacgagacaaacatctgcaatggcaagcctgtggatgggcttacaacgttgaggaatggtacactagtagccttcagaggacattacttttggatgctcagcccatttagcccacccagtcctgccagacgaattactgaagtctgggggattccgtcgccaatcgacacagtgttcactcgctgtaattgcgagggaaagaccttcttctttaaagactcccagtactggcgattcaccaatgacataaaggacgccggatatcctaagccaatctttaagggatttggtggcctgaccggacaaattgttgcagctcttagcacagccaagtacaagaactggcccgagagtgtgtatttctttaaaagaggagggagtattcaacagtatatctacaagcaagagccagtacaaaaatgtcctggaaggaggcccgccctcaattaccccgtgtacggcgaaacaacacaggtgcgacgtagaaggttcgaacgcgccatcggccccagtcagacccacaccatccggatacagtactctcctgccaggttggcataccaggataagggagttttgcacaatgaggtcaaggtgtcaatcctgtggagaggccttcccaatgtcgtgacatccgctattagcctaccaaatatccgcaaacctgatggttatgattattacgccttttccaaggatcagtattacaacatcgacgttcccagtagaactgcccgggcaatcactacacgatcaggacagaccctttcaaaggtatggtataactgtccctag

SEQ ID NO: 131033 - DNA, 834 bp, synthetic construct
  misc_feature 1..834: note = Description of Artificial Sequence: Synthetic coding sequence
  source 1..834: mol_type = other DNA
atgggcctcctagaatgttgcgcacggtgtttagtgggagccccatttgcaagcctggtagcaacgggcctgtgtttttttggtgtggcccttttctgcgggtgcggtcacgaggcattgactggaacggaaaaacttatagagacttactttagcaaaaactaccaggattatgaatacctcatcaatgtgatccatgcgtttcagtacgtgatctatggcaccgccagttttttcttcctttatggtgccttgttactcgccgagggattttacaccaccggagccgtgcgacagatttttggcgactacaagacgaccatttgcgggaagggactttcagccactgttaccggcggccaaaaggggagaggctctcgcggtcagcatcaagcgcattcgctggagagggtctgtcactgcttgggcaagtggctcggacaccctgacaagtttgtcggtattacgtacgccctcactgttgtatggctcctggttttcgcctgcagtgcagtgccagtgtacatatacttcaatacttggaccacctgtcagagcattgcctttccctcaaaaacatcggcgtctattggttccttgtgcgccgatgccagaatgtacggagtgctgccctggaacgcattcccaggaaaggtgtgcggcagcaatctgctgtctatctgcaagacagccgagtttcagatgaccttccacctgttcatcgctgcctttgtgggggccgcggccactctggttagcctgctgactttcatgatcgccgcaacctacaactttgctgtgctgaaactaatggggcgaggtacgaaattctag

SEQ ID NO: 131034 - DNA, 729 bp, synthetic construct
  misc_feature 1..729: note = Description of Artificial Sequence: Synthetic coding sequence
  source 1..729: mol_type = other DNA
atgggcctcttagaatgttgcgctaggtgcctcgtgggcgcccccttcgcctcacttgttgcgactgggctttgtttcttcggcgtcgccttattctgcggatgtgggcatgaggcactaaccggtactgaaaaactgatcgaaacctatttcagcaagaattatcaggactatgagtatcttattaatgttatccatgcttttcagtacgtaatctatggcacggcttcattcttcttcctttacggtgccctacttcttgcagagggcttttacacaaccggggccgtgcggcagattttcggcgactataaaacaaccatttgtggtaagggactgtccgccactttcgtgggtattacctatgctctcaccgtagtgtggttactggtgttcgcgtgcagtgcggtgccggtatacatctatttcaacacttggacaacctgtcaaagcattgctttccctagtaaaactagcgccagtatcggaagtctctgcgctgacgctaggatgtacggagtcttgccatggaacgctttccccggaaaggtgtgtggctccaatctgctttccatttgtaagactgccgagttccagatgaccttccacctgttcattgctgcatttgtaggagctgcagctacgttggtgtccttgctgacattcatgatcgccgccacctataattttgctgtgctcaaactcatgggtcgcggaactaaattctag

SEQ ID NO: 131035 - DNA, 834 bp, synthetic construct
  misc_feature 1..834: note = Description of Artificial Sequence: Synthetic coding sequence
  source 1..834: mol_type = other DNA
atgggcctcctggagtgctgcgctcgttgtttagtgggtgccccgttcgcatctctcgtggcgacaggcttatgctttttcggcgtggcgcttttctgcggatgtgggcacgaggcactcactggaactgagaaacttattgagacatatttcagcaagaactatcaagactacgaatatttgatcaatgtgattcacgccttccaatacgtgatatacgggacggcctctttcttcttcctctacggtgcactattactggccgagggtttttacacaactggcgccgtcaggcagatttttggtgattataaaacgaccatctgtgggaagggacttagcgccaccgtgactggcgggcagaaaggacggggatcccgagggcagcatcaggctcactcgctcgagagagtttgtcactgtttagggaagtggctgggccacccagataagtttgtgggcatcacatacgctctcaccgtagtgtggctgttagtgtttgcctgttcggcggtaccggtgtacatttactttaacacctggaccacatgccagtccatcgcatttccaagcaagacgtccgccagcattggaagtctgtgcgctgacgcgaggatgtacggggtgttaccttggaatgcatttcctggaaaagtgtgtggcagcaatctactcagtatctgcaaaaccgcggagtttcaaatgacctttcatctctttatcgcggcgttcgtgggcgctgctgccactctggtttcgttactgaccttcatgatcgcagctacctataattttgccgtcctcaagctgatgggaaggggcactaaattttag

SEQ ID NO: 131036 - DNA, 384 bp, synthetic construct
  misc_feature 1..384: note = Description of Artificial Sequence: Synthetic coding sequence
  source 1..384: mol_type = other DNA
atgggattactggagtgctgtgctaggtgcttagtcggcgcacccttcgcttccctggtagcaaccggactttgctttttcggcgtggccctgttctgcggctgtggtcatgaggccctaacgggaaccgagaaattaattgaaacttatttctcaaagaactaccaggactatgaatatctgatcaatgtgattcacgcttttcagtatgttatctatgggaccgcaagcttcttcttcctgtacggcgccctgctccttgccgaaggattttatacaacaggagccgtgcgacagatctttggcgactataagacgaccatatgcggtaagggcctatcagctactgtcaccggcggccagaaaggccgaggcagccgatag

SEQ ID NO: 131037 - DNA, 768 bp, synthetic construct
  misc_feature 1..768: note = Description of Artificial Sequence: Synthetic coding sequence
  source 1..768: mol_type = other DNA
atgggattgctggagtgttgcgccaggtgcctggtgggagccccattcgcaagtctggtagctacaggactatgcttttttggagtcgctctcttttgtggatgcgggcacgaggctctcactggaactgagaaactgattgaaacctatttttcaaaaaattaccaggattatgagtacctaattaatgtgatccacgctttccaatacgtcatctacggaaccgcctccttcttcttcctctacggggcactccttctcgccgagggcttttacacaactggcgcggtgcgacagaaggggcggggttctaggggacagcaccaagctcactctctggagcgagtttgtcattgcctcggcaaatggcttggccacccggataaattcgtcggtataacttatgccctgacagtggtatggttattggtgtttgcatgcagtgcggtaccggtgtatatttactttaacacgtggacgacgtgccaatccatcgcattcccatccaaaacgtctgcgtcaatcggcagcctctgcgcagatgccaggatgtacggcgtgctgccatggaacgcctttcccggcaaagtgtgtggctctaatctgctttcaatttgcaagacggcagagttccagatgacttttcacctattcatcgccgcctttgtcggagcggctgctaccctggtttctcttctgactttcatgatcgccgccacttacaattttgctgtgcttaagctgatggggagaggcaccaagttctag

SEQ ID NO: 131038 - DNA, 414 bp, synthetic construct
  misc_feature 1..414: note = Description of Artificial Sequence: Synthetic coding sequence
  source 1..414: mol_type = other DNA
atgggattgcttgaatgttgcgcacgttgtttggttggcgcgcctttcgcttctttagtcgctaccggtctgtgcttttttggagtcgctttgttttgtggctgtgggcacgaagccctgacaggtacagaaaagctgattgagacttacttcagcaaaaattatcaagattatgagtacctaattaacgtgatacatgccttccagtacgtcatctacggcaccgccagctttttcttcctgtacggggccctgctgctggcggaagggttttataccacaggagccgtgcgtcagatctttggagattacaaaacaaccatctgtgggaaaggactgagcgccacggttacgggcggccagaaaggcagagggagtagaggtcaacatcaggcccattctctcgagagatag

SEQ ID NO: 131039 - DNA, 303 bp, synthetic construct
  misc_feature 1..303: note = Description of Artificial Sequence: Synthetic coding sequence
  source 1..303: mol_type = other DNA
atgggattactggaatgctgcgcccgttgtctcgtgggggcgccttttgcaagcctggtggcgacaggtttatgtttcttcggcgtggccttgttttgtggctgcggccacgaggccctcactggcacggaaaagctgatagaaacttacttttccaaaaattaccaagactatgaatatctgatcaacgttatacatgcattccagtacgtgatttacggcacagccagcttcttcttcctatacggggccctcttacttgccgaaggattttatactactggggcagtgcggcagatctag

SEQ ID NO: 131040 - DNA, 372 bp, synthetic construct
  misc_feature 1..372: note = Description of Artificial Sequence: Synthetic coding sequence
  source 1..372: mol_type = other DNA
atgggcttactggaatgttgtgcgaggtgtttagtgggcgcccccttcgctagcctggtcgctacaggcctatgcttttttggcgtggctctgttctgcggatgtggccatgaggcactcacaggcacagaaaagctgatagagacatatttttccaaaaactatcaggactacgaatacctcatcaatgtgatccatgctttccagtacgtgatttacggaactgcatcgttcttcttcctgtatggagccctcctgctcgcggagggcttctatacaaccggagccgtgcgacagatttttggcgattataagacaaccatatgcgggaaaggattatctgctacggtcaccgggggccagaaaggctag

SEQ ID NO: 131041 - DNA, 339 bp, synthetic construct
  misc_feature 1..339: note = Description of Artificial Sequence: Synthetic coding sequence
  source 1..339: mol_type = other DNA
atgggcttgctcgaatgctgcgcaaggtgtctggtcggtgccccctttgcttccctggtcgctacgggcctttgtttctttggggtagccctgttctgcggttgtggccacgaagctctcactgggacagagaagctgattgaaacgtatttctccaagaactaccaggactacgaatacctgatcaacgtgattcacgcattccagtacgttatttacgggactgcatccttcttctttctttacggagccctgctgctggcagagggcttctataccactggcgctgtgagacaaatctttggagactacaaaaccacaatttgcggaaaggggtag

SEQ ID NO: 131042 - DNA, 411 bp, synthetic construct
  misc_feature 1..411: note = Description of Artificial Sequence: Synthetic coding sequence
  source 1..411: mol_type = other DNA
atggggctgctcgagtgttgcgcaaggtgtttagtcggcgccccgtttgcatccctggtcgcaactggcctatgtttctttggcgtggcattgttttgtggttgcggccacgaggcgctgactggcaccgaaaagctgatagagacatatttttctaagaactaccaagattacgagtacctcatcaatgttatacacgcctttcaatatgtaatctacggcactgctagcttttttttcctgtatggcgcactgttgctggccgagggattttataccacgggcgcggtgcgccagattttcggggattacaagacaaccatctgtgggaaaggtttgagtgccaccgtaaccgggggtcagaaaggccgggggtccaggggccagcaccaggcccatagtttggagtag

SEQ ID NO: 131043 - DNA, 438 bp, synthetic construct
  misc_feature 1..438: note = Description of Artificial Sequence: Synthetic coding sequence
  source 1..438: mol_type = other DNA
atggctgattctgaacggctgagcgcccccggctgttgggcagcgtgtaccaattttagtcggactcggaaggggatcttgttgttcgctgagattatcctgtgcctagtgatactgatatgtttttccgcctctacgccggggtatagttcactttccgtaatcgaaatgattctcgcggccatcttcttcgtggtgtacatgtgcgacctgcacacaaaaattccattcattaattggccgtggagcgacttctttaggacattgatagccgccatcctgtacctaatcacatcaatcgtcgttctggtggagaggggaaaccacagtaaaatcgtggccggagtgaaggcgatgggagccgcgcttaaacatcgagccaaaggcctacgctctcagggtccgtttcttccgcttctcttagctgaaatcgtatag

SEQ ID NO: 131044 - DNA, 459 bp, synthetic construct
  misc_feature 1..459: note = Description of Artificial Sequence: Synthetic coding sequence
  source 1..459: mol_type = other DNA
atggcagacagtgagcggttgtcagcgcccgggtgttgggctgcttgcaccaacttctctaggactcgtaagggtatcctgctgttcgccgaaattatcctctgtctggttatcctcatctgtttttcagctagtacccctggctactcatcactatcagtgattgagatgattctggctgctatctttttcgtcgtctacatgtgcgacctgcataccaaaatcccattcatcaactggccttggtcagacttttttcgcacccttatcgccgccatcttgtacctcatcacaagcatagtggtgttagtggaaaggggcaatcattctaagatagttgccggcgtactggggcttatcgcaacgtgcctgttcggttacgacgcctatgtcacgttccccgtgcgtcaacccagacatactgccgcgccaacagacccggcagacggtcctgtctag

SEQ ID NO: 131045 - DNA, 336 bp, synthetic construct
  misc_feature 1..336: note = Description of Artificial Sequence: Synthetic coding sequence
  source 1..336: mol_type = other DNA
atgtctgacgccgcagttgacacatcatccgaaatcactaccaaagatttaaaagaaaagaaggaggtggtggaagaggcggaaaacggaagggacgcccctgcaaatggcaacgcggagaacgaggagaatggggagcaggaggcggataacgaggtggatgaagaagaagaagagggcggggaggaggaggaagaagaagaagagggcgacggtgaggaggaagacggcgatgaggacgaggaggccgagtctgcaactggaaaaagagcagcagaagatgatgaggatgatgacgtggacaccaaaaagcagaagaccgacgaggacgattag

SEQ ID NO: 131046 - DNA, 408 bp, synthetic construct
  misc_feature 1..408: note = Description of Artificial Sequence: Synthetic coding sequence
  source 1..408: mol_type = other DNA
atgcagacatttggacccgcaggtgtggcagcagtcggacgtcgggtggagtcgccggctgacaggcgggccactcgcgcctgccactgtaagctctgccttccagccggaagtctacaagggcttaagggagaagagggtagcgttgaggaggcagaaaatgggcgtgatgcacccgctaatgggaacgcaaatgaggagaacggtgagcaggaggccgataacgaggttgatgaggaagaagaagaaggaggagaagaggaagaggaagaagaggaaggcgatggggaggaggaagacggggatgaagatgaggaggctgaatcagctacgggcaagagggctgccgaggatgacgaggacgacgacgtggacactaaaaaacaaaagaccgacgaggacgattag

SEQ ID NO: 131047 - DNA, 333 bp, synthetic construct
  misc_feature 1..333: note = Description of Artificial Sequence: Synthetic coding sequence
  source 1..333: mol_type = other DNA
atgtcggatgcagccgtcgacacctcaagcgaaattacaactaaggatctgaaagagaaaaaagaggttgtagaggaagctgagaatgggagagacgcccctgctaacgggaacgctaacgaggaaaacggcgagcaggaggcagacaatgaagttgatgaggaagaagaagaaggcggtgaggaagaggaggaagaagaggagggggatggggaagaagaggatggcgacgaagacgaggaggctgagagtgcaacaggaaagagggccgccgaggatgacgaggatgatgacgttgacacgaagaagcagaagacagatgaagatgactag

SEQ ID NO: 131048 - DNA, 3714 bp, synthetic construct
  misc_feature 1..3714: note = Description of Artificial Sequence: Synthetic coding sequence
  source 1..3714: mol_type = other DNA
atggactctggagccgggggacgcagatgtcccgaagcggctctgctgattctgggcccaccgaggatggaacatttgaggcacagtcctggccctggcggccagagattgctgctgccctccatgctgctcgctctcctgctcctgctggccccctctcccggccatgctacaagggtcgtttacaaggtgcccgaagagcagccccccaatactctgataggcagtttagccgctgattacggctttcccgacgtgggacacctgtacaaactggaggtcggcgccccctacctacgcgttgacggcaaaaccggggatatttttacgactgagacttctatcgaccgggaagggctgcgggaatgccaaaaccaactgcccggtgacccatgcatcctggagttcgaggttagcatcactgatcttgttcaaaatggaagcccaagactgctagaaggccaaatagaagtacaggacatcaatgataacacaccaaacttcgctagtcccgtcatcaccctggctataccagaaaatactaacattggaagcctttttcccatccctctcgcatcagaccgagatgccggacccaacggtgttgcctcttacgagctgcaggcaggaccagaggcacaagagttatttggcctgcaggtggcagaagatcaggaagaaaaacagccccagttgatagtcatgggtaatctggaccgagaaaggtgggactcctatgatctgacaatcaaagttcaggacgggggatcaccccctagggcctccagtgcgctgctgcgtgtaacggtgctggatacaaacgataatgccccaaaattcgagagacccagctacgaggcagagctcagtgagaactcgccaattgggcattcggtgatccaggtgaaagccaacgattccgatcaaggcgcaaacgcggagattgagtacaccttccaccaggcccccgaggtcgttcgaagattactccggcttgatcgcaatacgggattgatcacagtccaaggacccgtcgaccgcgaagatctatctactttacgcttctcagttctggccaaagaccgtggcaccaaccccaagagtgcacgtgcacaggtcgtcgttacagtgaaggatatgaatgataacgcacccactatcgaaatccgcgggattggcctcgtgacacaccaagatggaatggccaacattagcgaggacgtggccgaagaaaccgcagtggccctggtccaagtgtccgatagggacgaaggtgaaaatgcagccgtgacatgcgtcgtggcaggtgacgtgccatttcagctgcgccaggcctcggagacaggcagcgatagtaagaagaagtatttcctccagactacaaccccattagattatgagaaagtgaaggactacacaattgagatagtcgccgttgactccggcaaccctccgctctccagtacaaatagtcttaaggtgcaggtcgtggacgtaaatgacaacgcacccgtgttcactcagtctgtgaccgaggtcgcattccccgagaacaacaagccaggggaggtgatcgctgagatcaccgcctccgatgctgactcaggctctaacgccgagcttgtctactcactcgaaccagagcccgcagcaaaggggctattcactatctcgcctgagaccggagagatacaggtgaaaacgagcctggaccgggaacaaagggagtcatacgagctgaaggttgtcgcggcagaccggggtagccctagcctacaaggcaccgccacagtgctagtgaatgtgctggactgtaatgacaacgacccaaaattcatgctgagtgggtataacttttcagttatggaaaatatgcctgccctctcaccagtgggaatggtcaccgtgattgatggggacaagggtgagaatgcacaggtacaactgtcggtagaacaggacaacggcgatttcgttattcagaatggcacgggcaccattctgtctagcttgagttttgacagggaacagcagagcacttatacctttcagctcaaggccgtagacggtggggttcccccgaggtccgcatacgtaggtgtgacaataaacgtgttagacgagaatgataacgccccttacattaccgcacccagcaacacttcccataaattactcacccctcaaacccgccttggagagacagtgtcccaagttgctgctgaggacttcgactcaggcgtcaatgccgagctcatctacagtatcgcgggagggaacccttatgggttgtttcagatcggctctcacagtggcgcaatcactttagagaaggaaatcgagaggagacaccatgggctgcacaggttggtggtcaaggtttcagatcgtggtaagccaccccgatacggcacagcgctggtgcacctatacgtgaatgaaacacttgcgaatcgaaccctgttggagacgttgctgggccactcattagacacccccctggatattgacatcgcaggcgaccctgaatacgaaagaagtaaacagcgggggaatatcctgtttggagtcgtggccggcgttgtggccgtggctctgttgattgccctggccgtgttagtgaggtactgcagacaaagggaggctaaatccggctaccaagcgggcaaaaaggaaactaaggacttatatgcgcccaaacctagcggaaaagccagcaagggcaataaatcaaaggggaagaaaagtaagagcccaaagcccgtgaagccagtggaggacgaggacgaggcaggcctgcagaagagtcttaagttcaaccttatgtcagacgcccctggtgattccccccgaatccacctgccactgaattatcctccaggttccccagacctcggcagacattatcgtagcaattctccgttgccctcaattcagctgcagccccagagtccgtcagcctccaagaaacaccaggtggtgcaggatctccccccagccaataccttcgtggggaccggcgacaccacatccacaggctccgagcagtattctgactacagctacagaacaaaccccccaaaatatccatctaaacaactgccgcaccgacgagttacgttttcagccacatcccaagcccaggaactgcaggatcccagccagcacagttattacgatagcggactggaagaatcagaaactccctccagcaaatcttcgtccgggcccagactgggcccgctggcactgccagaagaccactatgagcgcactaccccagacgggagcataggtgaaatggagcacccagaaaacgatctcagacctttgccggatgttgccatgaccggcacctgtaccagggagtgcagtgagtttgggcactccgacacctgctggatgccagggcagtcatcaccttcccgtcgcaccaagtcctcagccctaaagttgtcaacattcgtgccctaccaagacagaggcggccaggaacccgctggagcgggatctccttcaccaccagaagaccggaatacaaagacggctcccgttcgcttgctgccttcttattcagcattttcccatagcagccatgatagctgcaaagacagtgccactctggaggagataccgcttacgcaaacaagcgactttccccctgctgccactccggcaagcgcacagactgccaaaagagaaatttacttatag

SEQ ID NO: 131049 - DNA, 3183 bp, synthetic construct
  misc_feature 1..3183: note = Description of Artificial Sequence: Synthetic coding sequence
  source 1..3183: mol_type = other DNA
atggacagcggagctggcggaagaaggtgcccagaggctgctctcttaattcttggccccccaagaatggaacatctgcgccactcacccggccccggtggtcagcgactgctgctgccgagcatgctgcttgcactgttgttactgttggcaccttctccgggacatgctacaagagtcgtctacaaggtgccagaggaacagcccccaaacactctgattggatccttggccgccgactatgggtttcccgatgttggacacctctataagttggaagtgggagccccgtaccttcgagtggacggcaagacgggcgacattttcacaaccgaaacaagcattgaccgggaaggcctcagggagtgccaaaatcagctacccggagacccctgcatcctggagtttgaggtcagtatcacagatttggtgcagaacgggtctccgcgcctgctggagggccagattgaggtccaagacatcaatgacaacaccccaaacttcgctagccctgtcattaccctcgcaattccagaaaacactaacattggttccctctttccaatcccactggctagtgaccgcgatgcaggtcctaacggcgttgcctcttatgagctgcaggcgggccccgaggcacaggagttatttggtttgcaagtggctgaggatcaagaggagaaacagcctcagctaatagtcatggggaatctggatcgggaaaggtgggattcatacgacttaaccattaaggtgcaggatgggggttctcctccacgcgcttcatctgcacttctccgcgtgactgtactggataccaatgacaatgctcctaagtttgagcgacccagttatgaagctgagctttcagagaacagccctatcggacacagcgtgatccaggtgaaggcaaacgattctgaccagggcgccaacgcagagatcgaatacacattccaccaggcaccggaagtggtgagaagactgttacgccttgaccgtaacacaggcctgattactgtgcaaggcccggtcgacagagaagacctatctactctccggttttcagtgctagcaaaggaccgcggcactaaccctaaatctgctcgagcacaggtggtggtcacggtaaaagacatgaacgacaatgcccctacaatcgagatacgtgggatcggccttgtgacgcaccaggatgggatggctaatatcagcgaggacgtagctgaggagacggccgttgcattggtgcaggtcagtgacagggacgagggtgagaacgcagccgtgacctgcgttgttgccggggacgttccgttccagctgaggcaggccagcgaaactggaagcgacagtaaaaagaagtacttcctgcagactacaacgcccctggactatgagaaggtcaaagattataccattgagattgtggcagttgactctggaaaccctccactgtcctccaccaattcgctgaaggtacaggtggtggacgtcaatgataatgccccagttttcactcagtccgtgacagaagtggccttcccagaaaataataaaccaggagaggtaatagccgagatcactgcctctgatgctgattcgggatccaacgccgaactggtctattctctggagcccgaacccgcagctaaagggctgtttaccatttcacccgagacaggagaaattcaggtgaagacttcacttgaccgagagcaacgggaaagctatgagttaaaggtggtcgcggccgatcgcggatctcccagtctacaggggactgccacagtactggtgaatgttctggattgcaacgacaacgatcccaaattcatgctgtctggctacaacttttccgtgatggagaacatgcccgcactgtccccggttgggatggtcacggtcatcgacggcgacaaaggggagaatgcccaggttcaactaagcgtagagcaggataacggagacttcgtcatacagaatgggacagggacaatcctttctagtttaagtttcgatcgcgagcaacagagtacgtacacatttcagttaaaagccgtggacgggggcgtgccacctcgctctgcatacgtgggtgttacaattaacgtccttgacgaaaacgataatgccccttacattactgcaccctccaacaccagtcacaagctgctcaccccccagactcgtctgggagagaccgtgtcccaggtggccgccgaagactttgactctggggtaaacgccgagttaatctactccatcgccggtggcaacccctatggcttgtttcaaatcggttctcactcgggagccattacactagaaaaggagatcgagcgacggcatcacggattgcataggttagtagtgaaggtatcggaccgcggaaagccgccccgttatggcaccgcactggttcatctatacgtcaatgagacactggctaatcggacgctgctggaaactctgttgggccactccctggatacccccctcgacattgacattgcgggagatcccgagtatgaacgctccaagcaaaggggtaacatcctgtttggggtggtcgctggggtcgtggccgtggctctgctcattgctctggcagttctggtgagatattgccgtcaacgcgaagcgaagagcggatatcaggcaggcaagaaagaaaccaaagacctctatgcccctaagcccagtggtaaggcatcgaaaggcaacaaaagtaagggcaagaagagcaagagtccaaagccggtaaaaccagtcgaggatgaagatgaagctggccttcagaaaagtctgaagttcaacctcatgtctgacgccccaggagactcccccaggatccacctgcccctgaactacccccctggcagtcccgacctcggccggcactataggtccaatagcccgctgccttctatccagctacagccccaaagtccaagcgcctcgaagaaacatcaagttgtgcaggacttgccccccgccaacacatttgttggcacgggggacactacttcaacaggtagcgagcaatactcggattatagctataggactaacccgccgaagtatccaagtaaacaggtgggacaacctttccagctgtccacacctcaacctctgcctcacccttaccacggggccatctggacggaggtgtgggagtag

SEQ ID NO: 131050 - DNA, 3147 bp, synthetic construct
  misc_feature 1..3147: note = Description of Artificial Sequence: Synthetic coding sequence
  source 1..3147: mol_type = other DNA
atggactccggagctggtggacgcagatgccccgaagcggctctgctgatcttgggtcctcccaggatggaacacttgcgacatagtccggggcctggcggccagcggctcctcctcccatccatgctactggccctgctcctcctgcttgccccttctccaggacatgccactagagtggtgtacaaggtgcccgaggaacagcctccaaacacattgatcggctcactggctgcggattatggctttccagacgtgggccacctgtataaacttgaggttggagccccttatctaagagttgatggaaagaccggggatatctttacaaccgagacgtcgatcgatagggaaggactccgcgagtgccagaatcagcttcccggcgatccttgcatcctggagtttgaggtgtctattacggacctggtccaaaacggtagtccgaggctgttagagggccagatcgaggtgcaagacatcaatgataatactcccaattttgcctcaccagtgatcacactcgccatccctgaaaacactaatatcggctctctttttcctatccctctcgctagtgaccgcgatgccggtcccaacggtgtggcatcctatgagctgcaggttgcagaagaccaggaggagaagcagcctcaactgattgtgatgggaaacctcgacagagagagatgggattcttacgacctgaccattaaggtacaggatggggggagtccacccagggcttccagcgcactgctgagagtgactgttctggatactaatgacaatgcacctaagtttgagagaccatcgtacgaggctgagctttctgagaatagtcctattgggcacagtgttatccaggtgaaggccaacgactcggaccagggagccaatgctgagattgaatacacattccatcaggcgcccgaagtcgtgcggaggctgctgcggctcgatcggaacacaggtcttatcacagtgcaggggccagtggatcgagaggatctcagtacactgcggttctccgtactcgcaaaggaccgcgggaccaatcctaaaagcgctcgcgcccaggtcgtggtgaccgtcaaggatatgaatgacaacgcacccacaatcgaaatacgtggcataggcctcgttactcaccaggatggcatggccaatattagtgaagacgttgccgaggagacggccgtggcattggtgcaggtgagtgacagagacgagggcgagaacgcagctgtgacatgcgtggtggcgggtgatgttccttttcagctcagacaagcttctgagaccggttcagacagtaagaaaaaatatttcctacagaccaccacacccctggactatgaaaaggtgaaagattataccatcgagattgtggcggttgactccggaaaccctcctctgtcaagtactaacagtctcaaagtacaggttgtcgatgtgaatgacaacgctccagtgttcactcagagcgttaccgaagtagcattcccagaaaataataaaccaggagaggtgattgccgagattaccgcctctgatgcggactctgggtcgaatgccgaactggtatactcactcgagcctgaacccgctgcaaagggactgttcaccatcagccccgagaccggtgaaatacaggtgaagacctcactcgatcgtgagcagcgggagagctatgaactgaaggttgtggcagctgacagggggtccccatctctgcaggggacagcgacagttctcgtaaatgtgttggattgtaatgataacgatcccaagttcatgctgtccggctataactttagcgttatggaaaacatgcctgctctctctccagtgggcatggtcacggtcattgacggggataagggcgagaatgcccaggtgcagctatctgtggaacaagacaatggtgattttgtcattcagaacggtaccggcactatcctgagctccctttcattcgaccgggagcagcagagtacatatacatttcaactcaaggcagtcgacggtggcgtacccccaagatctgcctatgttggggtaacgattaacgtccttgatgaaaatgacaatgctccatacatcacagcaccaagcaacacctcacataagctactgactccccaaactagactcggagagacagtcagccaagtggccgcagaggattttgacagcggcgtgaacgcggagctaatatactccattgctggtggtaatccatacggcctgttccagatcggaagtcattccggagcgattaccctggagaaggagattgagaggaggcaccacgggctgcaccgcctagtagtcaaagtgtccgatcgagggaagcctcccaggtacggtaccgcactcgtccacctgtacgtgaacgagacactggccaatagaacgttgctggagaccctgctgggacattcactcgacaccccactggatattgatatcgccggcgacccagagtatgagcgatctaagcaacgagggaacatactgttcggtgttgtggcaggagttgtggccgtggcactgctcatcgccctcgccgtgctcgtgaggtattgccgtcaaagggaggccaaatcaggatatcaagcaggtaaaaaggaaacaaaagatctttatgccccgaagcccagcggtaaagcgtcaaaggggaacaagtcaaaaggcaaaaagtctaagtcccctaagcctgtgaagccggtggaagacgaggacgaagccggccttcagaagtctcttaagtttaatctcatgtccgacgcaccaggtgattcgccccgaatccacctgccgctcaattatcctccgggcagcccagatctgggccgccactaccggtcaaacagcccactgcctagtatccagctgcaaccacagtccccttccgcctccaaaaagcaccaggtcgtccaggatctgccaccagccaatacatttgtaggcacaggagacacaacgtctactggttccgagcagtacagcgactacagttacaggaccaatccacctaagtacccatcgaagcaggtcggccagccattccagctgagcacacctcaacccctacctcacccatatcacggcgcgatatggaccgaggtttgggaatag

SEQ ID NO: 131051 - DNA, 3117 bp, synthetic construct
  misc_feature 1..3117: note = Description of Artificial Sequence: Synthetic coding sequence
  source 1..3117: mol_type = other DNA
atggagcacttacgtcacagcccaggccctgggggacagaggctcttgttgccaagcatgttgttagcactcctgctcctactggctccttcacctggacacgctacacgagtagtgtacaaggtgcccgaggaacagcccccaaataccctgatcggaagtctcgccgcagattacggatttcccgatgttggtcatctctataagttggaggtgggggcgccatatctacgagtagatggaaaaactggagacatatttacaactgaaacttccatagaccgcgaaggactgagggaatgccagaatcagctgccgggtgacccgtgtatcctcgaatttgaggtgtccataactgatcttgtccagaatgggtcccctcggctgctcgagggccagatcgaggtgcaggatattaatgataacacaccgaacttcgcaagtcccgttataacgttggccatccctgagaacaccaatattggctcgctttttccaatcccgttggcctccgaccgcgatgcaggccccaacggcgtagcatcctacgaattgcaggctggccctgaggcgcaagagctgtttgggctgcaggtggccgaggaccaagaggaaaagcagcctcagctgatcgtcatggggaatctggaccgggagcgatgggattcctatgatctgacgataaaagtgcaggatggcggtagtccacctcgcgccagtagcgctttgctacgtgtgaccgttctggatacaaacgacaacgctccaaaattcgaacgcccaagttatgaggcggagttgtcagagaactcccctatcggacattccgtgatacaggtgaaagcgaatgatagcgaccagggtgctaacgccgagattgagtacacattccaccaggccccagaagtcgtccgcaggttactgaggctggacaggaacaccggcctaatcactgtccagggcccggttgacagggaggacctgagcactctgagattttccgtcttggctaaagacagagggacaaaccctaaaagtgccagggcacaggtagtggtgacggtaaaggatatgaacgataatgctcccaccatcgagatacggggcattgggcttgtgacacaccaggatggtatggccaatattagcgaggatgtcgcagaggaaaccgccgttgccttggtgcaagtgtctgacagagacgaaggagagaatgccgcagtgacgtgtgtggtggccggcgacgtgccttttcagcttaggcaggctagcgaaactggctcggattctaagaagaagtactttctgcagactacaacgcccttggattacgaaaaggtcaaggattacaccatcgaaatagtggccgtagacagcggtaatcccccactgagctcaactaactctttaaaggtccaggtcgtcgacgtcaatgataatgcaccagttttcactcaatcagtgacggaagtggcgtttccagaaaataacaaacctggggaagtgatagctgagatcactgcgagcgacgccgacagcggatccaacgcagaactggtgtacagcctggaaccagagcctgcagccaagggtctgtttaccatatcccctgaaaccggagagattcaagtcaaaacttcgctagaccgggaacagagggaatcatatgagctgaaagtggtggctgctgatcgcgggtcaccttcattacagggcactgccacagtgcttgtgaatgtgctggactgcaatgataatgatccgaagtttatgctgagcgggtacaatttttccgtgatggagaacatgcccgctcttagtcctgttggtatggtaaccgttatcgacggtgacaagggggaaaatgcccaggttcagttgtctgtggagcaagataatggagattttgtcattcagaacggcaccggaaccatcctttccagtcttagttttgaccgggaacagcagtccacatatacgtttcagttgaaggccgtcgacggtggtgtgccgcctaggagcgcgtatgtgggcgtgaccatcaacgtcttggacgagaatgataacgccccttatatcacggccccttccaatacttcccacaagttgctgacccctcaaactaggctcggcgagaccgtcagtcaggtggccgctgaggattttgactctggggtgaatgccgagctgatatattccattgccggagggaatccatacggactcttccagatcggatcccacagtggcgctataacactggaaaaagagatagaacgccggcaccacgggctccataggctcgttgtgaaagtctcagaccgtggtaaaccaccaaggtatgggactgcactggtccatctatatgtcaacgaaacgctggctaatagaacattgctggagacactccttggccactcactggatacacctctcgatatcgatatagccggtgatccggaatacgaacggtctaagcagagagggaacatcctttttggcgtggtggctggagtggtggcggtagccctgttaatagctctcgccgtgctcgtccgctattgtaggcaaagagaggcaaaatccggatatcaggcaggaaagaaggagaccaaggacctgtacgcacccaaaccaagtggcaaagcgtccaaaggaaataagtccaaggggaagaaaagtaaatcacccaaacctgtcaaacctgttgaggatgaagacgaagccgggcttcaaaaaagtctgaagttcaacctgatgtcggatgctcctggcgacagtccccgcatccatctccctctcaactaccctcctgggtcaccggatttaggccgccactaccgcagcaactcccccttgccgagcatacagctgcaaccccaatccccttctgcgtcgaagaaacaccaggtcgtccaggacctgccccctgcaaatacttttgtgggtaccggagacactacatcaaccgggtccgaacagtactcggactacagctatcgaacgaatcccccaaaatatccatcaaaacaggtggggcagccctttcagctgagtacgccgcagcccctgccacatccctaccacggcgccatctggactgaggtgtgggaatag

SEQ ID NO: 131052 - DNA, 3123 bp, synthetic construct
  misc_feature 1..3123: note = Description of Artificial Sequence: Synthetic coding sequence
  source 1..3123: mol_type = other DNA
atgatagtgctgcttttgtttgcattgctttggatggtggaaggcgtcttttcccagctacactacacggtgcaggaggaacaggagcacggtaccttcgtgggcaacatcgcagaggatctgggcctggacataactaaactctcagctcgaggatttcagaccgtgcccaactcacgaacaccctatttggatttgaacctggaaacgggtgtcttatacgtgaacgagaagatcgatcgcgagcaaatctgtaagcaaagtccgtcttgcgttcttcatctggaagtgttcctggaaaatcccctcgaactgtttcaagtcgaaattgaagttttagacattaatgataatcctccgagttttcccgaacctgatctgactgtggaaatatccgagagtgcgacccctggtactagatttcctctcgagagtgccttcgaccccgacgtaggcaccaacagcctgcgggattatgagatcactccaaactcgtatttctccctggatgtgcagacccagggggatggcaaccgctttgccgaattggtgctcgagaaacccctggatagggaacagcaggctgttcatcggtacgtgctcacggccgtggatggggggggcggaggtggcgtgggagagggagggggcggcggcggcggggcaggccttccgccgcagcagcagaggactggcaccgcactgttgaccattagggtcctggactccaatgataacgtacccgccttcgaccagcctgtgtataccgtctccttgcccgagaatagccctcccgggaccctcgttattcagctgaacgccaccgacccagatgaagggcaaaacggggaagtcgtgtattcattttcgtcacatatctctcctagggctcgagaactgtttggcctcagcccacgaaccgggcgcctcgaagtgagcggggagctcgattacgaagagagtcctgtctaccaggtctatgtgcaggctaaagacttgggtcccaacgctgtgcctgctcactgcaaagtgctcgtgagggtgctcgatgccaacgataatgctccagagatcagcttctcaacagtcaaggaggccgtctcagaaggagccgcccccgggaccgtcgtggcactgtttagcgtcaccgaccgcgactctgaagagaacgggcaagtgcagtgtgaactcctgggagatgtgccctttagattgaagtcatcattcaaaaactactatacaatcgtcactgaagccccgcttgatagagaggccggggacagctacaccttgactgtggtggcccgagatcgtggagaacccgcactgtcgacgtcgaaaagcatccaagtccaggtttctgatgtaaacgataacgccccgaggttttcgcagcctgtgtatgatgtttacgtcaccgaaaacaacgtgccaggtgcctacatctacgccgtgagcgccaccgaccgcgacgagggcgccaacgctcagctggcatactctatacttgaatgccagattcagggtatgtcggttttcacatacgtcagcatcaatagcgagaacggctacctgtacgcactgcgtagcttcgattatgagcagctcaaggacttctcatttcaggtcgaggccagggacgccggtagcccacaggcgctggccgggaatgccaccgtgaatatcttgatcgtggaccagaatgacaatgcccccgccattgtggcccctttgccaggacggaatggcaccccagcccgggaggttctacctagatctgcagagccaggctatttgctcacacgggtggccgcagttgatgctgacgatggagaaaacgcaaggctgacatattccattgtacgcgggaacgagatgaacctgttccggatggactggaggaccggggagttgcggaccgctaggcgcgtccctgcgaaacgcgatcctcagagaccttacgaacttgtcattgaagtgcgcgatcatggtcagccccctctctcctctaccgccactttagtggtacagctagtagacggggctgtcgagcctcagggcggggggggctccgggggggggggctctggcgaacaccagaggcctagcaggtcaggcggcggcgagacttcgcttgacttgacattaatcctgataatcgcgcttgggagcgtatccttcatttttctcctggcaatgatcgttctcgctgtgaggtgccaaaaggagaagaagttgaatatttacacgtgcctggcctccgattgttgcctctgctgctgttgctgcggcgggggggggtctacctgttgtgggcgccaggcacgggctaggaagaaaaagctcagcaagtctgatatcatgctcgttcagagttcaaacgtgccttccaatcccgctcaagtaccaattgaagaatcagggggcttcggtagccatcatcacaaccagaactactgctatcaagtctgtctcactcccgagagcgccaaaacggacctcatgtttctgaagccctgcagccccagccgaagcactgatactgaacataatccatgcggagcaattgtgaccggatatacagatcagcagcctgatatcattagtaatggatccatcctgagcaatgagactaagcaccagagggcagaactttcatatctggtagaccggcccagacgggttaactcaagcgccttccaagaggctgatatcgtctcatctaaggacagtggacacggcgactcagaacaaggcgattcggaccacgacgcaacaaatagagcacaaagcgcgggcatggacttatttagcaattgtactgaagaatgcaaggctttaggtcattccgacaggtgctggatgccgtcctttgtgcccagcgatggcaggcaggccgccgactacaggtctaacttgcacgtgcctggcatggacagcgtgcctgatacggaagtgtttgaaacacccgaagcacagcccggggcagaacggtccttctccactttcggcaaagaaaaggcattgcattccaccctcgagcggaaggaactcgacggattgctgactaatacccgcgcaccctacaagccaccctatctgacacggaaaaggatctgctag

SEQ ID NO: 131053 - DNA, 3123 bp, synthetic construct
  misc_feature 1..3123: note = Description of Artificial Sequence: Synthetic coding sequence
  source 1..3123: mol_type = other DNA
atgatcgtgcttttactcttcgccctgctttggatggtagagggggttttctctcaattacactacaccgtgcaagaggagcaggagcacggaacattcgtcgggaatattgctgaagatctgggtttggatattacaaaattatcggcccgaggatttcagacagtgcctaactccagaaccccatacctggacctcaatctggaaacgggggtcttgtacgtgaatgaaaagattgatcgggaacagatctgtaagcagtctcccagttgcgtactccacttagaagtgttcctcgagaaccctctggagctattccaggtcgagatcgaagtgctggacatcaacgataaccccccttcctttccggagcccgatctgacagtcgaaatctccgaatccgctactcctgggactcggtttcccctggagagcgcttttgaccccgatgtgggtaccaactctcttcgcgactatgagattacacctaactcctatttcagtctagatgtgcagacacagggcgatggcaatagatttgcggaattggtgctagaaaagccactggatcgagagcagcaggcagtgcataggtatgtactgaccgcagtcgacggggggggcggaggaggcgttggcgaaggaggaggcggggggggcggagcaggcttacccccccaacagcagcggaccggaacagctcttctgactattcgcgttcttgacagcaacgataatgtgccggcattcgaccagccagtttacacagtgtcccttcctgagaattccccccccggaactctcgtgatccagttaaatgctacagatcccgacgaagggcagaacggtgaggtggtctactccttctctagtcacataagtcctagggcgcgcgagctgttcggactctctccgagaactggtcgcctcgaggtgtcaggagagctggattacgaagaatcccccgtataccaggtatatgtgcaggccaaagacctagggcccaatgcagtgcctgcccattgtaaggtgctagtccgtgtcctggacgccaatgacaatgcccccgagatttcatttagcaccgtgaaagaggcggtctctgagggcgcagctccgggaactgttgtggccctcttcagcgtgacggacagggacagtgaggagaacggacaggtgcagtgcgagttgttgggcgacgtaccgttccgcctaaagagctcttttaaaaattattacacaattgttacagaagcaccgctagatagggaggccggcgattcctatacactgacagtggtcgccagagatagaggcgagcctgcactgtcaacatctaagagtatacaggtccaggtgagtgacgtgaacgacaacgctccccgcttttcccagccagtatatgatgtgtacgttacagaaaacaacgtgccaggggcatacatctatgccgtgagtgctactgaccgggatgagggagctaacgcacagctagcctactcaatcctggagtgccagatccagggcatgtctgtttttacctacgtttctatcaactcagaaaatggttacctctatgcgctccggagctttgattacgagcagctgaaggacttttcctttcaggtggaggcaagggatgccggatcaccacaggctcttgcagggaatgctacagtgaacatactcatcgttgatcagaacgacaatgctcccgctatcgtcgctccactcccagggagaaacggaaccccagcacgagaagttctgcctcggagcgcagaacctggctatctgctgacacgagtcgcagctgtggatgctgatgatggcgaaaacgccaggctgacatactctatcgtgcgcggtaatgaaatgaacctgtttaggatggattggaggacaggggagctgcgcacggcccgccgcgtgccagccaagcgcgacccccaaagaccttacgagctcgtaatagaggtacgggaccacggccagccacccctgtccagcaccgccacattagtggtgcagctggtcgacggcgccgtggagccgcagggaggagggggctctggtggcggcggtagcggggagcaccagcggccttcccgcagtgggggcggcgagacatcacttgacctgactcttatcttgatcattgcattaggctccgtctcgtttatcttcctcctcgcaatgattgttctcgcagtcagatgtcagaaagaaaaaaagcttaatatttatacttgtttggccagtgactgttgtttgtgttgctgttgctgtggcggcggtggttcaacgtgctgcggtcgacaggcacgtgccagaaaaaaaaagctttctaagtccgacataatgttagtgcagtcgtctaatgtaccgtctaatccagcccaagtacccatcgaagagagcggcggcttcgggtctcaccatcacaaccagaactactgttatcaggtgtgtcttacccccgagagcgcaaagaccgacctaatgtttttgaagccctgttcaccaagtcggagtaccgacacagagcataacccatgcggcgctatcgtgacaggctataccgaccagcagcccgacattataagcaatggatccattctatcaaatgaaacaaagcaccagcgcgcagagttgagctacttggtggatagacccaggcgcgtgaactctagcgcatttcaagaggccgacatcgtgtccagtaaagattcaggacatggggacagcgagcagggcgattccgatcacgatgcaacaaatcgagcccagtccgcagggatggatctctttagcaactgtaccgaggagtgtaaggcattggggcattctgacaggtgttggatgccctcgtttgtcccttcagatggtcggcaagctgccgactaccgtagcaacctgcatgttcctggaatggacagcgtgcctgatacagaggtattcgaaactcctgaggcacagcctggcgccgaacgctcattttccacttttggcaaagaaaaggctctgcactctacattggagcgcaaggaattggacggcctgttaactaatacccgcgctccctataagccaccatatttacgcaaaaagcagaggtgttag

SEQ ID NO: 131054 - DNA, 3933 bp, synthetic construct
  misc_feature 1..3933: note = Description of Artificial Sequence: Synthetic coding sequence
  source 1..3933: mol_type = other DNA
atggatctgctttctgggacgtatatctttgcagtgctgctggcttgtgtggtgtttcacagcggcgcgcaggagaaaaattatacaatccgcgaagagatgcccgagaacgtcctaattggcgatctgctcaaagacctaaatctgtctttaatccccaacaagtcccttactaccgcgatgcaattcaaattggtgtataagacaggcgatgttccgttgatcagaattgaggaggacacaggcgagattttcacaacaggcgctagaattgatcgcgagaagctctgcgcaggaatacccagagacgaacactgcttctacgaggtggaggttgctatcctccctgatgaaatttttcggttagttaagatccgattcttgattgaggatatcaatgataatgctccactcttccctgccacagtgataaatatctccatccctgaaaatagcgctattaatagcaaatacactctcccagcagccgtggaccctgatgtcggaatcaacggagttcagaactacgagttgatcaagtctcagaacatcttcggactcgacgtaatcgagacaccagagggagataagatgccccagctcattgttcagaaggagctggatcgggaggagaaagacacatatgtcatgaaggtcaaagtagaggatgggggatttcctcagagatcttctactgctattctgcaggtgtctgtcacagatacaaatgataaccacccagtgttcaaggagaccgaaatagaagtgtcaattcccgaaaatgcacctgtgggtacttccgtcacacagctccacgccacagatgcagatattggggagaacgcaaagatacacttctcatttagtaacctggtgtccaatatcgctaggcggctgttccatttgaatgcaaccactggcctcatcacaatcaaggagccgttggaccgcgaagaaacgccgaatcacaaattactggtgctggcatccgacgggggattgatgcctgctagagcgatggtccttgtgaacgtaaccgatgttaacgacaacgtgccaagcatcgacatacgttacatagtgaatcccgtgaatgacacggtggttctgtcggaaaatattcccttgaacactaagattgccttaataaccgtcaccgacaaagacgctgaccacaacgggcgtgtgacttgcttcaccgatcacgaaatcccatttcggctgcgacccgtgttttcaaatcaattcttactcgaaactgccgcttatttggactatgaaagcacaaaggagtatgccataaagctactcgccgctgacgccggaaagccaccactaaaccagtcagccatgctgtttatcaaggtgaaggacgaaaatgataatgccccagtcttcacccagtcatttgtcaccgtgtctatcccagaaaacaactctcccggcattcagctaacgaaggtgagtgccatggacgccgacagtgggcctaacgccaaaattaattatctgctggggcctgacgcaccaccagagttcagtctggactgcagaacaggcatgctgactgttgtgaagaagctggaccgcgagaaggaggacaagtatctgttcaccatccttgctaaggataacggagtgcccccccttactagcaatgtgaccgtgtttgtctccataattgaccagaacgataattcccctgtgtttacacacaatgaatacaatttctacgtgcccgagaatctcccacgacacggcacggtcggcctgatcacagtaaccgatcccgattacggtgataactcagcagtcactctgtctatccttgatgaaaatgacgatttcaccattgactcccaaacgggagtcattcggcccaatatatcctttgatcgtgagaagcaggaatcatataccttctacgtaaaagccgaggatggagggagagtcagtaggtcctcgtcagcgaaagtcaccatcaatgttgttgatgtgaatgacaacaagccggtattcatcgtgccaccctcaaactgtagctatgagctcgtgctgccaagcactaatcccggcaccgtggtgttccaggtcatcgcagtggataacgatacgggcatgaacgccgaagtgcggtattccatagtgggagggaacaccagggacctgttcgcaatcgaccaggaaaccgggaacatcaccctgatggagaaatgtgacgttaccgatctgggcttacatcgggtcctggtaaaagcaaatgacctgggccagccagatagtctgttcagcgtggtcattgtgaatttgttcgtcaacgagtccgttaccaacgccacactgataaatgagctggtgcgaaaaagcaccgaagcgcccgttacacctaatactgaaatcgccgacgtctcctcaccgacctcagattatgtcaagatacttgtggctgcagtggcgggaacaatcacagtagtagtagttatttttataacagccgtagtccgatgtcggcaggccccccatctgaaggcagcccagaagaataagcagaatagtgagtgggcgacacctaatcctgagaatcggcagatgatcatgatgaagaagaaaaaaaagaaaaaaaagcatagcccgaaaaacctcttgctcaacttcgttacaatagaggaaactaaagctgacgatgtggatagcgatggtaatagagttacgcttgacctaccaattgacctggaggaacaaacaatgggcaagtacaactgggtgaccacccctaccacttttaaacccgactctccagatttggccagacattataagtccgccagccctcagcccgcttttcaaatacagcctgagacacccctgaatagtaagcatcacattattcaggagcttcccttggataatacattcgttgcctgcgattctatctccaagtgttcctcatccagttccgatccatatagcgtaagcgattgtggttatcctgtgacaaccttcgaagtccctgtttcagtgcacactaggccatcgcagaggcgcgtcaccttccatttgcccgagggatcacaggagtcatctagcgacggcggactgggggatcatgatgcggggagtttgactagtacttcacacggccttcctttgggctacccccaggaagaatactttgaccgcgccacaccgagcaatagaacagaaggagatggcaacagtgaccctgagtcaacattcatcccccgctcacccacagccgccgaaatcacagtgcagcctacagtggaggaggccagcgacaattgcacccaggagtgcctgatttatggtcactcagacgcctgttggatgccagcctcgctggaccactccagcagtagccaggcccaggcttccgcgctgtgccattcgccccccctatctcaggcttcaacacagcaccactctccaagggtcacccagaccattgccctgtgtcacagccccccagtgacccagaccatagcactctgccactctcctccgccaattcaggtttctgcactacaccattcacctccactggtgcaggccactgcactacatcatagcccgccttccgcccaggcttccgctctgtgttactctcctccgctcgcccaagccgctgccattagccactccagtcctctaccacaggttatcgctctgcatcggtctcaagcacagagttccgtgtcattgcagcaaggttgggttcagggggctgacggtctttgcagtgtggatcagggggtccagggaagtgctacatctcaattttacactatgagtgagaggctgcacccttctgacgactctataaaggtcatcccattgactactttcactccacgtcagcaagcacggcctagtcgtggagatagcccaattatggaggaacatcccctgtag

SEQ ID NO: 131055 - DNA, 4044 bp, synthetic construct
  misc_feature 1..4044: note = Description of Artificial Sequence: Synthetic coding sequence
  source 1..4044: mol_type = other DNA
atggacctgctctcagggacttatatttttgcagttctcctcgcctgcgtggtttttcactctggagctcaggaaaagaattatacaatccgggaagaaatgcccgaaaatgtgctgatcggcgatctgctgaaggatctgaacctgagcctgataccaaacaagtcactgactactgcaatgcagttcaagctagtatacaagaccggggacgttcctctgattagaattgaggaggacaccggcgaaatattcaccacaggggcacggatcgaccgagagaagctgtgtgctgggattcccagagacgaacattgtttttacgaagtggaagtggcaattcttcccgatgaaatcttccgcctcgtgaaaatccgcttcctcatcgaggacattaatgataacgctcccctgttccccgcaaccgtcataaacattagtatcccggaaaattcagctattaattccaagtataccctgcccgccgctgtcgaccctgatgttggcatcaatggcgtacagaactatgagttgatcaagtcccagaatatcttcggtctggacgtgatcgagacgcccgagggggacaaaatgcctcagctgatagtgcagaaggaactagacagagaggaaaaggacacctatgtgatgaaggtcaaggtggaagatggcgggttccctcaacgctcttccaccgctattctccaggtcagcgtcactgacacaaacgataatcaccccgtattcaaagagaccgaaatcgaggtgagtattccggagaacgcccctgtggggaccagcgtcactcagctccacgcaaccgacgctgatattggggaaaatgcgaaaattcacttctccttttctaatttggtttctaatatcgcacggcggctttttcatctcaatgccaccacgggcctcataactatcaaagagcccttggatcgcgaggagacccccaatcacaaactcctagtcttagccagcgatggcggtctgatgcctgcccgcgctatggtgttagtcaacgtgaccgatgtgaatgataacgtgccatctatcgatattcgctatattgtgaatccagtcaacgatactgtagtgctcagcgagaatattccactaaacaccaaaatcgccctgattacagtgactgataaagacgctgaccataacggcagggtgacatgtttcacagatcatgaaatacctttcagactgcgtccagtcttcagtaaccaatttctcctggagaccgcagcatacctcgattatgaatccaccaaagaatatgccatcaagctgctggccgccgacgcaggaaagcctcccctgaatcaaagtgcgatgctgttcatcaaggtcaaggatgagaatgacaacgctcccgtgttcactcagtccttcgtgacagtcagtattcctgaaaataatagcccaggcattcagctgacaaaagtgagcgctatggacgccgatagcgggccgaacgctaaaattaactatttgctgggacctgacgcccctccagaattttccctggattgcaggacaggtatgttgactgttgtgaaaaaattggatcgcgagaaggaagataagtatttgttcaccattctggcaaaggataacggcgtcccccctctgaccagcaacgtgactgttttcgtctcgataatagatcaaaacgacaatagtcccgtctttactcataatgaatataatttttacgtcccagagaatctcccaagacacggcaccgtggggctgataaccgtcaccgacccagactacggtgacaactccgccgttacactcagtatcttagacgagaatgatgacttcaccatcgatagccagactggtgtcatccggccaaacatatcatttgaccgggagaagcaagaatcatatactttctatgttaaggcagaggacgggggaagagttagtcgctccagcagtgctaaggtgactataaacgtggtcgacgtgaatgataataaaccggtcttcattgtcccaccttccaactgtagttatgagctagttttgccatccaccaatccggggaccgtcgtgttccaggtaatcgcagttgataacgatactgggatgaacgccgaggtgaggtatagcatcgtgggaggcaatacccgcgatctattcgccatagatcaagagactggaaacattacactgatggagaagtgcgacgtgacggatctgggattgcacagggtcttggtgaaagccaacgatttaggacagcctgattccctgtttagtgttgtgatcgtgaatttattcgtgaacgagtccgttaccaacgccacactgatcaatgagctggtccggaagagtactgaagcccccgtgaccccaaatacagagatcgctgacgtgtcctccccgacctcagactacgtcaaaattttggtggctgccgtggccggaacaataacagtagtggttgtaatcttcatcactgctgttgtgagatgccgccaagcgcctcaccttaaggcagcgcagaagaacaaacagaactccgaatgggcaacccctaaccctgagaataggcaaatgattatgatgaaaaagaagaaaaaaaaaaagaagcacagccctaagaatcttcttcttaattttgtgaccattgaagagaccaaggctgacgatgtggacagcgacggcaatagagttaccctggacctgcccattgacctggaagagcagacgatgggcaaatataattgggtcacaacaccgaccacctttaaacccgattcaccagacttggctcgccactacaagtcggcttcaccgcagcctgcctttcagatacagccggaaacgcccttgaactccaagcaccacattattcaagagctgcccttggacaataccttcgtggcctgcgactctatctcgaaatgctcttcctcctcttcagatccatatagcgtgtccgactgtgggtacccagtcacgacctttgaagttccggttagcgtccatacgagacctcccatgaaagaggtagtccgatcgtgtacaccaatgaaggagtcgacgaccatggagatctggatacatccgcagcctcagcggaagtccgaaggaaaagtagcggggaaatcccaaaggagagtgacctttcatttgcccgaaggatcgcaggaatcttcctccgacgggggattaggcgaccatgatgcaggaagccttactagcactagtcatggactgcccctgggttacccccaggaagaatactttgaccgcgccacgccctctaaccgcactgagggagatggcaacagtgatccagagagcaccttcatcccacggtccccgaccgctgctgagattaccgtacagcccaccgtcgaagaagcatccgataactgcacgcaggagtgccttatttatgggcattctgacgcctgctggatgcctgcaagtctcgaccactccagcagtagccaagcccaggcgagtgcactttgtcacagtcctccgctgtctcaggcatccacacagcaccattctccaagggtgacacagacaatcgctttatgtcacagcccgccggttacacaaaccattgcactgtgccattctcctccccccattcaagtttccgcactgcatcattcaccacccctcgttcaggcaacagccctgcatcatagtcccccgtccgctcaggcgagcgccctgtgctactcaccacctttggcgcaggccgcagcaatcagccattccagcccactaccacaggttattgctttgcacagatctcaggcacaatcttccgtgagcctgcagcaaggttgggtgcagggggcggatggcctctgtagcgtggatcagggcgtgcaaggttctgctacttctcagttctacactatgtccgaacggttgcatcctagcgacgattccattaaagttataccgctcacaacgttcacccctcggcaacaagctcggccatcacggggggatagccctattatggaggagcatcctctctag

SEQ ID NO: 131056 - DNA, 3990 bp, synthetic construct
  misc_feature 1..3990: note = Description of Artificial Sequence: Synthetic coding sequence
  source 1..3990: mol_type = other DNA
atggatctgctgagtgggacctacatctttgccgttctgctggcctgcgtcgtttttcactcgggcgctcaagagaagaattacacaatcagagaagaaatgcccgagaatgtgcttatcggagacttgcttaaagatctgaatctctccctgattccaaataagtcactgaccaccgctatgcagtttaaacttgtctataagaccggcgatgttcctctgattcgaattgaggaggacacaggagaaatttttaccaccggagcacgcatagaccgggagaagctctgtgctgggatcccccgggacgagcattgcttctacgaggttgaggtcgcaattctgcctgacgagatttttcggttggtaaagatcaggttcttaatcgaagacatcaatgacaacgcacctctgttccccgctacagtgatcaacataagcattccggagaacagcgcgattaacagcaagtacacactaccagccgcagtggacccggatgtcggtatcaacggcgtgcaaaattacgagcttataaaatcccagaacatctttgggttggacgtgatcgagacccccgaaggggataagatgccacaactcatcgtgcaaaaggagctggatcgcgaggaaaaagatacatacgtgatgaaggtcaaggtggaggatggtggcttccctcagcgatccagcaccgctattcttcaggtgtcagtgaccgataccaatgataaccacccggtgtttaaggagaccgaaatcgaggtgtcaatccccgaaaatgcacccgtgggtacatccgttacacagctgcatgccaccgacgccgacatcggcgagaatgcgaagattcacttcagtttttccaatctcgtttccaatattgcacggcgattattccacctgaacgccacaaccggcctgattacaattaaggaaccacttgatcgcgaagaaacccccaaccacaaactgctggtgttggccagtgacggcggcctcatgcctgcacgagccatggtgctagtcaacgtcacagacgttaatgacaatgtacccagtatcgatattcggtacattgtgaatccagtgaatgacacagtcgttctgtccgaaaacataccgttgaatacaaagatcgctctgatcaccgtcaccgataaagatgcagatcacaacgggagagttacttgttttactgaccatgagataccatttcggctacgccccgtgttcagtaaccaattcttactggagaccgcagcttatctggactatgagagtacgaaggagtatgcaataaaactcctcgctgcagacgccggtaaacctcctttgaatcagtccgccatgcttttcatcaaggtcaaggatgagaatgacaacgcccctgtgttcacccagagcttcgttaccgtgtcaatcccagagaataactctccaggaatccagcttacaaaagtgtccgccatggatgctgactcgggacccaacgcaaaaatcaattaccttctgggcccggatgccccacctgaatttagtctggattgcaggacaggcatgcttactgtggtcaagaagctagaccgggaaaaagaggacaagtatctgtttaccatcctggctaaagacaatggagtgccacctctgacatctaacgtgaccgtgttcgtctccatcatcgatcagaacgacaactcccccgtctttacacataacgagtataatttctatgttcctgagaacctcccccggcacgggaccgtgggcctgatcaccgtcacggacccagattacggcgataatagcgctgtgactttatcaatactggatgagaatgatgacttcaccatcgattcccagacgggcgtcattcggccgaatatcagcttcgaccgcgagaaacaggagtcttacacattttatgtgaaagctgaggatggaggaagagttagcaggagctcctccgctaaagttacgataaatgtcgtcgatgtgaatgacaataaacctgtgttcatcgtgcccccatccaactgtagttacgaacttgtgctcccatccacgaatccgggaacagttgtctttcaggtcatcgccgtcgataatgacacggggatgaacgctgaagtgcggtacagcattgtcggcggaaatacacgtgatctctttgctatcgaccaagagaccggcaacattacactaatggaaaagtgtgatgtgacagaccttgggcttcacagggtcctcgtgaaagccaatgacctgggtcagccagactcccttttttcagtcgtgatcgtgaacctgttcgtgaacgaaagcgttactaatgcaacacttatcaatgaactggttcgaaaaagcacggaggctcctgtgacaccaaatactgaaatcgcagacgtgtcaagtcctactagtgactacgtaaagattcttgtagcggcagtagccggcactattacagtggtggtagttatttttataactgccgtcgtcaggtgcagacaagcccctcatttgaaggctgctcaaaagaacaaacaaaactcagaatgggcaactccaaatccagaaaaccgccagatgattatgatgaagaagaaaaagaagaagaaaaagcattcaccaaaaaacctgctgttaaatttcgtcactatcgaagaaacaaaggctgacgacgttgactcagacgggaacagggtaacattggatttgccaatcgacctggaagagcagaccatgggaaagtacaactgggtgactaccccaacaaccttcaagccagactctcctgatctagctcgacactacaagtctgcttcacctcaacccgcgtttcagattcagcccgagacacctcttaactcaaaacatcatatcattcaggaacttccactggacaacacctttgtggcctgcgactctatttcaaagtgcagctccagtagtagtgatccttatagcgtctccgactgtggctacccagtaacaacattcgaggtgccggtcagcgtacacacccggccccccatgaaggaggtagtcagatcttgcacacctatgaaagaaagcacaaccatggaaatctggattcacccgcagcctcagtcacagaggcgcgtcaccttccatttacccgagggcagccaggagagcagcagtgatggcggactgggcgaccacgacgccgggagcctgaccagtacttctcacggccttccccttggctatcctcaagaggaatactttgatcgggccaccccttctaaccgcacagagggcgacggtaatagtgatcctgagtccaccgccgaaatcacggtgcagcctaccgtcgaggaggccagtgataactgcacacaggaatgtctaatctacggccactctgatgcctgctggatgcccgcgtccttggaccattcctcaagttcccaagcgcaggcctctgccctgtgtcatagtccaccacttagccaggcaagcacccagcatcactcccccagagtgacccaaaccatcgccctctgtcactctccacccgtcacccaaaccattgccctgtgtcattccccccccccgatacaggtgtcagcactccaccactcacctcccctggttcaggccacagccctgcaccactctccaccatctgcccaggcatccgcattgtgttacagtccccccttagctcaggccgccgctatatctcattcaagccccctgcctcaggtcatagccctgcaccgatcccaggcgcagtcttccgtatctctacaacaaggttgggtgcagggagccgacggcctgtgtagcgtggaccagggcgttcagggaagtgcgaccagtcaattttatactatgagtgaacggctgcatccttccgatgactctataaaggtcatccctctgacaacgtttacaccacggcagcaggcccggccttcaagaggtgattcacccattatggaggagcacccattgtag

SEQ ID NO: 131057 - DNA, 3066 bp, synthetic construct
  misc_feature 1..3066: note = Description of Artificial Sequence: Synthetic coding sequence
  source 1..3066: mol_type = other DNA
atggacttgttatcaggcacgtatatattcgccgtgttgttagcctgcgttgtgtttcattccggggcacaagagaagaattacaccattcgagaagagatgcccgagaacgtgctaattggcgacctcctgaaagatctgaacctgtctctgatccccaataagagtctgacaaccgctatgcagtttaaacttgtatacaaaacaggagacgtgcccctgatcagaattgaggaggacaccggcgaaatttttacaactggggcacgaatcgaccgggagaagctttgcgccggaattccccgcgacgaacattgtttctacgaggttgaggtagctatcttaccagacgagatctttcgtctcgttaaaattcggttccttatcgaagacatcaacgacaatgccccactgtttcccgccaccgtgataaacatttcaatccccgaaaactctgcaatcaattcgaagtatacacttcccgcggcagtggaccccgacgtgggaatcaatggcgtccagaactacgaactgattaagtctcagaacatcttcggcttggatgtaatagaaacgcccgagggagataagatgccccagctcatcgttcagaaggagcttgatcgtgaggaaaaagatacttacgtgatgaaagttaaagttgaggacggagggttcccccaaagatcaagcaccgccattcttcaggtgtcggttaccgacaccaacgacaatcaccccgtcttcaaggaaactgaaattgaggtgagcatccctgagaatgctcccgttggtacatctgtcacccagttgcatgcaactgatgctgacatcggggaaaacgccaaaatacacttctctttttctaacttggtatccaacattgcaagacgactcttccacctgaacgcaaccactggactgatcacaataaaagaacccctggaccgcgaggagacccccaaccacaaactgttggtccttgcttctgatggtggtcttatgcccgcaagggcaatggtgcttgtgaacgtgaccgatgtcaatgacaacgtgccaagcatcgatatccgctacattgtaaatccggtgaatgacaccgttgttcttagcgagaatatcccattgaacacaaagatcgctctgattacagtgacagataaggacgccgatcacaatggacgagtgacctgtttcacagatcatgaaattcctttcaggctgcggccagtattctccaatcagtttctgctggaaaccgccgcttacctcgactacgagtcaaccaaggagtatgccataaaactcctggcagctgacgcagggaagcctcccctgaatcaaagcgcgatgctattcattaaggtgaaagacgaaaatgataacgccccagtgtttacacagagtttcgtaactgtctccattcccgaaaacaattctccagggattcagctcacaaaggtttccgctatggacgccgactccggacctaatgcaaaaattaactatctgctagggccggatgctccacctgagttttccctggactgtagaactggaatgttaacggttgtgaaaaagctggatagagagaaagaggataagtacctgttcactattctagccaaagacaacggagtgccacccctcacaagcaatgtgacggtctttgtttccattatcgaccagaatgacaattcccctgtgtttactcacaacgagtataatttttacgtgcccgaaaacctcccaagacatgggactgttggactgatcacagtgactgaccctgactacggggataatagcgcagtaaccctgagcatcctggacgaaaacgacgactttaccattgatagccagacaggcgtgatccggccgaatatctccttcgatcgtgaaaagcaagaatcgtatacattctatgtgaaagctgaggatgggggtagggtttctcgaagttccagtgccaaggtgaccattaatgtggtggacgttaatgacaataagcccgtgttcatcgtcccgccatccaattgttcctacgaactagtgctccctagtactaaccctggtactgtggtcttccaagtcatcgccgtggataatgacaccgggatgaacgcagaggtgaggtattctattgtaggagggaacacacgagacttgtttgccatcgaccaggagacaggcaatattaccctgatggaaaaatgtgatgttactgacctcgggttgcatagagttctagtgaaggcaaatgatctggggcaacccgacagcctgttctctgtcgtaattgtcaatctgtttgtcaacgagtccgttactaacgccacgttgatcaacgagttagtgcggaaatccaccgaagcccccgtcacccctaacactgagatcgcagatgtctcttcacctacgagcgattatgtaaagattctggttgccgccgttgcaggaactattacagtagtggtcgtgatctttataacggccgttgtcagatgcaggcaggctccgcacctcaaagctgcacaaaagaacaagcaaaatagtgagtgggccaccccaaaccctgagaatcggcagatgattatgatgaaaaagaaaaagaagaaaaagaagcacagccccaaaaatctgttgctaaatttcgtgacaattgaagagacaaaagctgacgacgttgacagcgatgggaatagagtaacacttgacctacctatcgatcttgaggagcaaactatgggaaaatataactgggtaacaacgcccactacatttaagccagattcccctgatcttgcacggcattataagtctgcatccccacaaccggcattccaaattcagcctgagactcccctgaactcaaagcatcacatcattcaagaactgcctttggacaatacctttgtagcatgtgattctatatctaagtgttcttccagtagcagcgacccttattctgttagcgattgtgggtacccggtgactaccttcgaggtgcccgtatctgtacataccagaccggttgggattcaggtgtcaaacacaactttttag

SEQ ID NO: 131058 - DNA, 3933 bp, synthetic construct
  misc_feature 1..3933: note = Description of Artificial Sequence: Synthetic coding sequence
  source 1..3933: mol_type = other DNA
atggacctcctgagcggaacttacatctttgcggtcctactggcttgcgtcgtgttccactccggagctcaggaaaaaaactataccattcgcgaagagatgcctgaaaacgtcctgattggtgacctcttgaaggacctgaacctaagcctgataccgaacaaatctctgaccacagctatgcagtttaagctggtgtataagactggggacgtcccgctgattcggatcgaagaagataccggcgagattttcacgacaggtgctcgaatcgatcgggagaaattgtgcgccggcatccccagagatgagcattgcttttatgaagtggaggtggcaattcttccagacgaaatatttcgactggttaagattaggtttctcatcgaagatatcaacgacaacgcacctctgtttccggcaactgtgatcaacatttcaatccctgaaaatagtgccatcaattctaagtacacacttccagccgccgtggaccctgacgtaggcattaatggagtgcaaaattatgagctcattaaaagccaaaacatttttgggctcgacgttattgagacacctgagggagataagatgccccaactgatagtgcagaaggagctagacagggaggagaaggatacatatgtcatgaaggtcaaggtagaggacggggggttcccccagagaagctccacggccatcctgcaggttagcgtgacagacaccaacgacaaccatccagtctttaaggaaacagaaatcgaagtgtctatcccggagaacgcacccgtaggaacctcagtgactcagctccacgccaccgacgcagatattggcgagaatgccaagattcacttttcattctccaatctggtgagcaatattgcccggcgactgtttcatctgaacgcaacaaccggactcatcacaataaaggagcctctggaccgcgaagagactcccaatcacaagcttctcgtgttggcatctgatggagggttaatgccagcccgcgctatggtccttgttaacgtaacagatgtcaatgacaatgtgcctagtattgacatccggtatatcgtgaatcccgtaaatgacactgtcgtgcttagcgaaaacattcctctaaacacgaagattgcactgatcactgtgactgacaaagatgccgaccataatggacgcgtgacgtgcttcaccgaccacgagattccattcaggttgaggcctgtttttagcaaccaatttctgctggaaacagctgcctacctcgactatgagtctacgaaggagtatgcaatcaagctgttggccgctgacgctggcaagccacccttaaaccaaagcgccatgctgttcattaaagtgaaagatgaaaacgataatgccccagtgttcacccaatcattcgtgacagtatcaataccagagaacaatagtccaggaattcagctgacgaaggtgtccgctatggatgcagacagcggcccaaacgctaagatcaactacctgttgggaccagatgcgcctcccgagttttctttggactgcagaaccggcatgttgactgttgttaagaagctggatcgggaaaaggaggacaaatatctgttcaccatacttgccaaagataatggtgtgcctccattgacgtcaaacgtgacagtgttcgtttctatcatagatcaaaatgacaatagtcccgtgtttacacacaacgaatacaatttctatgtgcccgaaaacttgccgagacatggtaccgtcggattgataaccgttacggaccctgattatggcgataacagcgctgtgaccctatccatccttgacgaaaacgatgactttaccatcgattcccagactggagtgattcgcccaaatatatcgttcgatcgggaaaaacaggagtcttacaccttttacgtgaaagcagaggatggtggcagggtaagtaggtcatctagcgcaaaagtgacaataaatgtagtggacgtgaacgacaataagcccgtcttcatcgttccgccatccaactgttcttatgaacttgtacttcctagcaccaacccagggacggtggttttccaagtgattgcagtggacaacgacaccggaatgaatgccgaggttagatattctatagttgggggaaatacacgcgatctgtttgccatagatcaggagaccgggaatattaccctcatggagaagtgtgacgtcactgatctgggactgcaccgggtgcttgttaaagcgaacgatttgggccaacccgatagcctcttttcggttgtgatcgtaaacttgttcgtaaacgaaagcgttacaaacgctacattaattaacgagctggtccggaaaagcaccgaagctcccgtgactcctaacacagagattgctgacgtgagctctcccaccagtgactacgtgaaaattctggtggccgcagtcgccggcacgattaccgtggttgtcgtcatcttcatcacggcagtggttcggtgccgccaggcaccacacctcaaggcagcgcagaagaacaaacagaatagcgagtgggcaacacccaacccggaaaaccgccagatgattatgatgaaaaaaaaaaaaaagaagaagaagcactctcccaagaacctgcttctgaattttgtcactatcgaagaaactaaagctgacgatgtggattcggatggcaatcgtgtgacactggacctgcccatcgacctggaagaacaaactatgggcaaatacaactgggtgaccaccccaaccaccttcaaacctgattcccctgacctagcccgacactacaaatctgcttcaccccaaccggcatttcaaattcagccagaaactccgttaaattctaagcatcatattatacaggagctgccactggataacaccttcgtggcatgcgatagcatctctaagtgttcatcctctagctctgatccatattcggtttcagactgcggctaccccgtgactacctttgaagtccctgtgtctgtgcacactaggccttcacagaggcgtgtaacattccacctccctgaagggtcccaagagagctcttcggacggtggtctgggagatcatgacgcaggtagcttgacgtctacatctcacggcttgccactgggatacccccaagaggaatacttcgatcgggcgaccccaagcaaccggactgaaggcgatgggaacagcgacccagagtcaacttttatacctggattgaagaaggcagcagagataacagttcaacctaccgtggaggaggcatcagacaactgcacacaagaatgcttaatctacggtcacagcgatgcatgttggatgccggccagccttgaccatagctcttctagtcaggctcaagcttccgcgctgtgtcactccccaccactctcccaagcttcaactcagcaccactctccccgggttacccagacaattgcgctgtgccattccccaccagtcacacagactattgcactctgccacagtccacctccaatccaggtttcagcgttacaccattcacctcccctcgtgcaagctacagctctgcaccattcaccacccagtgcacaggcgtcagccctgtgctattcacctcctctcgcccaagcagctgccatcagccatagtagccctctgcctcaagtaattgccctacatcggtcacaagctcagagctctgtttccctgcaacaaggttgggtgcagggtgctgacgggctctgcagcgtcgaccagggagtccaaggctccgctacgagccagttttacacaatgagcgagcgactgcatccctccgatgactctattaaagttattccattgacgacttttacaccaagacagcaggcccgcccttcacggggagactctcccataatggaagagcaccccttgtag

SEQ ID NO: 131059 - DNA, 4044 bp, synthetic construct
  misc_feature 1..4044: note = Description of Artificial Sequence: Synthetic coding sequence
  source 1..4044: mol_type = other DNA
atggacttgttgagtgggacttatatattcgcagtgctccttgcttgtgtggtattccactccggagcccaggaaaagaactacacaatcagggaggagatgccggaaaacgtgctgatcggcgacctccttaaagatctcaacctcagccttatcccgaacaagtccctgaccacagctatgcagttcaagctggtgtacaaaaccggcgacgttccccttataaggatcgaggaggatacgggtgagatatttaccactggtgccaggatcgacagggagaagctctgtgcaggaatcccacgtgatgagcattgtttttacgaggtcgaggtggcaattctgcctgatgagattttcaggcttgttaaaattcgcttcctgatcgaggatataaacgacaacgcacctcttttccccgccacagtgataaatatctctatccccgagaattccgcaatcaactcgaagtacacactccccgctgcagtagaccccgacgtcggtatcaacggtgtccagaactacgaactgatcaagagccagaatatttttggtctcgatgtgatagagacacctgaaggcgacaaaatgccccaactcatcgtgcaaaaagagcttgatagagaggagaaggatacatacgtgatgaaggtgaaggtggaggatggggggtttccccaacgatctagcactgcaattctccaggtatctgttacagataccaatgacaaccatcccgtcttcaaggagaccgaaattgaagtgagcattcccgagaatgcgccggtgggtacgagcgttacacagttgcacgccacggacgcggatattggcgaaaatgccaaaatacactttagcttctctaatttagtgtctaacattgccaggagactgtttcacctgaacgctaccactgggctgatcaccatcaaggagccgctggaccgcgaggagaccccgaatcacaaactcctggtgctggcgagtgatggtggtttgatgcctgcccgtgcaatggtgctcgtgaacgtgacagatgttaacgacaatgtgccctctatcgatatacggtatatcgtgaatcctgtgaacgatactgtcgttctttcagagaatattccattgaatacaaagattgctctgatcactgtgaccgataaggacgcagatcacaacggccgagtcacgtgttttacagaccatgagatcccattcaggttgcggccggtcttttcaaaccaattcctactagaaactgccgcgtatctggattacgagtcaactaaagagtacgcgattaagctcctggctgcggacgccgggaaaccccctctaaatcaatcagccatgctgtttatcaaagtgaaagatgaaaatgataatgcccctgttttcacccaaagctttgtgaccgtttctatcccagagaacaatagtcctgggattcaacttacgaaagtaagcgcgatggacgcggacagcggcccaaacgctaagatcaactacctcctcggtcctgacgcaccccctgaattctctctcgactgccggaccggcatgctaactgtggtcaagaagctagaccgagagaaagaagataaatatctctttaccatcctcgcaaaggataacggcgtccctccactgactagcaacgtgacagtgttcgtgtcaatcatcgaccagaacgataacagccccgtttttacacacaatgaatataatttctacgtgcctgaaaacctgccacgccacggcacggtggggttgattaccgtgaccgacccagactatggggacaatagtgctgttacgttgtccattcttgacgaaaacgacgatttcacaatcgatagtcaaacgggagtaatccggcccaatatcagctttgatagggagaagcaagagtcatatactttttatgttaaagcagaggacggaggaagagtgagcagatcgtcatcagctaaggtgaccatcaatgtcgtggatgtgaacgacaataagccagtgttcattgttccccctagcaattgttcctacgaattagtgttgccatcgacaaaccctggaaccgttgtgttccaagtgattgccgtcgacaacgacaccgggatgaacgcagaggtacgctattccatcgtcggaggaaacacaagggacctttttgcaattgaccaggagacaggaaacattactctgatggaaaagtgtgacgtcactgatcttggtctgcaccgggtgctcgtgaaggctaacgatctgggccagccagactctctgttctcagtagtgatagtgaacctgtttgtgaacgaatcagtcaccaacgctacactgattaacgaactggtgaggaaaagcacagaggcgcccgtaacaccgaacacagagattgccgatgtctcatcgcccacctcagactacgttaagatactagtggcagcggtcgctggtacgatcacagttgtcgtcgtgatatttattactgccgtggtgcgttgccgacaagctccacacctcaaagcagcacagaagaacaaacaaaactcagaatgggctactcctaatcctgaaaatcgacagatgattatgatgaagaagaagaagaagaaaaaaaagcatagccccaaaaacttgctgctgaactttgtaaccatcgaggagacaaaggcggacgatgtcgatagtgatggaaatagggtcactctcgatctcccaattgatctggaagaacagactatgggaaaatataattgggtcactacaccaaccacttttaaaccagatagcccagacctagccagacactacaaaagtgcgtctccacagcctgcctttcagattcaacctgaaacgcctctgaactccaaacatcacataatccaggagctgccccttgacaatactttcgtggcctgcgacagcatcagcaaatgcagcagttctagcagcgacccctactccgtaagtgattgtggctaccctgtgaccacctttgaggtgcccgtgtccgtgcacactaggccccccatgaaggaggttgtgagatcctgtactccaatgaaagagtcgactaccatggagatttggatacatccacagccacagagaaaaagtgaaggcaaagtcgccggaaaaagccagaggcgagtcactttccacttgccagaaggtagccaggagtcatcctctgacggagggttgggtgaccatgacgctggaagcctgaccagcacatctcacggcctccccttaggatacccccaagaggagtatttcgatcgtgctacaccctctaaccggaccgagggcgacggcaattcagaccctgagtccacctttatccctggtctgaagaaagcagcagagattacagtgcagcccactgttgaggaagcttctgacaactgcacccaggagtgcctgatctacggacattcggatgcatgttggatgcccgctagcttggatcactcatcaagcagtcaagctcaggccagtgccctctgtcattcccccccattgtctcaggctagcacccagcaccactctcctcgggtgactcagaccattgcgctgtgtcattccccccccgtgacccagaccatagctctatgtcactcccctcctccaattcaagtgtccgcactgcaccatagccccccactggtgcaggctacagcactgcatcatagtccccccagcgcacaggcatccgctctatgctactcccctcctctcgcccaagcagctgccataagccactccagccccctgccgcaggtgatcgcattgcacaggtcgcaagctcagtcttctgtgagcctccagcaggggtgggtccagggcgcagacggactttgttccgtagatcagggtgtacaagggtcagccaccagtcagttctataccatgagcgagcggctgcatccaagcgacgacagtattaaggtcatccctctgactaccttcactcctcggcagcaggctcgcccctcccgtggtgactctcccattatggaggagcaccctctttag

SEQ ID NO: 131060 - DNA, 4014 bp, synthetic construct
  misc_feature 1..4014: note = Description of Artificial Sequence: Synthetic coding sequence
  source 1..4014: mol_type = other DNA
atggacttgctctccggcacttacatcttcgctgtgctgctagcctgcgtcgttttccactctggagcccaggaaaaaaactacaccatcagggaggagatgccagaaaatgtgttaattggagacctcctgaaagatctaaatttgtcgctcatcccaaacaagtccctaaccaccgctatgcagttcaagctagtgtataagaccggggatgtccctctcatcaggattgaagaagatacaggagaaatatttactactggggcccggattgacagggagaagctgtgtgccggtattccaagggatgaacactgcttttacgaagtggaagtggcaattcttcccgatgaaatctttaggttggtgaagattagatttctgattgaagatatcaatgacaatgcacccctgttcccggccactgtgattaatattagcattcctgaaaatagcgccatcaactcaaaatatacactgcctgccgccgtggatccagacgtggggattaatggggtgcagaactatgaactaattaaatctcagaatatttttggccttgatgtgattgagaccccagagggcgacaaaatgccccagctgatcgtgcagaaagaactcgaccgggaggagaaggatacctacgtgatgaaagtaaaggttgaagatggggggtttccacagcgttcaagcactgcgatccttcaggtcagcgtcacagacacaaacgataatcatcccgtcttcaaagagaccgagatcgaggtctctattccagaaaatgcccccgtgggcacttctgtgactcagctccacgccactgacgcagacataggtgagaatgccaaaatccacttcagttttagcaatctagtctcaaacattgctcggagactgtttcatctcaacgcaacgactggtctaatcacaatcaaggaaccgctggatagagaagaaacacctaaccataagctgctggtgttggcctccgacggcggccttatgcccgcgagagccatggttcttgttaatgtcacagacgtgaacgataatgtgccaagtatcgatatcagatatatcgtgaacccggttaatgataccgtcgtattgagcgagaacatccccctaaatactaaaattgcactgataaccgttactgataaggacgccgatcataacggacgcgtcacatgcttcaccgaccatgaaattcccttccgcctgaggcccgtgttcagcaatcagtttttgctcgaaactgccgcatacctagactacgagagcaccaaagaatacgcaattaaactgctagctgccgacgccggcaaacctccgcttaatcagagcgcaatgttatttatcaaagtgaaagacgagaatgataacgctccagtgtttacacagtcctttgtgacggtttctatcccagagaataactccccaggaatccagctaactaaggtgtcagccatggatgctgactccgggccgaatgctaagatcaattacctgctcggccccgatgcaccgcccgagttcagtctggattgccggaccgggatgctgacggtggtgaagaagttggatcgggaaaaggaggataaatacctgttcaccattttggcaaaagataacggtgtgccgcccttaacttcaaacgttacagtgtttgtgtcgattatagatcagaatgacaactccccagtgtttacccacaacgagtataacttctacgttcctgagaacctgccccggcacgggaccgtgggcttaattacagtgacggatccagactacggggacaattcagctgtcaccttgagcatattagacgagaatgatgattttacaattgactcccagacgggtgttattaggcctaacatttccttcgacagggagaagcaagagtcctacacattttacgtgaaagcagaagatggaggacgggttagtcggagtagctccgccaaagtcactattaatgtcgtagacgtaaatgataataaacccgtgttcatagtcccaccttctaactgtagctatgaacttgtgttaccctcaaccaatcccggtacggttgtattccaggtcatcgctgtagacaacgacacaggtatgaacgctgaggtgcgctatagcattgtgggtggtaatactagggatctcttcgcgattgaccaggaaacagggaatattacattgatggaaaagtgcgacgtgaccgacctgggcctgcacagagtcctggtaaaagcaaatgatcttgggcagcctgattccttgttcagcgtggtcatcgtgaatctgttcgtcaatgagtccgtaaccaatgccaccctgattaatgagctcgtacggaaaagcactgaggcccctgtgaccccgaatacagagatcgcagacgtttcgtcgccgaccagtgattacgtaaagatccttgttgcggcagtagcgggaaccattacagtcgtggttgttatctttataacggccgtcgtgagatgccgtcaggctccgcacttaaaagccgcacagaaaaataagcaaaattcagaatgggctacacctaaccccgagaatcggcagatgattatgatgaagaaaaaaaaaaagaagaaaaagcactcccctaaaaacctcctcttgaattttgtcactattgaggagacaaaggccgatgatgtcgatagcgatgggaacagggtgaccctagatctacccatcgacctggaagagcagacgatggggaagtacaattgggtcacgacccctaccactttcaagcccgattccccagatctggccagacattacaaaagcgcttccccccagcctgctttccaaatccagcccgaaacccccttaaatagcaaacaccatattatccaagagttaccattagacaacacattcgtcgcttgtgacagtataagcaagtgctcctcgagctcctcagacccatacagcgttagcgactgcggctacccagtgacaacgtttgaagtaccggtgtctgtgcacacaagacctcccatgaaggaagtagtgaggtcttgcactccgatgaaagagagcactacaatggagatctggatccacccacagccgcagagtcaacggagagtcacctttcacctccccgagggatcgcaggagtcgagcagcgacggaggcctcggcgaccacgatgccggttctttgactagtacctcccacggcctcccgctggggtaccctcaggaagagtattttgacagggccactccgagcaaccgaaccgagggagacggaaattcagatccggaaagtacattcatacctggattgaagaaggccgctgagattactgtccagccaacggttgaggaagcaagcgacaactgcacccaagagtgtctgatctatggtcactctgacgcttgctggatgcccgcctccctcgatcatagtagctcatctcaggctcaagcctcagctctgtgccactccccacctctgtcacaagcctcgacccaacatcacagcccgcgagtgacgcagactatcgccctatgccactccccgcccgtcacacagactatcgctctctgtcattccccccctccaatccaggtatcagctctccaccacagtcccccactggtgcaggcaaccgcactccaccactcccctcctagtgcccaggcttctgcattgtgttattcacctccactggctcaggcagccgcaatctcacacagctctcctctgccacaggtgatcgcactccataggtcccaagcacagtcttccgtatccctccaacagggctgggtgcaaggcgctgatgggctatgttccgtagatcagggggtccaggggagcgcaacttctcagttctatacgatgtccgaaaggctgcacccatccgacgactcgatcaaagtcatcccgctaaccacatttacgcctcgccagcaggcacgtccaagcagaggggactccccaattatggaagaacaccctttgtag

SEQ ID NO: 131061 - DNA, 3078 bp, synthetic construct
  misc_feature 1..3078: note = Description of Artificial Sequence: Synthetic coding sequence
  source 1..3078: mol_type = other DNA
atggacttactatctgggacatacattttcgcagtgctgttggcatgtgtcgtctttcatagcggggctcaggaaaagaactacaccattcgggaagaaatgcctgagaacgtcctaataggtgacttgctgaaagatttgaacctttcccttattccaaataagagcctgaccaccgcaatgcaattcaaactcgtctacaagaccggcgatgttccacttatcagaatcgaagaggacacaggggagatcttcacgaccggcgcccggattgatagagaaaagttgtgtgccgggatcccaagggacgaacactgcttctacgaggtggaagtggctatcctgccagacgagatttttcgattagtgaaaattcggtttctgatagaagatatcaacgataacgctccattatttcctgcaactgtcatcaacataagcattccggagaattccgccatcaacagtaaatatactttgcccgcagcagttgatcctgacgtcggtatcaatggggtccagaattacgagctgatcaagtctcagaatatctttgggctcgacgtaattgaaactcccgagggcgataagatgccccagcttatcgtgcagaaagaattggatagggaagagaaggatacttacgtgatgaaggtgaaagtcgaggacggaggatttccccagcgttcaagcacggccattctgcaggtctctgtgacagataccaacgacaaccacccagtattcaaggagacagaaatcgaggtgagcatcccagaaaacgcccctgtggggacctccgtgactcaactgcacgctacagacgccgacattggagagaatgcgaagattcacttcagtttttccaatctcgtaagcaacatcgccaggaggttgtttcacctcaacgctactacaggactgataactataaaagaacctctcgatagggaagaaactcccaaccacaagttattagtgttagcaagcgacggtggcctgatgccagcgcgggctatggtgctggttaacgtcactgatgtcaacgataacgtgccttctatcgatatacggtacattgtgaaccctgttaatgataccgtggtcttaagcgagaacattcctctcaacacaaagattgccttaatcaccgtcaccgataaagatgccgaccacaacggaagggtcacatgtttcacagatcatgagatcccgttccggctgcgtccagttttctccaatcagtttttattggagactgctgcctacctcgattatgaaagcaccaaggagtatgccattaaattattggctgcagacgcgggaaagcctcctctcaaccagagcgcgatgctgttcataaaagtaaaggacgagaatgacaatgcgccagtttttactcagagttttgtgacggtttccattccggagaataatagccctggcatccaactcaccaaggtgtccgctatggacgccgatagtggccccaacgcgaaaattaactacctcctcggccctgatgccccccctgagttttccctggactgtcgtacgggcatgttgaccgtggtcaaaaaactcgaccgtgagaaagaagacaagtatctttttacaattctcgctaaagacaatggagtacctccgttaacatcaaacgtgaccgtgtttgtctctataatcgaccaaaatgacaactccccagtattcacccataatgaatataatttctacgtacccgaaaacctcccccgccacggcactgtgggcttgatcaccgtgacggatccagattatggggataactccgctgtgacactgtctatactggacgagaatgacgatttcaccatagattctcagactggcgtcatccggcctaacataagtttcgatagggagaagcaggagtcttataccttctatgtcaaggccgaggacggcgggcgcgtcagcaggtcttcatcagccaaggtaaccattaatgtggtggacgtcaatgacaacaagcccgttttcatagtgccacccagtaactgcagttacgagctcgtactgccatccactaatcctggcaccgtggtgtttcaggtcattgctgtggataacgatacaggcatgaacgcagaagtgaggtattccatcgtgggcggtaatacccgtgatctgtttgcaatcgatcaggagactggcaatatcactctgatggagaaatgcgatgtcactgatctgggacttcaccgggtgctggtgaaggccaacgacctggggcaacccgattctctgttttcggttgtgatcgtgaacctcttcgtcaacgagtccgtgaccaacgctacactgatcaatgaactcgtgcggaagtccacagaggcccccgtgactcccaatactgaaattgccgatgtgtcatcccccacatctgactacgtgaagatcctggtagcagcagttgcaggaacgattactgtggtggttgttattttcatcactgctgtggtgaggtgtcggcaggcaccacacctgaaggcggcccagaagaacaaacagaacagtgagtgggccactcctaaccccgaaaaccgccagatgatcatgatgaagaaaaagaaaaagaagaagaagcactccccgaagaatctgctgttgaactttgtgacgatcgaggaaactaaagccgacgacgtcgactctgatggaaacagagtgactttggacctccctattgatcttgaagagcaaaccatggggaagtacaattgggtaacaacacccactacgtttaaacctgatagcccagacttagctagacactacaaatcagccagcccccagcccgccttccagatccagcctgaaactcctctgaacagtaaacaccatattatacaggagctcccgctggacaacacgttcgtcgcgtgcgattctatttcaaagtgtagctcttcatcatctgatccatattccgttagcgactgcggttaccccgttaccaccttcgaagttcctgtgtcagtccataccaggcccactgattcaagaaccagtactatcgagatttgttctgaaatatag

SEQ ID NO: 131062 - DNA, 4020 bp, synthetic construct
  misc_feature 1..4020: note = Description of Artificial Sequence: Synthetic coding sequence
  source 1..4020: mol_type = other DNA
atggacttactgtctggaacgtatatcttcgcagtgctgcttgcgtgcgtcgtttttcacagcggggcccaggagaagaattatacaatccgagaagagatgcccgagaacgtcttgatcggcgacctcctgaaagacctcaatctctccctcatccccaataaatcactaaccacagctatgcaatttaaactagtgtataagacaggcgacgtacctcttatccgaattgaagaggataccggcgaaatcttcactactggcgcgagaattgaccgggagaagctgtgtgcaggcattccaagggacgaacattgtttctatgaggtagaggtggcgattcttcctgacgaaatcttccgcctagttaaaattcgttttctaatcgaagatatcaacgataacgctcccctgttccctgccactgtgatcaatatttcgataccggagaattctgcaatcaactccaaatatacacttcccgccgccgtagaccccgacgtgggcatcaatggtgtgcagaattatgagctgatcaaatcccagaacatctttggcctggatgtgatcgagacaccggagggggacaagatgccgcagctgatagtccaaaaggagcttgacagggaggaaaaggacacatacgtgatgaaggtgaaagtggaggatggtggatttccccagcggagctccacagccatcctacaggttagtgtgaccgataccaatgataaccaccctgttttcaaggaaaccgagatcgaagtgagtatccctgagaacgctcccgtcgggacctccgtgacccagctgcacgctacagatgccgacattggagaaaacgccaagatccatttttcgttttcgaaccttgtcagtaatattgctcgacgactgttccacctgaatgccacaaccggcctgattaccatcaaagagccactcgatcgcgaggagacccccaatcataaattgcttgtgcttgcttccgacgggggactgatgcctgcaagggccatggtgttagtgaatgtcaccgacgttaatgataacgtcccttcaatagatataaggtatatcgtgaaccctgttaacgacaccgtcgtactgagcgagaacattccactcaatactaaaattgccctgattaccgttaccgataaagatgcagatcataacggacgcgttacctgctttactgatcatgagattcctttccgacttcgtcctgtcttttctaatcagttcctgctcgagacagctgcctatctggattatgagtcaaccaaggagtacgcgatcaagctgctcgctgccgatgcaggcaagccgccattgaaccagtccgcgatgctcttcatcaaggtgaaagatgagaacgataatgctcccgtcttcacacaaagtttcgtcacagttagcataccagagaacaattcccctgggatccagctgactaaggtatctgcaatggatgcagacagcggaccaaacgcgaaaattaattacctcctgggcccagatgcgccccccgagttcagcttagattgccggaccggcatgctgaccgtcgtcaagaaattagatagggagaaggaagataagtatctgttcaccatcctggctaaagacaatggtgtacccccccttacgtccaacgtgacagtattcgtctctatcatagatcagaacgataacagccccgtgtttactcataacgagtacaacttttacgtccctgaaaacctgcccagacatgggactgttggcctgattaccgtcaccgatccagactatggggataatagcgcggtgactctttccatcttggatgagaacgacgatttcaccatcgattcccagactggagtgatacggccgaatatatcctttgaccgcgagaaacaagagagctatacattttacgtgaaggcggaagacggcggccgggtttccagatcgtcctccgccaaagtcacaataaacgttgtggacgtaaacgataataaacccgtgttcattgtgccaccctccaactgctcttacgaactggtgctgccatccacaaacccagggaccgttgtttttcaggttattgctgtggataacgacaccgggatgaacgccgaggttcgttactcgattgtgggtggaaacacaagagacctgtttgccattgaccaggaaacagggaatattactttgatggagaagtgcgacgtgacggacctcggcttgcaccgcgtccttgtgaaggccaacgatttgggacagcccgattctctgttcagtgttgtaatcgtcaacctatttgtcaatgagtcggtcacgaatgccacgctgatcaacgaactggtgaggaagtcaaccgaggcccctgtgactccgaacactgaaatcgctgatgtgagcagtccaacctcagattacgtgaagattcttgttgcggccgtggccggaactattactgtcgtggtggtcatctttattaccgccgtggttcggtgtagacaagcccctcacctgaaagccgctcagaagaacaagcaaaactccgagtgggctacaccaaatcccgagaatagacagatgattatgatgaagaaaaaaaagaaaaagaaaaaacactccccgaagaacctgcttctgaacttcgtcaccatcgaagagaccaaggctgacgatgtggattctgacggaaaccgggtgacgctggatttgccgatagatctggaagagcagacgatgggtaaatacaactgggttacaactcccactacctttaagcctgatagtccggatctggcgcggcactacaagtccgcctccccccaacctgctttccagatacagcctgagaccccactgaacagcaagcaccacataattcaggaattaccactcgacaacacattcgtggcgtgtgacagtatcagtaaatgtagtagttctagctctgatccctactctgtgtctgactgcggctaccccgtcactaccttcgaggtgcccgtgtccgtgcacacacgtccaccaatgaaagaggtagtcagaagttgtactcccatgaaggaatccactactatggaaatctggatccatccacagccacagcgcaaatctgagggaaaagtggcggggaagtcgcagcgccgagtgacattccaccttcccgagggatctcaagaatcctcttccgacggtggcctcggcgaccacgacgcaggaagcctcacgtcgacctcccacgggctgcccctcggctacccgcaagaggagtattttgaccgcgcgacacccagtaaccgcacggagggcgacggcaacagtgaccctgaaagtactgctgagatcacagtacagccaacagttgaggaggccagcgataattgcactcaggagtgtcttatctatggacacagtgatgcctgctggatgccagcaagcctagaccacagtagttcctcccaggcgcaagctagcgcattatgccatagcccccctctgtctcaagcgtccacccaacaccatagcccgagagttactcagaccatcgctctgtgtcactcccccccggtaacacagactatcgcactgtgtcattcaccacccccaattcaagtgtccgctctccatcactcccctccccttgtgcaggctaccgcactgcatcactcccctccctcagcacaagccagtgccttatgttattcaccccctcttgctcaggcagcagcaatatctcattcatcccctctccctcaggtgatcgctctccacagatcgcaagcacagagtagcgttagtctgcagcaaggttgggttcagggcgcagatggattgtgtagtgtggatcagggcgtccaagggtcagctacatctcagttctacacaatgagcgagagattgcatccgtccgatgactccatcaaggtaattcccttaactacatttactccccgtcagcaggcccggccctctagaggggactctccaataatggaagaacatccactgtag

SEQ ID NO: 131063 - DNA, 3198 bp, synthetic construct
  misc_feature 1..3198: note = Description of Artificial Sequence: Synthetic coding sequence
  source 1..3198: mol_type = other DNA
atggatctgctctcaggcacttatatcttcgccgttttgctcgcctgtgtggtgtttcatagcggagctcaggaaaaaaactacaccatcagggaggagatgcccgagaatgtgctcatcggcgatctcctgaaagacctgaatctgtccttaattcccaacaaatcgctgaccactgcgatgcagtttaagcttgtgtataagacaggtgacgtgcctcttatccgcatagaggaggataccggagagatttttaccacaggcgcgagaatcgatagagaaaaactgtgcgcaggcattccgagagatgaacactgtttttatgaggttgaggtcgctattttgccggacgagatctttcgccttgttaagattcgctttttgattgaggatatcaatgataacgcacccctttttcctgccacggtaattaacatttcaatacccgagaattccgcaattaacagtaagtataccctccccgccgctgtagatccagatgttggtattaatggcgttcagaattacgagctcattaaaagtcaaaatatcttcggactcgacgtgattgagacaccggaaggcgataaaatgccccagctcatcgtccagaaagagctggaccgggaggaaaaagatacatatgtgatgaaggtcaaggtcgaagatggcggctttccgcagaggtccagtactgccatactgcaggtgagcgtgacagatacgaatgacaatcacccagtgttcaaagagaccgagatagaggtcagtattcccgagaacgcgcccgtgggtacatctgtcacccagttacatgcaacagatgcggatatcggcgaaaacgccaagatccacttttcattctctaacctggtgtcgaacatcgctagaaggctgtttcacctgaacgccaccacagggttaatcactataaaggaaccactggacagggaagagacgccaaaccacaagctgctggtgctggctagtgatggagggctgatgcccgcaagggcaatggtcctggtgaatgtgacagacgtgaatgataatgttccgtcaatcgacattcgctacattgtgaatcctgtcaatgacacggtggtactttcagaaaacattcctcttaacacaaaaattgcgctcatcactgtaactgataaggatgctgatcataacggccgcgtcacctgctttactgaccacgagatacccttcaggttgagaccggtgttctccaaccaattcctgctggagaccgcagcataccttgattatgagtctacaaaagagtacgccattaagctgctggctgctgacgcagggaagccgcctctcaaccagagtgccatgctattcatcaaagtgaaggatgagaacgataatgccccagtatttactcaaagctttgttactgtctctatcccagaaaataacagccctggtattcaattgaccaaggtgtcagcaatggacgcagactccgggcccaatgccaaaatcaattacctattgggccccgatgccccaccggagttctccctggattgtcgcacaggcatgctgaccgtggttaaaaagctggaccgggagaaggaagataaatacctctttaccatactagccaaagataacggtgttcccccactcacatctaacgtgactgtcttcgtgagcataatcgaccagaatgacaacagtcctgtgttcacacataatgaatacaacttctacgtgcctgaaaatctgcctcggcatggcactgttggactgatcacggtgacagatcctgattacggcgataactctgccgtcaccctgtccatactggacgagaacgacgatttcaccatagattcccaaactggcgtgatacgccctaacatatccttcgaccgagagaaacaagagagttacactttttacgtgaaggctgaagacggcggtcgtgtgagccgtagcagcagcgctaaggttactattaatgtggttgatgtcaatgacaacaaacccgtctttatcgtgcccccttccaattgctcctacgaactcgtgctccccagcactaacccaggtacagtcgtttttcaggtgatcgcagttgacaacgacaccgggatgaacgcagaggtgcgttacagtattgtgggtggcaatacacgggacctctttgccatagaccaggagacaggcaacattaccctgatggagaagtgtgacgtgacagatttaggactacatagagtgctggtcaaggccaacgatctggggcagcccgactccctcttctccgtagtcatcgtgaatcttttcgtaaatgagtcagtgaccaatgcaactctgatcaacgagctcgttcgcaagagcacggaagccccagtcacgccaaatactgagatcgccgatgtgagttcacctaccagtgattatgtgaagattctggtggctgcagtggcaggcacaatcaccgtcgtggtcgtcatcttcatcacagccgttgtgaggtgccggcaggcccctcatcttaaggccgcacagaaaaataagcagaatagtgagtgggccacacctaatcctgagaatcgccagatgatcatgatgaaaaaaaagaagaaaaagaagaagcattcccctaaaaatctgctccttaatttcgtcaccattgaggagaccaaggctgatgacgtagactcagatggcaacagggttacacttgatctgcctattgatctagaggagcagacgatgggaaaatacaattgggtgactaccccgactacatttaaacccgactctccagatctcgctcggcattataaatccgcaagcccccagccggcgtttcaaatccaacccgaaactccgctaaactcgaaacaccatataatacaggagctgccgctggacaacacctttgtggcgtgcgattcaatttcaaagtgttctagctcatccagcgatccttacagcgtctctgactgcggatacccagtgactacatttgaggtgcctgtgtccgtgcacacacgccccccgatgaaggaggtggtccgctcctgtacccctatgaaagagtccaccacaatggagatttggattcatccccagccacaacggaagagcgagggtaaagttgcaggtaaaacggtgctgacgagctcgagcccatctgctatgaccctatcctacctggattag

SEQ ID NO: 131064 - DNA, 1344 bp, synthetic construct
  misc_feature 1..1344: note = Description of Artificial Sequence: Synthetic coding sequence
  source 1..1344: mol_type = other DNA
atggcgaccgccgccacaactactaccaccacaacagctaccgtggcgctaactacctcctgggataacgcaaccggcaggccaaccgccgagccagatccaattctcgacaattatgtgctcctggtcgttgttatgtccctcttcgtggggggaacccttgtcgtgctgagcggagtactgctcctgtgcaagagatgttgggacgtgcaccagcgcctgaacagagctatggaggaagctgagaagactaccaccacatatctcgacaacgggactcaccccgcccaggacccagattttagaggcgaagaccctgaatgtcaagacgccgagactgaaaggttcctctctaccagctctaccggtagacgcgtctccttcaatgaggccgccctctttgaacaaagccgcaagacccaggacaaagggaggagatatacactcaccgagggagacttccaccacctcaaaaacgcgcgactaacacatctgcacttaccccctctgaaaatcgtgacgatacacgagtgcgatagcggcgaggcttcttcagctacaactcctcacccggctacttcccccaaagctactttagctatttttcagccaccaggtaaggcacttactgggagaagtgtagggcccagctctgccctgccaggtgatccttacaattccgctgcgggggccaccgacttcgccgaaatcagtccaagcgcaagttctgacagcggggagggtacgagcctggacgcaggtacaaggtctaccaaagccggcggccctggggccgcggcaggacccggtgaggctggtcctgggtccggtgcaggaacggtcttacaattcttgaccaggttaagacggcatgcatcacttgacggagcatccccatattttaaagttaaaaaatggaagctggagcctagccagcgtgctgctagtcttgacacccggggatcccccaaacggcaccatttccaacgccagcgcgccgcctcggagagcacagagcaggaggagggggacgcccctcaggaagacttcatccagtatatcgcccgtgccggagacgccgtggcctttccacacccacgcccgttcctggcgagccctccacctgcccttggcaggtatttctccgtcgacggcggcgctagagggggccccgtgggaccatgtcccccatctccaccccctcgacggcccagagagcgctctccgggccccgtggatacccggtcaccagcttctagcggtaaagccccacctagagggggactcactggtgccacgtctccggcttggacaagaggagggaaacaaggggagacaggatag

SEQ ID NO: 131065 - DNA, 3114 bp, synthetic construct
  misc_feature 1..3114: note = Description of Artificial Sequence: Synthetic coding sequence
  source 1..3114: mol_type = other DNA
atgactgtgggatttaactccgatatctcctcagtcgtgcgggtaaacacaactaactgccacaagtgcctactgtccggcacatatattttcgcagtgctgcttgtttgtgttgtcttccattccggtgctcaggagaaaaattatacaatccgtgaagaaatccctgaaaatgtcctgattggcaatttgttaaaggatctcaacctgtcactaattcccaacaagagtctgaccacaaccatgcagttcaagcttgtctacaaaacaggagatgtcccattaattcggattgaggaagacacgggagaaatatttacgaccggagctaggatcgatcgggagaagctgtgcgccggcatcccgcgagatgaacactgcttttatgaagtggaggtggccatcctgccagacgagatcttccggcttgtgaagatcagattccttatcgaagacattaatgataatgccccactgttcccagccactgtgattaacatcagtatacccgagaactcagcaatcaatagcaagtacacgctcccagccgctgtcgacccagacgttggaatcaacggagtgcagaattatgaactcatcaagtcccagaatattttcgggctggatgtgattgagacacccgaaggggacaagatgcctcagctcattgtgcagaaagaactggaccgcgaggaaaaagacacctacgtgatgaaagtgaaagtagaggatggcggattccctcaacgcagtagcaccgccatcctgcaggtctcggttactgacacaaacgataatcatcccgtgtttaaggagaccgagatcgaggtgagcatcccagagaatgctccagtgggtacatccgtgacacagcttcatgcaaccgacgcagacatcggcgagaacgcaaaaattcactttagcttttcaaacctggtgagcaatatcgctagaaggctgtttcacctcaacgccaccacaggcctgataacgatcaaggaaccccttgaccgggaggaaaccccaaatcataagctcttagtgctcgcctcagacggcggactgatgccagcaagagccatggtcctggttaacgtcaccgacgtcaatgacaacgttcctagcatcgatatccggtatatcgttaatcccgtaaacgacacggtggtcctgtccgagaatatcccccttaacacgaaaatcgcactgataacagtcacggataaagatgccgaccataacggccgagtgacttgctttaccgatcatgagattccattccgactgaggccagtgttctctaatcagtttttgctggagaacgccgcatacctggactacgagagcaccaaagaatatgcaattaagctgcttgctgccgacgcggggaagcctcccctcaatcaatccgctatgctctttattaaggtgaaagacgaaaatgacaacgcacctgtgttcactcagagtttcgtgactgtgtccattccggagaataacagtcccggcattcaacttatgaaggtctctgccaccgatgccgatagcggccctaacgctgagattaattatctactgggccctgacgctccacccgaattttccttagacagacggaccgggatgctcaccgtagtcaaaaagctggatcgggagaaagaagacaaatacctgttcaccatcctggccaaggacaatggagtgccgccactcacatccaatgtgactgtatttgtgtccatcatcgatcagaatgataacagtcccgtgtttacgcacaacgagtacaaattctacgttccggagaacctcccacgccacggcactgtcggccttatcacagtaacagatcctgattatggggacaactcagcagtcactctgtctattctggacgagaatgacgacttcaccatagatagtcaaaccggcgtgatccgtcctaacatcagttttgatcgagaaaagcaagagtcatatacattctacgtgaaggcagaggatggaggtcgggtgagtcgcagttcatcagccaaagtcacaattaacgtcgtcgacgtgaacgataacaaaccagtatttatcgtgccgccctacaattactcttatgaacttgttttacctagcacaaatcctggtacagtggtgtttcaggtcattgctgtcgacaacgataccggtatgaacgcagaagtacggtatagcatagtaggggggaacaccagagacctatttgctatcgaccaggaaacagggaacattaccctcatggaaaagtgcgatgtcacagatcttggactccaccgagtactcgtcaaggcaaacgacctgggccaacctgattctctgttttcagtcgttattgtgaacctgttcgtaaatgagtcagtgacaaacgccacattaattaacgagctcgtgagaaagtccattgaggccccagtaacacccaacacagaaatcgcagatgtttcctcacccacgtccgattatgtgaagatcttggtcgccgccgtggccgggacaatcacagtggtggtggtgatctttattacggccgtggtaagatgtcgccaggctcctcatcttaaggcagcccagaagaacatgcagaacagtgaatgggccacccctaaccccgaaaaccgtcagatgattatgatgaagaagaagaaaaaaaaaaagaagcattctcctaaaaacctcctcttgaatgtggtcactatagaagagacaaaggcggatgacgttgattctgatggcaatagggttacccttgatctgccaatcgatctggaagagcagactatgggcaaatataactgggtaaccacccctacgacctttaaacctgattcccccgatctggccagacactataagagcgctagtccacagccggctttccaaattcaacccgagaccccactgaacttaaagcaccacattatacaggaactacctttggacaatacatttgtcgcctgcgactcaatctctaattgctcctcgagcagtagcgacccctactctgtgagtgattgtggctaccctgtcacaaccttcgaagtgccagtgtctgtccacactcgtcccactgattctaggacgtag

SEQ ID NO: 131066 - DNA, 3147 bp, synthetic construct
  misc_feature 1..3147: note = Description of Artificial Sequence: Synthetic coding sequence
  source 1..3147: mol_type = other DNA
atgtttcgcgtaggtttccttattatctcctcatcctcttctcttagccccctccttctagtgagcgtggtacgcgtgaatacaaccaattgtcataaatgtcttctctcaggcacatacattttcgctgtgctgctcgtgtgcgtcgtgttccattcgggtgctcaggagaaaaactacaccatccgcgaggagatacccgagaatgtgctcataggaaacctccttaaagacctcaacctaagccttatccccaataaatcactgaccaccacaatgcagttcaaactggtgtataagactggggatgtgcctttgattaggatcgaggaggacacaggagaaatttttaccacaggagccaggattgatcgcgagaaactctgcgcgggaattccacgcgatgagcactgcttttacgaggttgaggtagctatcttacccgatgaaattttccggctggtcaaaattagatttttgattgaggatataaatgataacgcccctctcttcccggccacagtgatcaacatcagcattccagaaaattccgctattaattctaagtataccttgcccgccgccgtggacccagacgtggggattaacggagtgcagaattacgagctgatcaaatcccaaaacattttcggcctggatgtgatagagacccccgaaggcgacaagatgcctcagctaattgtgcagaaggaactggatagggaggaaaaagatacatacgtgatgaaagtgaaagtagaagacggcggcttcccacaacggagctctactgcgattctccaggtcagcgtgacagatacgaacgacaaccatcccgtctttaaagaaaccgagatcgaggtctctatccctgagaacgctcctgtcgggacgagcgtgacacagctccatgctacggatgctgacatcggggaaaatgctaagatccatttctccttctctaacttggtgtccaatatcgcacgccgactgttccatctgaatgctaccacaggcttgataacaataaaggaacctctggacagggaggagactcccaatcacaaactgctggtgctggcctccgatggaggactgatgcctgcccgcgctatggtgctggtcaacgttactgacgtgaacgacaatgttccatccatcgatattaggtacatcgtgaatcccgtgaatgatactgtagttcttagcgagaatatcccacttaataccaaaatcgccctaattaccgtcacggataaagatgcagaccacaacgggagagtgacatgtttcactgatcacgagattcctttccgcctcaggccagttttttccaaccagtttttgctggaaaatgcagcgtatcttgactacgaaagcactaaggaatatgccattaaacttctcgccgcagatgccggcaagcctccactgaatcagagtgctatgctgttcattaaagtaaaagacgaaaacgacaatgctcccgtgttcactcagagtttcgtcaccgtatctatacccgagaacaatagccccggcatccagcttatgaaagtctcagctaccgacgcagattcgggccctaatgccgagataaactacctgctaggccccgacgccccccctgagttcagcctggatcgccggactggtatgctgacagtggtcaaaaagctagatagggagaaggaagataagtacttgttcaccatcctggccaaagataacggggtgccacccctcacaagcaatgtcactgtgttcgtgagtatcattgaccagaacgacaattccccagtattcacccacaacgagtacaagttctatgtgcctgaaaacctgcctaggcatggcactgtgggtctgataactgtgacggaccctgattatggcgacaattcggccgtcactctatccattctcgatgagaacgatgattttactatcgactcacagactggcgtaataaggcccaacatcagcttcgatagagaaaagcaagagagctatacattctatgtgaaggcggaagacggtgggcgggttagtcggagtagcagtgccaaagtaactataaatgtggtggatgtcaatgacaacaagccagtctttatcgtgcctccttataattactcctatgagctggtgctaccatcaactaacccaggaacagtcgtttttcaggtcatcgccgtggacaatgatactgggatgaacgccgaggtccgctactctattgtcggaggcaatacacgagatctgtttgctattgaccaggaaaccggaaacattaccctgatggaaaaatgcgacgtgacagatctgggcctgcaccgagtgctcgtgaaggccaacgatctcgggcagccggacagcctgttctccgtggtcattgtgaacctatttgtgaacgaatcagtgactaacgccacactcattaacgagctcgtcaggaagtctatcgaggctccagtgacaccaaacacggagatcgctgacgtctcaagtccgacctccgattacgtcaaaattcttgtggccgctgtggcagggaccatcacggtcgttgtagtgatatttatcactgctgtcgtgcgttgccggcaggcaccccacttgaaagccgcgcagaaaaatatgcagaactcggaatgggctactcccaatccggaaaacaggcaaatgattatgatgaagaaaaaaaaaaagaagaagaagcactcccccaagaatttactgttaaacgtggtgacaattgaggagaccaaagctgatgacgtagactcagacggcaacagggtgaccctggatctaccgatcgatctggaagagcaaactatgggaaaatataattgggtgactacgcctactacttttaagcccgatagtcctgacttggccaggcactacaagagcgcatctccccaaccagcttttcagatccagccagaaacaccactgaacctgaagcatcatattatacaagaactgcctcttgacaacacattcgtggcttgcgattctatttctaattgctcttcttcatcctcagacccatactccgtatccgactgtggttacccagttacaactttcgaagtgcccgtaagcgttcatacacggcctactgatagtcggacctag

SEQ ID NO: 131067 - DNA, 3960 bp, synthetic construct
  misc_feature 1..3960: note = Description of Artificial Sequence: Synthetic coding sequence
  source 1..3960: mol_type = other DNA
tgagtggtccgagttaatacaaccaactgccacaaatgtctgctgagcggtacgtacattttcgcggtgctgctcgtgtgtgtggttttccacagtggcgcccaggagaagaactatactataagggaagaaatacctgagaacgtattgattggaaatttattaaaagatctcaacctctctcttattccgaataagtcccttaccaccactatgcaattcaagttggtctataagactggagatgttccactaattcgaatcgaagaggacactggcgaaattttcacaaccggtgcccgcatcgatagggagaagttgtgtgctgggatccctcgcgatgagcactgtttttacgaggtggaggtggccattctgcctgatgaaatattccggttggtaaaaattcggtttctgattgaggatattaatgataatgcaccactcttcccagccactgtgattaatatctcaatcccagagaactcggctatcaacagcaagtatacacttcctgcggccgtcgatcccgacgtcggtatcaatggtgtgcaaaattatgagctgataaaatcccaaaatatctttgggttagatgtgatcgagacccctgaaggtgacaagatgccgcagctgattgtccaaaaagaactggatagggaagagaaggacacctatgtgatgaaagtcaaggtcgaagatggcggtttccctcaacggagttctacggccattttgcaggtatccgtgactgataccaatgataatcatcccgtgttcaaagagactgaaattgaagtgtcaatccctgagaatgcacccgttggtacttctgtgacccagctgcacgcaactgacgctgacatcggcgaaaatgccaagatccatttctcgttctctaatctggtctctaacatcgcacggcgcctctttcacttgaacgcaaccaccggacttatcaccataaaggagcccctggatcgcgaagaaacacctaaccataagctacttgtgctagccagcgacggcggcctcatgccggctcgcgccatggttctggtcaacgttacagatgtgaatgataacgtgccttcaatcgatatccgttacatcgtgaatcctgtcaatgatacagtggtcctgtctgaaaatattcccctgaataccaagattgcgctcatcaccgtgaccgataaggacgcagatcacaatggcagggttacatgctttactgaccacgagatccccttcaggctaaggcccgttttctccaatcagttcctccttgaaaatgccgcgtatttggattatgagtctaccaaagaatacgccataaaactgctcgctgcagacgccgggaagccaccgctaaatcagtctgcaatgttgtttattaaggtaaaggatgagaacgacaatgcccccgttttcacacagagttttgtgacggtgagcatacccgagaacaatagcccaggaatacaattgatgaaggtcagcgcgactgatgctgattctggacccaatgcagaaattaattatctcctgggcccagatgctccaccagaattttcattagaccggagaaccggcatgttgaccgtggttaaaaagctggaccgcgaaaaagaggataaatatctgtttacaatcttagctaaggacaacggcgttccacctcttacaagtaacgtgaccgtgttcgtcagtataatcgaccaaaacgacaactcgcccgtgttcacacacaatgaatataaattttatgttcccgaaaatctgcctcggcatgggacagtaggcctgatcactgttactgatcctgactatggcgacaactccgctgtgacactttcaattctagacgagaacgatgacttcacgattgactcccagactggggtaatccgcccaaacatctcctttgatagggagaagcaggaatcctataccttctacgtcaaggcagaggatggaggcagggttagccgcagctcatctgccaaggtcacaatcaacgtcgtcgatgtgaatgataataaacctgtcttcattgtgcctccctataattactcttatgagctggtgctgcccagtactaaccctgggactgtggtgttccaggtgatcgccgtggacaacgatacgggaatgaacgcagaagttcgatatagcatcgtgggagggaacaccagggacttgttcgccatcgatcaagaaactgggaatattactctgatggaaaaatgcgacgtgacggatctggggctccatcgggtattggtaaaggctaacgacctagggcaacccgactctctgttttccgttgttatagttaacctatttgttaacgaatccgttaccaacgcaaccctcattaacgaacttgtaaggaagagcatcgaagcccctgtaacacccaataccgaaattgccgacgtttcttcacccacatcagattatgtcaaaatcctggtcgctgccgttgcggggacgataaccgtagtagttgtgatcttcataactgccgtcgtccgatgtcgacaggccccacaccttaaagctgcacaaaagaacatgcagaactctgagtgggcaaccccaaatcccgagaacagacagatgattatgatgaagaaaaaaaagaagaagaaaaagcactcacccaagaatctactgcttaatgtcgttactattgaggagaccaaggcagacgacgttgacagcgatggaaaccgggttactctcgacctccccatcgatctggaggagcagactatgggcaagtacaattgggtcaccactccaaccacatttaaacccgactctcctgacctagccaggcattataaatcagcctctccacagcccgcatttcagatacagcccgagacccccttgaatctgaagcaccatataatccaggaattgcccttggacaacaccttcgtggcctgtgatagcatctcaaattgctcctcttccagttccgatccgtacagcgtgagtgattgcggctacccagtgaccacttttgaggtgccggtgagtgtacacacgcgacccagtcagcgccgggtgacattccaccttcccgaggggagtcaggaatcaagctcagacggcggactgggcgaccatgacgcgggcagtctcacttctaccagtcatggacttcccttgggatacccccaagaggagtattttgatcgggcaacaccctctaaccggactgagggagatgggaactctgacccagagtccacatttataccaggcctgaaaaaagaaatcaccgttcagccaacagtggaggaagccagtgataactgtactcaagagtgcttgatctatgggcatagcgacgcatgttggatgcctgcctctctggatcactctagctcttcacaggcccaggctagtgccttgtgtcactcgccccccctgtcacaggcatccacacagcatcattctcctccagtgacacagaccatagtactgtgccattcacctccagtaactcagactatcgctctttgtcactctccacctcccatccaggtgtccgcactccatcactcccctcctttggtgcaggggaccgcactgcaccacagccccccgagcgcacaagcgagcgcgctatgctattcaccccccctggcccaagcagccgcaatctctcattccagctccctcccacaggtcattgctctgcaccgctctcaggcacaatcctcagtgagcctccagcagggatgggtgcagggtgctaatggcctgtgctctgtagaccagggggtgcagggctctgcaacgtcacagttctacacaatgtccgaaaggctccaccctagtgatgattccataaaagtgattccccttactacattcgctccgagacagcaggctcgcccttctcgcggtgacagcccaataatggaaacacaccccttgtag

SEQ ID NO: 131068 - DNA, 1080 bp, synthetic construct
  misc_feature 1..1080: note = Description of Artificial Sequence: Synthetic coding sequence
  source 1..1080: mol_type = other DNA
atgcgaagtattaggaaaaggtggacaatctgtacaatctctctgctactgattttctataagacgaaagagatcgccaggaccgaagagcaccaggagactcagttgataggtgacggcgagctgagcctctctcgctcacttgtcaacagctctgataagatcatcagaaaagcagggtcttccattttccagcacaatgtggagggctggaagattaatagcagcttggtcctcgaaattaggaagaacatcctcagattcctggatgccgaaagagatgtgtctgtcgtgaaatcctcctttaagcccggcgacgtgatccactacgttctggatcgcagaagaactctgaatatttcacacgatctccactcccttctgccggaagtgtccccaatgaagaatcggcggttcaagacgtgtgccgtcgtggggaatagtgggatccttctcgacagtgagtgcggaaaagagattgattctcacaactttgtgatcaggtgtaacttggctccggtagtggaatttgccgcggacgtgggaacaaaatcagatttcatcaccatgaacccaagtgtggtacagagagcctttggggggttccggaatgagtcagatagggagaagtttgtacaccggctgtcaatgctaaatgactcagtcctctggattcccgcttttatggtcaaggggggggagaagcatgtggagtgggtgaacgctctcatcctcaaaaacaagcttaaggtcaggactgcatatccgagtctgaggttaatacatgctgtgcgtggctattggctcacaaataaggttcccatcaagcggccttcaaccggcctccttatgtacactctggccaccaggttttgtgatgaaattcatctgtacggattttggccgttccccaaggacctgaacggcaaggcagtcaaataccattattatgacgatctgaagtaccgatacttctcaaacgcgagtcctcatcgtatgcctctagagtttaaaaccttaaatgttctccacaaccgaggggcattaaagcttactaccggtaaatgcgtgaagcaatag

SEQ ID NO: 131069 - DNA, 72 bp, synthetic construct
  misc_feature 1..72: note = Description of Artificial Sequence: Synthetic coding sequence
  source 1..72: mol_type = other DNA
atgatgcagctcttacagctactgctcggcctccttgggcccggcggctatctctttcttctcggcgattag

SEQ ID NO: 131070 - DNA, 3480 bp, synthetic construct
  misc_feature 1..3480: note = Description of Artificial Sequence: Synthetic coding sequence
  source 1..3480: mol_type = other DNA
atgtacttgtcaatctgttgttgctttctcttgtgggcccctgcgctgacgcttaagaatcttaactatagcgttcccgaggagcagggcgctggtaccgtgataggtaatattgggcgcgatgccaggctgcagcctggactccctcctgccgagcgcgggggaggcggcagatccaaatccgggtcataccgcgtcctcgagaacagcgcccctcacctacttgacgtggatgcggacagcggtctactctatacaaaacaaagaatagatagggagtccctttgtagacacaacgccaagtgtcaactatccctggaggtattcgcaaacgacaaagaaatctgcatgatcaaggtcgagattcaggacataaacgataatgcgccgtcgttttcatccgatcagattgagatggacatttcagaaaatgccgcaccaggaaccaggtttcccctgacatcggcgcacgatcccgacgccggggagaacgggctaagaacatacctgttgactcgggacgaccacgggctcttcgggttagacgtgaaatcacgcggtgatgggacaaagtttcctgaactggtcatccagaaggccttggaccgtgagcagcagaatcatcataccctcgtgttaacagccctggatggcggagagcctccacgcagcgccacagtccagatcaacgtgaaagtaatcgattcaaacgataactctcctgtctttgaagccccttcttacctggtggaactcccagaaaacgctcctctgggtaccgttgtgatagaccttaacgccaccgatgccgacgagggcccaaacggcgaggtactgtatagcttttcttcctacgtcccagatcgcgtgagagagctctttagcatcgaccccaagacaggcctaatccgggtgaaggggaacctggattatgaagagaacggaatgctggaaatcgatgttcaggcacgggatttggggcctaacccaattccagcccactgcaaggtcacagtcaaattgatcgacagaaacgacaatgcaccttcaattggcttcgtgtcggttagacagggggcactctctgaagccgcccctcctgggactgtcatcgccctggtcagagttacagatagggattctggcaaaaatggacaacttcagtgtcgggttctgggcggtgggggcacggggggcggcggaggattgggcggtccaggcggttcggtgccgtttaaattggaagaaaattatgacaacttctatactgtggtcaccgatcgtcccttggaccgcgagacacaggacgaatacaatgtgaccatcgtggctcgggatggaggttctcccccgctgaatagcaccaagtcattcgctattaagattttggacgagaatgacaatcccccgcgttttacaaagggtctgtacgtattgcaggttcatgaaaacaatattcccggagaatatctaggtagtgtcctggcccaggaccccgacctgggccaaaatggaacggtcagttactccatcctcccaagccacatcggggatgtttctatatatacatatgtcagcgtcaacccaaccaacggcgccatttatgcgcttcgaagctttaatttcgaacagactaaggccttcgaattcaaagtgcttgcgaaagactcgggagctcctgcccacttagagtccaatgccaccgtgcgggttactgtcctagacgtgaatgataacgccccagtcatcgtcctgccaacgctgcagaatgataccgcagagctgcaggtccccagaaatgctggcctgggatacctagtgtccaccgtgcgggcactggacagtgacttcggggaatctgggcggctgacctatgaaattgtggacggaaatgacgaccacctattcgaaatagaccccagctctggcgagatacgcacattgcacccattttgggaagatgtcaccccagtggtcgaactggttgtgaaggtgacggaccacggaaagcccacactgagtgctgtggcaaaactgatcattcggagcgtgtccggaagtctccctgagggcgtgccgcgggtgaacggcgagcagcaccactgggatatgtcactgccccttatagtgacattgtcgacaatttctattatcctgcttgcagcgatgatcacaattgccgtgaaatgcaaacgggagaacaaagaaattcgcacatacaattgtcgcatcgccgaatactcacacccacagctcgggggcggcaaaggcaaaaaaaagaagatcaacaaaaatgatatcatgctggtgcaaagtgaggtcgaagagaggaatgccatgaacgtgatgaacgtggtgtcatctcctagtttggctacttcccctatgtatttcgactaccagacgcgcctgccccttagctcacccaggagcgaggtgatgtatctaaaacccgcatctaataatctgacagtcccacaggggcatgccggatgccacacctcctttaccggccagggaaccaatgcatctgaaactccagcgacgaggatgagtattatccagaccgataattttcctgctgagccaaactatatgggctcgcggcagcagttcgtacagtcctcctcaacatttaaagatcccgaacgcgctagtctgcgagattcaggccacggagattctgaccaggccgactctgatcaggacacgaacaagggttcatgttgcgacatgtccgtgagagaggcactgaagatgaagacaacaagcactaaatcgcagccgcttgagcaagaacctgaagagtgcgtgaactgcactgacgagtgccgggtgttggggcacagtgaccggtgctggatgccccaattccctgcagccaaccaagctgaaaacgccgattacagaaccaatttatttgtgcctaccgtggaggccaatgtagagactgagacatacgagactgtgaatccaacaggcaagaagacattctgcacctttggtaaagacaagagagaacacaccattctcatagcaaacgtcaaaccatacctgaaggccaaaagagccctctcacctctgctgcaggaagtgccctcagcttcttcttcccccaccaaagcttgtatcgagccttgtacttctactaaaggaagtctcgacggctgtgaagctaaacccggcgccctggcagaagcttcctcacaatacctgcccaccgacagccagtacctgtccccctccaaacaaccccgcgaccccccttttatggccagcgaccagatggcgcgggtgttcgctgacgttcacagccgggcttcaagggattcaagcgaaatgggagcggtgcttgagcagttagatcatccgaaccgcgatctcggcagggagtccgtcgacgcggaggaagtggtgagggaaatcgacaagcttctgcaggattgccgcggaaatgatccggtggctgtgaggaagtag

SEQ ID NO: 131071 - DNA, 3408 bp, synthetic construct
  misc_feature 1..3408: note = Description of Artificial Sequence: Synthetic coding sequence
  source 1..3408: mol_type = other DNA
atgcatcagatgaatgcaaaaatgcacttccgattcgtgttcgctcttttgatcgtgtcctttaatcatgacgtcctggggaaaaacctcaagtatagaatatacgaggaacagcgggtggggagcgtgatcgccagacttagtgaggacgttgccgatgtactgctgaaactccccaatccgagcactgtacgcttccgggcaatgcagaggggcaattctcctctactcgtggtgaatgaagataacggggagatcagcattggtgctacaatcgaccgcgaacagttgtgccagaagaacctgaattgcagcattgaatttgacgttatcactctgcctactgagcacctgcagctgtttcatatagaggtcgaagtcctcgacatcaatgacaactccccccagttcagccgttcccttatccccattgagatatccgagagcgctgccgtcggtaccaggatcccacttgactctgcctttgatccggatgtgggcgaaaactcgctgcacacttactctttgagcgccaatgatttctttaatattgaggtgcggaccaggaccgacggcgcaaaatatgccgagttgattgtagtgagggaactggatcgtgaattgaagtcttcttacgaactccagcttaccgccagcgatatgggcgtgcctcagcgatctggaagcagcatcctgaagatcagcatttccgatagtaatgataattcacccgcctttgaacagcaaagttacataatacaattgctggagaatagccccgtgggtactctacttctagacctgaacgctactgatcctgatgaaggcgcgaatggcaaaatcgtgtactcattttcctctcatgtgagcccaaaaatcatggaaacctttaagattgatagtgaaagaggccacttaaccttgttcaagcaggtggattatgaaatcacgaagtcttatgaaatagacgtgcaggcgcaggatctgggccccaactccatcccagcccactgtaagattatcatcaaggtcgtagacgtgaatgacaataagccggagataaatattaacttaatgagcccaggcaaagaggagatatcctatattttcgagggggaccccatcgacacatttgtggccctcgtgcgggttcaggataaggacagtggcctgaatggcgagatcgtgtgcaagcttcacggtcacggacattttaaattgcaaaagacatatgaaaacaactatttgatacttacaaacgccacactggaccgggagaaaagatcagagtattccctaacagtcatcgccgaagaccggggcactccttccctaagcactgtgaaacactttacagtgcaaattaatgacatcaatgacaatcctccccactttcagcgaagccgctatgagttcgtgattagcgagaataactcccccggagcctacatcacgactgtgaccgccactgatcccgacttaggagagaacggccaggtcacttacacaattctcgaaagcttcatcctgggcagctcaatcactacctatgtgaccatagacccctccaatggggctatttatgccctaaggatattcgaccacgaagaagttagccagattacgttcgtcgtcgaggcccgtgatggaggctcacctaagcagctcgtgtctaatactacagttgtgctcacaatcatcgacgaaaacgacaatgtgcctgtggtcattggccccgcactccgcaataacacagccgagattacaattcccaagggagcggagtctgggtttcacgtgacaagaattcgcgcaatcgatagggatagcggggtgaacgctgagttgtcctgtgcgatagtggctgggaatgaggagaatatttttatcattgacccaaggagctgcgacatccacactaatgtttccatggactcagtcccatacacagagtgggaattgtcagtgatcattcaggacaaggggaaccctcagctgcatactaaagtgttgctgaagtgcatgattttcgaatacgccgagtcagtgacaagcacagccatgacctccgtttctcaggccagcctggatgtttcaatgattataatcataagcttaggagccatctgtgccgtccttttggtcatcatggtgctattcgccaccagatgcaatcgtgagaaaaaggacacgcgatcctacaattgccgggttgcggagagtacctatcagcaccacccaaaacggccctcacggcaaatacataagggggatataacactagttcctacaataaacgggacactgcccatccggtctcatcacagatcgtcaccaagcagctctcctactctggaaaggggccagatgggaagccgacaaagtcataactcgcaccaaagcctcaacagtctcgtcaccataagttccaatcacgtccccgaaaatttttcgctcgagcttacccacgccacaccagccgtggaacaggtaagtcagctgctgtcaatgctgcatcagggccagtaccagcctaggccttcctttagagggaataagtactctaggagctacaggtatgccctccaagatatggacaagttctcactgaaggactccggtcggggcgacagcgaagctggcgattctgactacgacctaggacgggactctcccattgaccgcctcttaggggagggtttttctgacttgtttttgactgatggaaggatccctgcggccatgaggctctgtacggaggagtgtcgggtgctcggtcactcagaccaatgctggatgccccccctcccttcgccgtcatctgattaccgcagcaacatgttcattcccggcgaggagtttcccacccagccccagcagcagcacccgcatcagagcctggaagatgatgcacagcctgccgacagcggagagaagaagaagtcattctcgacctttggcaaggatagccctaacgacgaggacaccggggatacttctacgtctagcctcctgtcagaaatgtcctctgtctttcagcgacttctccccccaagtctcgatacatacagcgagtgtagcgaggtggaccggagcaattccctggagcggagaaaagggcccctgcctgctaaaactgtgggctatccccagggagtggctgcctgggccgcctccacccatttccagaaccctacaacgaactgcggtccaccgctgggcacccactcttctgtgcagcccagctcaaagtggctccctgctatggaagaaattcctgagaattacgaggaggacgatttcgataatgttctgaatcatcttaacgatggcaagcacgagttgatggacgccagcgaattggttgccgagatcaataaactccttcaggacgtgaggcagagttag

SEQ ID NO: 131072 - DNA, 3405 bp, synthetic construct
  misc_feature 1..3405: note = Description of Artificial Sequence: Synthetic coding sequence
  source 1..3405: mol_type = other DNA
atgcatcagatgaacgcaaagatgcatttcaggtttgtgttcgctctgttgattgtgagcttcaaccatgatgtgcttgggaagaatcttaaatatcgcatctacgaggagcaaagggtgggctctgttattgccagactgtcagaggacgtggcagacgtcttgctgaagttacccaacccatcaactgtgaggtttagggccatgcagagaggtaactctcctctgctggtcgtgaacgaggacaatggcgagatctctatcggcgccacaatagatcgggaacaactgtgccagaaaaatcttaactgcagtatagaatttgacgtgataacactccccacagaacatctccagctcttccacattgaggtggaagtattggacatcaacgacaattctcctcagttcagcagatccttgattcccatcgaaatctctgagagtgctgccgtgggcacgagaattcctctggattcggctttcgatcctgacgtgggagagaatagtctccatacatactctcttagtgctaatgatttctttaatattgaagtgagaactcgcactgacggggcaaagtatgccgagctgatcgtggtccgcgagctagatcgggagttgaagtcttcctatgagctccagctgacagcctcagacatgggagtgcctcagcgatccggctcatcgattctcaaaattagcattagcgattcaaatgacaattcaccggcatttgagcagcagtcttacattatacagctgctagagaattcccctgtcgggaccctgctgctcgatcttaatgctaccgacccagacgaaggcgcaaatggcaaaattgtctatagcttcagctcccacgtctcgcccaagattatggagacctttaaaatcgatagcgagcgcggacacttgaccctgtttaagcaggtggattacgaaatcacaaagtcatatgaaattgacgtgcaggcccaggatctgggacctaattcaataccggcacattgcaagatcattataaaggtcgtagatgtgaatgacaacaagccagagattaatatcaatcttatgagtcctgggaaagaggaaatctcctatattttcgaaggagatcctatcgacacattcgtagcactggtacgcgtgcaggataaagacagtggactgaacggagaaatagtctgtaagctgcatggccacggtcattttaagctgcagaaaacatacgagaacaattaccttatactcaccaacgctaccttggacagggaaaaaagatccgaatactctctgactgtgatagccgaggaccgaggaacgccttcactatccactgtgaaacatttcactgtgcagataaatgatattaatgacaacccccctcatttccaacggtcacggtatgagtttgtgataagcgagaacaactccccaggggcttacatcacgactgtgactgcaaccgaccccgatcttggcgagaacggtcaggtaacttacactattcttgaatccttcattctcgggtcctccataacaacctatgtcaccatcgacccgagtaacggagcaatctatgcattacggatctttgatcacgaggaggtgtcacagatcacgtttgttgttgaagctcgtgacggagggagtccaaagcagcttgtctcaaacacgaccgtagtgctaaccatcattgatgagaatgataacgtgccagtcgtgattggcccagcactgaggaacaatacagccgaaattactattcctaaaggagccgagtccggtttccacgtgacaagaatcagggctatagatcgggattctggggtcaatgcagaactttcatgcgccatcgtcgccggcaacgaggagaacatcttcatcattgaccccagatcctgcgacattcacaccaacgtctccatggatagtgttccatataccgagtgggagctgtcagtgattattcaggataaggggaatccccagttgcatactaaagttctgttgaaatgtatgatctttgaatatgccgagtctgtcacatctacagcaatgactagcgtgagccaagcttcattggacgtgagtatgatcatcattatatcgcttggagctatatgtgccgttctgctcgtcattatggttttgttcgccaccaggtgtaacagagagaagaaagatacaaggtcatataactgccgcgttgctgaatccacataccagcatcaccccaaaagaccaagtaggcagatccataagggcgatatcaccctcgtccctactataaatggtacattacccatccgatctcatcaccggtcgtccccaagcagcagccctactctggaacggggtcagatggggtccagacagtctcataactcacatcagtctctcaatagccttgtgactatttcttctaatcacgtgccagaaaacttcagcctagaacttacacacgccaccccggcagtagaggtgtcccagctactctcaatgctccaccagggacagtatcagcctcgccccagcttcagagggaacaagtacagtaggagttatcgttacgcattacaagacatggacaaattcagtttaaaagactcaggcaggggtgattctgaggcaggtgactcagactatgatttaggccgcgattcaccgattgaccggctgctgggagaaggattcagcgatctattccttaccgacgggcgcatccccgcagctatgagattgtgcaccgaagagtgtcgggtcttgggccactctgatcagtgttggatgccgcccctccccagtccaagtagtgattaccgctcaaatatgtttattcccggagaggagttccctacacagccccagcaacagcaccctcaccagagtttggaggatgacgcgcagccggctgattccggtgagaagaagaagtctttttccacctttgggaaggatagtccgaatgatgaagacacaggagacacctcgactagtagtctgttgagtgaaatgtcaagcgtgttccagaggttgctccccccaagtctggacacgtactccgagtgctccgaagtggatagatccaatagcctggagcggcgcaaaggccctctgccagctaaaacagtgggctacccgcagggtgtggcagcttgggcggcttctacacattttcagaaccctactacaaattgcgggccaccactcggaacccactcatctgtacagccttcttcaaaatggctaccagcgatggaggagatcccagaaaactacgaggaagatgatttcgataacgtactgaaccatttaaatgatggcaagcacgaactgatggatgctagcgagctagtggcggaaatcaacaaactcctccaggatgtcagacaatcttag

SEQ ID NO: 131073 - DNA, 3306 bp, synthetic construct
  misc_feature 1..3306: note = Description of Artificial Sequence: Synthetic coding sequence
  source 1..3306: mol_type = other DNA
atggagagtctgctgttgccagttttgctcttgctcgcaatactgtggacacaggcagctgctctgattaacttgaagtacagcgttgaggaggaacaacgggctgggacagtgattgcaaacgtcgctaaagacgctcgagaggcaggctttgcgcttgatccaagacaagcttctgcctttagagtcgtgagcaattcagctccccatcttgtggacattaaccctagttctggcctgctggtgacgaaacagaaaatcgacagagatctcctttgtcgccagagtcctaagtgcatcatttctttggaagtaatgtcatccagcatggaaatctgcgttattaaggttgaaatcaaggatctcaatgacaacgcgccaagcttccctgccgcgcagatcgagctcgagattagtgaggccgcttcgcccggaacgcgtattccccttgattcagcctacgaccccgacagtgggtctttcggggttcagacttatgagctgacccccaacgagttattcggcctagagataaagactcgcggagatggtagccgattcgctgagctcgtcgtcgaaaaaagcttggaccgagagacacaatctcactacagcttcaggattacggccctggatggcggcgacccacccagacttggaaccgtcgggttgtccatcaaggtgacagactcaaatgacaacaaccctgtgttctctgaaagcacctacgctgtgtctgtgcctgaaaattcacctcccaatactcctgtgatccgccttaacgcctcggatcccgatgaaggtacaaatggacaagtggtctacagcttttacgggtatgtcaatgatcgcacccgggagctctttcaaatcgacccccactccggcctggttaccgtcacgggtgccctggactacgaggagggccatgtttacgaattggacgtccaggccaaagacttaggtcctaattcaattcctgcacattgtaaggtgacagtaagtgtcctggacaccaatgacaatcccccggtgatcaacttactttccgttaactcagaactcgtagaagtgtctgaaagtgctccaccgggatatgtgattgcgctcgtcagagtgtcagatcgggatagcggcttaaatggcagagttcagtgcaggttgttaggaaacgtccctttcagattgcaagagtacgaatcattttccactattctggtcgacgggcgtctagacagagaacagcacgatcagtataacctcacaatccaggctcgtgatggtggggtgcccatgttgcagtcagctaagtccttcacagtactgatcacggacgaaaatgacaaccaccctcacttttcaaaaccttattatcaggtgattgtccaggagaacaatacacccggcgcttatctgctttcagtgtctgcaagagacccagatctggggctgaacgggagcgtatcctatcaaattgtaccctcccaggtgagagacatgcctgtgtttacttacgtgagcatcaaccctaactccggcgatatatatgctttgcgcagctttaaccacgagcaaactaaggcttttgaatttaaggtgctcgctaaggacggcgggcttccttccctgcagagcaacgccacggtcagagttattatcctggatgttaacgataacacaccagtcattacagcgccaccccttatcaatggtacagctgaagtctacattcctcgtaactccggcatcggctatttggtaaccgtggtcaaggcagaggattatgatgaaggagagaacggaagggtgacgtacgatatgacagaaggagacaggggcttcttcgaaattgaccaggtgaatggtgaagttagaactacgcgtacatttggagaaagttcaaagagttcgtatgagctgattgtggtagcccatgatcacggcaagacttcactctctgcctctgcactagtgttgatctacttgtccccagctctcgacgctcaagagtcaatgggaagcgtgaatctgtccttaattttcattatcgccctcggatctattgccggtatcttatttgttacaatgattttcgttgctataaagtgtaagcgagacaacaaagagatcaggacttataactgccgcatcgccgagtactcctatggccatcaaaaaaaatcatctaagaagaagaaaatcagtaaaaacgatattcgacttgttcccagggatgtcgaagagactgataaaatgaatgtggttagctgctctagcctcacatcttccctaaactatttcgattaccaccagcagaccctcccgcttggctgccggagatccgagagcacttttctaaacgttgagaatcagaatacacggaatacatccgctaaccacatctatcatcactctttcaacagccaaggcccacagcagccagacctcatcatcaatggtgtaccactgcctgaaactgagaactattcattcgattccaattatgtaaactcacgggcacatttaattaagtcgtcctcgacctttaaagacctggaggggaactctctcaaagattccggacatgaggagtctgatcaaaccgacagcgagcacgatgtgcagcgttccctctattgcgacaccgcagtgaatgacgtgctgaatacatctgtgacaagtatgggttcccagatgccggatcacgaccaaaacgaagggttccactgtcgcgaagaatgccgcatcttgggacatagtgaccgatgctggatgccaaggaatccaatgcccattcggtctaaaagtccagaacacgtgcggaatattatcgctcttagcattgaggccaccgcagccgacgttgaagcttacgatgactgtggccctacaaaacggacctttgccacgttcggcaaggacgtgagcgaccaccctgctgaggagcgcccaaccctgaaaggcaagcggaccgtcgacgttaccatatgttccccgaaggtgaacagcgtaatccgggaggctggcaatgggtgcgaggcgatctcacctgtaacatccccactccaccttaagtctagcttacctacaaaaccctccgtgtcttacaccatcgcgctggcccctcctgctcgtgacctggaacagtacgtgaacaatgtgaataatggccccacacggccctcagaggcggaaccaagaggtgccgactcagaaaaagttatgcacgaagtgtcaccaatcttaaaggaaggtagaaataaggagtcccccggcgtgaaaagactgaaggacattgtgttgtag

SEQ ID NO: 131074 - DNA, 3447 bp, synthetic construct
  misc_feature 1..3447: note = Description of Artificial Sequence: Synthetic coding sequence
  source 1..3447: mol_type = other DNA
atggaatccctgttgctacctgtgttattgcttctagctatcctgtggacacaggctgctgccctgatcaatctgaagtatagtgtggaggaggagcaacgcgccgggaccgtgatcgccaatgttgccaaggatgcacgcgaggccggctttgccttggatccaaggcaggcctcagcatttagggtagtgtcaaattccgctcctcacttggttgacataaacccttcttcagggcttctggtaaccaaacagaaaattgacagggacctgctgtgtcgtcagagcccaaaatgcatcattagcttagaggtgatgtcatcatccatggaaatctgcgtgattaaagtggagattaaggacctgaacgataacgccccctcttttcccgcagcccagatagagcttgagatcagtgaagcggcctctcctggtactaggataccgttggactccgcctatgaccccgatagcggaagtttcggagtacagacgtacgaattgacacccaacgaattgtttggactcgagataaagaccagaggcgatggaagtcgctttgcagagttggtggtcgaaaagagcctcgatcgcgagacccagagccattactcatttcgtattacagccttagatggaggcgatcctcccagactgggcacagttggtctcagcataaaagttacagattctaacgacaataatccagtgtttagcgagtccacatacgcagtgtcggtaccagaaaattctccgcctaacacgccagtgatccgtctgaacgcttccgatccagatgaggggactaacgggcaggtggtttactccttctatggatacgtaaacgaccggacacgcgagctgtttcagattgaccctcactccgggctcgtgacagtcaccggggccttggattacgaggaggggcatgtctacgaactcgatgtccaagctaaagacctggggcctaattcaattcccgctcattgcaaggtcactgtatccgtgctggacaccaatgataatcctcccgtgattaacctcctctcagtcaactccgagctcgtggaagtgtctgaaagtgccccacccgggtacgtcatagctctggtcagagtcagtgaccgagactcaggtttaaatggaagagtgcagtgcagactcctcggaaacgtcccttttaggttgcaagagtatgaatcattctctaccatcctagtggacggccgcctagatagagagcagcatgaccaatacaacctcacaatccaagccagggacggcggggtgccaatgctccagtctgccaagtcattcaccgtgttgattacagacgaaaatgataaccacccccacttttcaaagccctattaccaagttatcgtgcaggagaataatacgccgggcgcctatcttttgtcagtgtcagcaagggaccccgacctcggcctgaacggttcagtcagttatcagatcgtccccagccaagtccgagatatgcccgttttcacttacgtatctattaaccccaacagcggcgacatttacgctctacgctcctttaaccatgagcagactaaagccttcgagtttaaagttttggctaaagatggggggcttccatcgttgcaatcaaacgccactgttcgggtcatcattctggacgtgaacgataacacacctgtgattacggcccccccccttatcaatggcacggctgaggtatatatcccacgcaactcaggcataggatacctggtcacggtggtgaaagctgaggattacgatgaaggagagaatggacgtgtgacctacgacatgacagagggcgaccgtgggttcttcgagattgaccaagtcaatggggaggtcagaacgaccaggaccttcggggagtccagcaaaagctcttatgaactgatcgtagtggctcatgaccacgggaagacctctctcagcgccagtgccctggttctgatctacttatcgcctgctctggacgcacaagaaagcatgggctccgttaatctcagcttgattttcatcattgcactaggcagtatagccggtatcctgtttgtcactatgatcttcgtggccataaaatgtaaacgagacaacaaagagataagaacctacaactgttctaactgcttaacaattacctgtctgctcggttgtttcataaaagggcagaactccaagtgtctacactgcatttctgtatccccaattagcgaagaacaagacaagaaaacagaggaaaaagtgtcactccggggtaaaagaatcgcagagtattcctatggccaccaaaagaagtcatcgaaaaagaagaagatatcaaaaaacgacattcgactggtgccccgggacgtggaggagacagacaaaatgaatgttgtgtcttgttccagcttaacatcctcattaaactacttcgattaccatcaacagaccctgcccctcggctgccggcgtagcgagagcacgtttcttaacgtggaaaaccagaacacacgcaatactagtgccaaccatatttaccatcattcattcaactcccagggaccacagcagcccgatctgataattaacggtgtccctctccccgagactgagaactattcctttgatagcaattacgtgaatagccgggcccatctcattaaatcttctagtacattcaaggatcttgagggaaatagcctgaaggattctggacatgaggaatccgaccagactgatagtgagcatgacgtccagcgctccctgtactgcgatactgctgtcaatgatgtcctcaatacctctgtgactagcatgggatcacaaatgcctgatcacgaccagaacgaaggatttcactgcagggaagagtgccggattctgggacatagcgacaggtgttggatgccccggaacccaatgccaatccggtccaagagccctgagcatgttaggaatatcattgcactgtccatcgaagcgaccgccgcagatgttgaagcgtacgatgactgcgggcccaccaagcggacgtttgcaacattcggaaaggacgtctccgaccaccccgcagaggaaaggcctacgctgaaggggaagaggacagtcgacgtgactatctgcagccccaaagtgaattccgtgatccgggaggccggcaatggatgtgaagcaatatctcccgttacctccccacttcatctgaagagcagtcttcctacgaagccaagtgtctcgtacactatcgccttggccccccccgctcgagaccttgaacaatatgtgaataatgtaaacaacgggccaacccgcccttccgaagctgaaccgaggggcgcagatagcgaaaaggttatgcatgaagtcagtcctattttgaaggagggaaggaacaaagagagtccaggcgtgaaaagactgaaggatatcgtcctttag

SEQ ID NO: 131075 - DNA, 3303 bp, synthetic construct
  misc_feature 1..3303: note = Description of Artificial Sequence: Synthetic coding sequence
  source 1..3303: mol_type = other DNA
atggaaagcctgttactccctgtcctattactgttagccattttgtggactcaggcggccgcactaattaacctgaagtattccgtggaggaggaacaaagggcaggcaccgtgatcgctaatgttgcgaaagatgcaagggaggcaggatttgccttagacccgcggcaggcatccgcttttcgcgtggtgagcaatagtgcaccacatctagtggacattaatcccagttcgggactgctcgttactaaacaaaaaatcgatcgcgatttactgtgcagacagtccccaaagtgtataatctcgctcgaggtgatgagtagttcaatggagatctgcgtgatcaaagtggagattaaggatctgaacgataatgccccttcttttccagctgctcaaattgagttggagatatccgaagccgccagccccggcacccgcatccctctggattctgcttacgaccctgattccggatcatttggggtgcagacatacgagctgactcccaatgagttattcggtttggagattaaaactagaggagatggatcaaggttcgctgaactcgtagtcgaaaagagcttggacagagaaacccaatcacactatagcttcagaattactgccttggacggcggcgacccccctaggctgggcactgtgggcctgtcaataaaagtcaccgacagtaatgacaacaaccccgtcttttccgagtctacatacgccgtttctgtgccagagaactctccccccaacactcctgtgattcgccttaacgctagtgaccccgacgagggtactaatggccaggtggtttatagcttctacggatacgttaacgaccgcacacgcgagttgttccagatcgatccacactccggtctggtgacagtcaccggagcactcgattacgaagaagggcatgtgtacgagctggatgttcaggcaaaggatttgggacctaactccattcccgcccactgcaaggtgacggtttcagttcttgacaccaatgacaatcctcccgtgatcaacctgcttagtgtgaacagtgagctggtcgaggtcagcgagagcgctcctcccggctacgtaattgctttggtccgagtgtccgatagggatagtggcctgaacggccgcgtgcaatgccgattgctgggaaatgtaccatttaggttgcaggagtacgaatctttcagcactatcctcgtagacgggcgcttggacagggagcagcatgatcagtataatctgacaatccaggcacgcgacggaggggtgccaatgcttcagagcgccaaaagttttacagtgctgattaccgatgagaatgacaatcatccacacttctcaaaaccttattaccaggtcattgttcaggaaaataacaccccgggggcttacctcctgtctgtgtccgcgcgggatccggacctcggcctgaatggaagcgtttcttatcagatcgtcccaagccaggtgagggacatgcctgtctttacctatgtcagcattaacccaaatagtggcgacatttatgccttgcggtcttttaatcacgaacagactaaagcatttgaattcaaagtactggccaaggacggaggcctgcctagtctgcagtccaatgctacagttagggtgataattctggacgtgaacgataatacgccagtcatcacggcacccccattaatcaatggcacagccgaagtctacatacccagaaattctggcatcggttatctcgtgaccgtggtgaaggccgaagactatgatgaaggggagaatgggcgggtgacctacgatatgaccgagggcgatagaggctttttcgaaatcgaccaggtgaacggagaggtccggacaactcgaacttttggcgagtcttccaaatccagctatgagctgatcgtggtggcacatgatcacgggaaaacttctctcagcgcttccgcattggtgcttatctacctgtcccctgcccttgatgcccaagaatcaatggggagcgtgaatctgagtctgattttcataattgccctgggttctatagcgggtattctgtttgtgactatgatctttgttgccatcaaatgtaagcgggacaataaggagatccggacatataattgcaggatcgcggagtacagttatggacatcagaaaaaatcaagtaagaaaaaaaaaattagcaagaacgacattcgattagtgccccgagacgtcgaggagacggacaagatgaatgtggtgtcttgctcttctttaacttccagtctaaattattttgattatcatcagcagacgctgccactgggttgcaggcgatccgagtcgacattcttgaatgtggaaaaccagaacacaagaaatacttctgcgaaccacatctatcaccactccttcaactcacagggcccccagcagcctgacttaataattaacggtgtgcctctacctgaaaccgagaactacagctttgactctaattatgtaaattctagagcacatttaattaagagcagtaccttcaaggatctggaaggtaattctctgaaggattcaggtcatgaggaaagcgatcagactgattcagagcacgacgtccagcggtccctctattgcgacactgccgttaacgacgtgctgaataccagcgttacctctatgggcagccaaatgcctgaccacgatcaaaatgagggctttcactgtagggaagagtgcaggatactggggcattccgacaggtgctggatgccacggaatccaatgcccatacgctccaagagccccgagcacgtcaggaatataatcgccctctctatcgaggccactgccgccgacgtggaggcctacgatgactgtggcccaaccaagcgaacattcgctacattcggtaaggatgtaagtgatcaccctgccgaagaaagaccaacactaaagggaaagcgcactgtcgatgtaaccatctgctcaccaaaggtaaacagtgtgataagagaagcgggcaatggctgcgaagcaatttctcccgtgacaagccctctccacctgaaaagctctcttcccaccaaaccttctgttagctacacgatcgcgctggcccccccggctagggatctggaacaatatgtcaataacgttaataacggtccaacccgtcccagcgaggctgaaccaaggggtgctgactcagagaaggtgatgcatgaagtcagccccatactaaaggaggggagaaacaaagagtcacctggagtgaaacggctgaaagacatcgttctatag

SEQ ID NO: 131076 - DNA, 2094 bp, synthetic construct
  misc_feature 1..2094: note = Description of Artificial Sequence: Synthetic coding sequence
  source 1..2094: mol_type = other DNA
atgttcacgttagacgtggaggaaaacgagaacggggagcgtaccccttacttgattgtgatgggagctctggatcgagagacacaggaccagtatgtctctataattatcgcagaggatgggggctcccctccactgctagggtccgccacactgacgataggcatatctgatattaatgataattgtccgttgttcaccgacagccagataaacgtgaccgtgtacgggaatgcaaccgttgggactcctatcgctgccgttcaggccgtggataaagatctgggcaccaatgcccagatcacctacagctattcccagaaagtccctcaggcttccaaagacttgttccatttagacgaaaatacaggagtaatcaaactgttttctaaaattggaggcagtgtgctggaatcccacaagcttaccatcctcgcgaatggccccgggtgtattccagcagttatcacagcgttggtgtcaattatcaaggtgatctttcggccacctgagattgtaccccgctacattgccaacgaaatcgatggtgtggtatatctaaaggagttggagccggtgaatacccccattgcattttttaccatacgagatccagagggcaagtataaggttaactgttatctggatggagaggggccctttcgcctgtccccctacaaaccttacaacaatgagtatttgttggagaccaccaagccaatggattacgagttgcaacaattttacgaagttgctgtcgtcgcctggaacagtgaaggtttccatgtcaaaagagtgataaaagtgcagcttttggacgataacgataacgctccgattttccttcagcccctcatcgaattaacaatagaggagaataactctccaaatgcctttctgaccaagctctatgcaacagacgccgactccgaggagaggggccaggtttcatatttcctcggccctgacgcgccaagttacttctcccttgattcagtcactgggatactcacagtgtccactcagctcgacagagaagaaaaagagaagtatcggtatactgtgcgagcagtggattgcggcaaaccgccaagagaatccgtggcaaccgtggctttgactgttcttgataaaaacgacaactcaccgagatttatcaataaggatttctcatttttcgtgccggagaacttccccggttatggggaaatcggcgtgattagcgtgacagacgccgacgcaggtcgaaacggttgggtggccctctcagtcgtgaatcagagcgacattttcgtaatagacacaggtaaagggatgttgcgagccaaagttagtctcgaccgggagcagcaaagctcatacacgctctgggtggaagcagtagatggtggtgaacccgctttgtccagcaccgctaagatcacgatcctgctactggacattaacgataacccaccactagttcttttcccgcagtcaaatatgagttacctgctggtgttaccaagcactttacccggctcacctgtgaccgaggtatacgcagtcgataaggatactggtatgaatgcagttatcgcctatagcataatagggagaagaggaccgcgcccagaatcattccggattgatccaaaaacaggtaatatcaccctagaggaagcccttctgcagaccgattacggactgcataggctgctggtgaaagtttccgatcacggctatcccgagccactgcattcaactgttatggtgaaccttttcgtgaacgacactgtttctaatgaatcctatatcgagagtcttctgaggaaggagcccgagattaatatcgaggagaaggaaccacagatatccatcgaaccgacgcataggaaggtggagtcggtgtcatgtatgccaactctcgtggcactgagtgtgatctcccttggatcgattaccctggtgacaggcatgggtatttatatttgcttgagaaaaggcgagaaacaccctcgagaagatgaaaatctggaggttcagattcccctgaagggcaaaatcgatttgcacatgcgcgaaagaaaaccaatggatatttccaacatttag

SEQ ID NO: 131077 - DNA, 2856 bp, synthetic construct
  misc_feature 1..2856: note = Description of Artificial Sequence: Synthetic coding sequence
  source 1..2856: mol_type = other DNA
atgaggggtcgaggcaatgcacgctcctcccaggccctcggcgtctcttggtgccccgcaacatggcacccacggttagatatgggtcgcctgcatcggccccgatcttccacaagctataggaacctgcctcatttattcctgtttttcctcttcgttggcccattctcctgccttggttcttattctcgcgctactgagctgctgtactccctgaacgaaggcctgccagctggagtactaatcgggtctctggcggaggatttaaggcttctccctcgttccgcaggcagaccagacccgcagtctcaacttcctgagcgcaccggtgctgaatggaaccctcctctgtccttctctttggcctcccgtggactgagcggacagtatgtgacacttgacaacaggtccggtgagctccataccagcgcgcaggagatcgatcgcgaggccctctgtgttgaagggggcggggggacagcatggtcagggtctgtgtccatatccagcagtccatcagattcctgcctccttctcctggacgtattggtgttgccccaggagtacttcagattcgtaaaggttaaaatcgccattcgagacataaacgacaatgctccgcaattccctgtcagccagatatcggtttgggtgcctgaaaacgcaccagttaatactcgcctagcgatcgaacaccctgctgtggatccagacgtaggaatcaacggagtgcaaacctatagactgctcgactatcatggaatgtttacattagatgtagaagagaatgaaaacggggaaagaacaccatatctcattgtaatgggcgccctggacagagagacacaagatcagtacgtgtccataatcatcgccgaggatggtgggtcgccacccctcctgggctctgccacactaactattgggatttcggacatcaatgataactgccccctgtttacagattcacagattaatgtgaccgtgtacggaaatgccacagtaggcacccctattgcggctgtccaggcagtggataaggacctcggaacgaatgcacagataacatactcctattctcagaaggtcccacaggcatcaaaggacttattccacctggacgaaaacacaggtgtgataaagctcttttctaaaattggaggatccgttctggagtcacataagctgacaatcctcgccaacggtcctggttgcattcccgctgtgattacggcactggtcagtataatcaaggtgattttccgacccccagaaatcgttccccgatatattgcaaatgagatcgatggcgtcgtctaccttaaagagctggagccggtcaatacacctattgctttcttcacaattcgcgacccagaggggaagtacaaggtgaactgctaccttgatggggaggggcccttccgcctgtccccctacaagccttataacaacgagtacctgcttgagacaaccaaacccatggattacgagcttcagcaattttacgaggtggcggtggtggcatggaatagtgaaggctttcatgtgaagcgagtcatcaaagtgcaactcctggacgacaatgacaacgcacctatattcttgcaaccactgatcgaactgactattgaagaaaataactcacccaacgcttttttgactaaactctacgccacagacgctgattccgaagaaagaggacaggttagctacttcctgggcccagatgcccctagttatttcagccttgattcagttactgggatccttaccgtatctacacaattggaccgggaagaaaaggaaaagtacagatacactgtacgcgccgtggattgcggcaagcctccacgggaaagtgtcgctaccgtggcactgactgttctcgacaaaaatgacaacagccctcgttttatcaacaaagatttttcattcttcgttccagaaaacttcccgggttatggagagatcggcgtgatctccgttaccgacgcagatgctggacggaatggctgggtcgccctaagcgtcgttaatcagagcgacatctttgtgatagacactggcaagggaatgcttagggccaaagtatcactcgacagggaacagcagtctagctacacactgtgggtcgaggctgtggacggtggcgagcccgctctctcgtccacggccaaaatcacaatcctgttgctggacatcaacgataacccccctctcgtcttgttcccacagtctaacatgagttatctgttagtgctcccctccacgttgcctgggagtcctgtcacggaagtatacgctgtggacaaggataccggaatgaatgcagtcatcgcttactccataatcggtcggcggggccctcgccctgagtcatttcgaatcgatcccaagacagggaatataaccttggaggaagccctgttgcagacagattatgggcttcatagactgctggttaaagtcagtgatcatggctacccagaaccgctccattccacagtgatggtgaacctcttcgtgaacgatactgtgagtaacgaatcttacatcgagtctttactaaggaaagaaccggagatcaacattgaggagaaggaacctcagatttctatcgaacccactcaccgaaaggtggagtctgtctcatgtatgccaactcttgtcgcgctgtctgtaattagcctcggatcgatcaccttagtgaccggtatggggatctacatttgcctgcggaaaggggagaaacacccgagggaggacgagaacttggaggtgcagatcccacttaaggggaagatagacctccacatgagggaaaggaagcctatggatatctctaacatttag

SEQ ID NO: 131078 - DNA, 2856 bp, synthetic construct
  misc_feature 1..2856: note = Description of Artificial Sequence: Synthetic coding sequence
  source 1..2856: mol_type = other DNA
atgcgtggaaggggtaacgcccggagctcccaggccttgggggtcagctggtgtccagcaacttggcatcctaggctggatatggggaggcttcaccgccccaggagctcaacctcatacaggaacctgccccacctcttcctgttcttcctgttcgtggggccatttagttgcctcgggtcgtactccagggccacagagctgttgtactccctcaatgaggggctcccagccggtgttttgatcggcagccttgccgaggacctgcggttactgcccaggagtgctgggaggcccgaccctcagagccagctacctgagcgcactggcgcggagtggaatccacctctgtcattttcgcttgccagccgtggactttctggacagtacgtgacacttgacaacaggagcggcgagctgcatacaagtgctcaggagatagaccgcgaagctctgtgtgtggaaggtggaggcggtacagcttggtctggttccgtctcaatttcctctagtccttccgattcatgtctgctgctgcttgacgtccttgtcctgcctcaggagtattttagatttgtaaaggttaagatcgccatcagggatatcaatgataatgctccccaatttccagtgagtcagatctcagtctgggttcctgaaaacgccccagtaaataccagactggccattgagcatcccgccgtggaccccgatgtggggattaatggcgtgcagacgtaccgtctgctggactatcacggcatgttcacgcttgatgttgaggaaaatgagaatggagagcgtaccccatatctgattgttatgggcgcactggaccgagaaacacaagaccagtatgtgagtattattattgctgaagacggagggtcccctcccttgctgggtagcgcaaccttgacaatcggaattagtgatattaatgataattgtccactgttcacagacagtcagatcaacgtgaccgtctacggaaacgccactgtgggtaccccgatagccgcggtacaggcagtggacaaggatctggggaccaatgctcaaattacctacagctatagtcaaaaggttcctcaagcgtccaaagatcttttccatttagatgagaacacaggggtgattaaattattctcaaaaatcggtggcagtgtgctggagagccacaagcttacaattctggccaatggccctggatgcatacccgcggtgatcacagctctggtgtccatcataaaggttattttcagaccccctgagatcgtcccgagatacattgccaatgagatcgatggggtcgtgtacctcaaggagctggagccagtgaatacgcctatagctttctttacaatccgcgatccagagggaaagtacaaggtgaattgttatctcgacggcgagggccctttcaggctgagcccctacaaaccatacaacaacgaatacctgctcgaaaccaccaagcctatggactatgagctgcagcagttctacgaggtagcagtggtggcttggaatagtgaaggttttcacgttaagcgggtgatcaaggtacagcttctagatgacaacgataacgcgcccatctttctccagccacttatagagctgaccatcgaagaaaacaatagtcctaacgccttcctcacaaagctgtacgctacagatgcagactccgaggagagggggcaagtgtcctactttttaggacctgatgctccttcttacttctccttagatagtgtgactggtatcctgactgtgtccacgcagttggaccgtgaagaaaaagaaaagtatagatataccgttcgcgccgtcgactgcggcaaacctccgcgcgagagcgtagccacagtagccctcacagtgctcgataagaacgataacagcccacgtttcattaataaagacttctctttcttcgttccggagaacttccctggctacggagagatcggggtcatctcagtcactgatgctgacgccggcaggaatgggtgggtagctctgtctgttgtaaaccagtccgatatcttcgtaatagacactggcaaggggatgctccgcgcaaaggtttccctcgatagagaacaacagtcaagctacactctatgggtggaggctgtagacggaggcgagcccgccttaagcagtacggccaagattactatcctcctactggacataaatgacaaccctccactggtcctgttcccgcaatcaaacatgtcttatttactcgtactgccctctacgctgcctgggtcccccgtgactgaagtgtatgcagtcgacaaggacacgggaatgaacgccgtgattgcctactcaattatcggaagacgggggcccaggccagagtctttccggattgatcccaagactggcaacataacgctagaggaagcgctgttgcaaacggactatggtctgcaccgcctcctcgtgaaggtgtctgaccatgggtatcccgagccactgcattcgaccgtaatggttaacctatttgttaacgatactgtatctaacgaaagttacatagagtccctactacgcaaggagccagaaattaatatcgaagaaaaagaaccgcagatttctatcgagcccacacaccggaaggttgagtctgtatcctgcatgccaacattggtggcacttagcgtcatctccctgggctccatcactctagtgacagggatggggatttacatttgtctgcgtaaaggggagaaacaccctcgagaggatgaaaatttggaggtgcaaatccccttaaaaggtaaaatcgatctgcacatgagagagagaaagccaatggacatcagcaacatctag

SEQ ID NO: 131079 - DNA, 3603 bp, synthetic construct
  misc_feature 1..3603: note = Description of Artificial Sequence: Synthetic coding sequence
  source 1..3603: mol_type = other DNA
atgttaagaatgcgaactgcaggatgggccaggggctggtgtctggggtgttgcctgctgctgcctctcagccttagtctagctgcagcgaagcagctcctacggtatagactggctgaagaggggcccgcagacgtacggatcggaaatgtggcgtctgacctggggatcgtgaccggcagcggtgaagtcacattctctcttgagtctggctccgagtatctgaaaatagataacttgaccggagaactcagcactagcgaacgcagaattgatcgcgaaaagttacctcagtgtcaaatgatcttcgatgagaacgagtgttttctcgatttcgaagtttctgtcatcgggccttcccagtcatgggtagacttatttgaaggccaagtaattgtgctggacattaacgacaatactcccacgttcccgtcccccgtgctcactctcacagtggaagagaatcggcccgtggggactctgtatctactgccaaccgccaccgatagagactttggaaggaatggcatcgagcggtatgagctacttcaagagcccggtggaggtgggagtgggggagaaagtaggagagccggggccgccgattccgcaccgtacccgggtgggggggggaacggcgccagtggtggagggtcaggcggtagcaaacgtcggctcgatgcatccgagggaggtggagggacaaatccgggcggacggtcgtctgtcttcgagttacaggtagccgatacacctgatggagagaaacagccgcaactgatcgttaagggggtttatgaagcggacctagcagagaatagtgcacccgggacacctatactccagttgagagcagcagatctggatgtgggcgtgaatgggcagatagaatatgtgtttggcgctgctactgagtccgtccgccgccttctccggctggacgagacgtcaggctggctgagtgttctacatagaattgatcgagaagaggtgaatcagctgaggttcactgttatggcccgcgaccggggccagccccccaaaacagacaaagcaacagtggtcctaaacatcaaggacgagaacgacaatgtgccctccattgaaataaggaaaataggacggatccctctaaaggatggcgtggcaaacgtggccgaggacgtgctggtggacacgcctatcgccttagttcaggttagtgaccgggatcagggcgaaaatggtgtggttacctgcacagtggttggcgatgtccccttccaattaaaacccgcaagtgacacagagggcgatcagaacaaaaagaaatacttcctgcacacatctacccctttggactatgaagccaccagggagttcaatgttgtcatcgtggctgtggatagtggatctccgtccttgtcgagcaataattctctgatcgtcaaggttggggacaccaacgacaatccccccatgtttggccagagcgtggtggaggtctactttcccgagaacaacatcccaggcgagcgagtagccaccgtcttagccacagatgctgatagcgggaagaatgcggaaattgcgtactctcttgactcctcagtgatgggtatttttgccattgaccccgacagtggcgacattctcgtaaatactgtgcttgaccgcgagcaaaccgaccggtatgaattcaaggttaacgccaaagacaagggtatacccgtcttgcaagggtctacaaccgtgatagtgcaggtcgccgataaaaatgacaatgaccccaagtttatgcaagacgtttttacgttctatgtgaaagaaaacctgcagcctaactctcctgtcggaatggtcactgtaatggacgctgacaagggcaggaacgctgaaatgtctctatacattgaagagaataacaacatattcagcatcgagaacgacaccggcacaatctacagcactatgtcttttgatagggagcaccagactacttatacattcagggtgaaagccgtggatggaggggatcctccacgcagcgctacagccaccgtttccctctttgtgatggatgaaaacgacaacgcgcccactgtcacactgccaaagaatattagctacacccttctgcccccctctagcaatgtccgtaccgtggttgccaccgtgctggccacagactctgacgacggcatcaacgccgatctgaactattccatcgttgggggtaatccctttaagctcttcgaaatagacccaacatccggcgtcgtatcactcgtcggaaaactgacccagaaacactacggattgcataggcttgtcgtacaagtgaatgatagcggccagccgagccagagtacaacgactcttgtgcacgtatttgtcaatgagagcgtgagcaacgcgaccgctattgactcacagatcgcacggagcttacacatacctcttacccaggatatcgcaggggatccatcctatgagatttccaagcagagattgtctatcgtgatcggcgtcgtcgcgggcattatgaccgtgattctgataatattaatagtggtcatggctcgctattgtagatctaaaaacaagaacggttatgaagctggcaagaaagatcacgaagatttcttcaccccacagcaacatgacaagtccaagaaacctaagaaagataaaaagaacaagaaatccaagcaacccctgtactcctcaatagttaccgttgaagcgtccaaacccaatgggcaaaggtacgactccgtgaatgaaaagcttagcgattccccatctatgggacggtacaggtccgtaaatggcggaccaggtagcccggacttggcaagacactataaaagttcatctcctctccccacagttcagttacaccctcaatcccctacagctgggaaaaaacatcaggccgtccaggatttgcccccagccaatacgtttgtgggcgcaggcgacaatatctccattggctccgaccactgtagtgaatactcctgccagaccaacaataagtattcgaagcagcccttccggagggtcacgttctctgtggtttctcagccacaagacccccaccagggttcactgcaatcttgctatgattcgggtctggaagagtccgagaccccatccagcaaatctagctccggtccaaggctcggggccctgccccttcccgaagacaattacgaacggacaacgcccgatggcagcgtagactctaggccactcccagacgtggctctgactggcaaatgtactagggaatgtgatgagtacggacattcagattcctgttggatgcccgtccgaacgtccccggaaaggaaaaagagccagcccaagctgagtacattcatgccggtggatgagcgcggctcacaggaaaaattggcaaacggggaggcagcaatcatgggggatagaaatcgcaatttattgaacaagaagctgacatcaagttacgagaccttctcggccgcaagtttcagtaaaaacgaagaagccaaccccgaggatatcccactgaccaaaaccggcgagtacaaacccagcccagtgaacacacttacgcgaagggaggtgtacctgtag

SEQ ID NO: 131080 - DNA, 3210 bp, synthetic construct
  misc_feature 1..3210: note = Description of Artificial Sequence: Synthetic coding sequence
  source 1..3210: mol_type = other DNA
atgctgcgtatgcggacggccggctgggctcgaggctggtgcctcggatgctgcttactgctgccactctccctgtctctggctgccgccaaacaactgttgcgatatcgactggctgaagaaggaccggccgatgtccgcattggcaatgtggcatccgatctgggaattgttacaggatccggggaggttactttctctctagagagcggttctgagtatttgaaaatcgataatctgactggtgaactgagtacttccgagcgtcgcatcgatagagagaagcttccgcagtgccagatgattttcgatgagaacgagtgtttcctggacttcgaagtatcagtcatcggtcccagtcagtcgtgggtagaccttttcgaaggccaggttattgttctggacattaacgataacaccccaacattcccgtctcctgtgctgactctgacagtggaagaaaatcggcccgttgggacgctgtacctcctcccaaccgctaccgatagggacttcggccgcaacggaattgaacgttacgaattactgcaagagcccggcggggggggttccggcggcgagtcacgaagagcgggggccgccgattccgcaccctatcccggcggtggcggtaacggggcatctggcggcggctctgggggcagcaagcgaagattggacgctagcgagggtggcggcgggacaaaccctgggggccgatcaagtgtgttcgaactgcaggtcgccgatactcccgatggcgagaagcagccccagctgatcgttaaaggtgccttggatcgagaacaacgtgactcctatgagctgaccctccgtgtaagagacgggggcgaccctccgaggtcgtcccaggctatcctccgcgtgctgatcactgacgtgaacgacaactctccgagattcgagaagtccgtttatgaggccgacctcgccgagaactcagcaccagggacacccatcctacaactgcgcgcagccgacttagatgtgggcgtgaacggccaaatcgagtacgtcttcggcgcagcaacggagtctgtaaggcggttgcttcgccttgatgaaactagtggatggctgtccgtattgcacagaatcgaccgagaggaggttaatcagcttcgttttaccgtgatggcccgggacagaggacaaccaccaaagactgacaaggctacagtggtgctgaacatcaaagatgagaacgataacgtaccttccattgaaattcgcaagataggaaggatccctctcaaggacggggtggcaaatgtggccgaggacgttctcgtagacaccccaattgcacttgttcaggtctccgaccgcgaccagggcgaaaatggggttgtcacatgtacagtggtgggcgacgtacccttccaactcaagccagcatccgatacagaaggcgaccagaataaaaaaaaatattttcttcataccagcacccctctggattacgaggccacccgggaattcaacgttgtgatcgtggcagtcgactccggaagtccctcactctcaagtaataatagcctgatagtaaaggtgggagacactaacgataatccgcctatgttcgggcagagcgtggtggaagtgtacttccccgaaaacaacatccctggcgagcgagtggccacagttctcgccacggacgcagactcaggtaagaacgctgaaatcgcttactctctggactccagcgtgatgggtatcttcgccattgatcctgattccggagacattctggttaacaccgtattggacagagagcagacagacagatacgagttcaaagtcaatgctaaggataagggcattccagtcctgcagggcagtactacggtaattgtgcaggtcgccgataaaaacgataacgatccgaaattcatgcaggacgttttcaccttttatgtgaaagaaaatctgcaaccaaattctcccgtcggcatggttaccgtgatggatgcggataaaggtcgcaatgccgaaatgtccctttatatcgaggagaacaacaacattttttccattgagaatgataccggaacaatctactctaccatgtcattcgatagggaacaccagacgacatacacgtttagagtcaaggctgtggacggcggcgatccaccccggagtgccacagctacagtcagcctcttcgtcatggatgagaacgataatgcaccaactgtcactctaccaaagaacatttcctataccctattgcctccatccagcaacgtccgcacagtggtcgctactgtgctcgccacagattctgacgacggaataaacgcagatctgaattactctattgtggggggtaatcccttcaaactgttcgagatcgaccccacctcgggcgtggtgtccctggttggaaagctcacacagaagcactacggccttcaccgtctggtcgtccaggtgaatgactctgggcagcctagccaatccaccaccaccctggtccatgtttttgtaaatgagagcgtttccaacgcgactgcgatcgatagccagattgcccgaagcttgcacatacctctgacacaggacatcgcaggagacccaagctatgagatctccaagcagagactgagtattgtgattggggtcgtagcaggcataatgactgtgatccttatcatcctcatcgtagtgatggctcgatactgcagatcgaagaataagaacggatatgaggcgggcaagaaggatcatgaagacttcttcacaccacagcagcacgacaaatccaaaaagcctaaaaaggataagaagaacaagaaatcaaagcagccactctattcttctatcgtcacagtcgaagcaagtaagcctaacggtcagcgttacgattcggttaatgagaagctctcggactccccctccatgggtcgataccggtcggtgaatgggggacccgggtccccagatttagcgcgccactataagagcagcagtcccttgccgactgtacagttacatccccagtctcccacggcgggaaaaaagcaccaagccgtccaggatctcccacccgctaatacctttgtgggcgccggggataacatctctattggaagcgaccattgctctgaatatagctgtcagacgaacaacaaatattccaaacagatgcggctacacccttacataacggtctttggctag

SEQ ID NO: 131081 - DNA, 3768 bp, synthetic construct
  misc_feature 1..3768: note = Description of Artificial Sequence: Synthetic coding sequence
  source 1..3768: mol_type = other DNA
atgcttcgaatgcggacagctggttgggcccgtggctggtgcctcggatgctgccttttactgcctctgtctctgagccttgcggcggctaaacagttgttacgctaccgtctggccgaagaagggcccgccgacgtcagaatcggcaacgtggcaagtgacctcgggatcgtgacaggttcaggtgaggtgactttttcactggaaagcggatccgaatacctgaagattgacaatctgaccggcgagttgtccacgagcgaaaggcgcatagatagagaaaaattgccacagtgtcagatgatatttgacgaaaacgagtgcttcttggactttgaggtgagtgtaataggcccttcacagagctgggtcgatctctttgaaggccaggtcatcgttctggacatcaacgataatacacctactttcccatcccccgtgctaactcttaccgtggaggagaaccggcccgtgggcacactgtacctgctgcccactgcaactgatagggactttggtcggaatggcatcgagcggtacgagctgctgcaagaacctggtgggggtgggtctggcggagagagcagacgtgctggagccgcggacagcgccccttacccaggcggtggcggcaacggggcttccggcggggggtctggggggtcgaaacgacgattagatgctagtgaaggcgggggagggactaatcctggggggcggagctcagttttcgagctgcaggtggccgatacccctgacggggagaaacagcctcaactgatcgtcaagggagcgctggacagggagcaaagggattcttacgagttgacactgcgggtgcgagacggaggcgatcctcctcgcagcagccaggccatccttcgagtgctcatcaccgatgtgaacgacaactcgcctcgattcgagaagtctgtgtacgaagcagatttggcagaaaacagtgctccaggtactccaatcctgcagttgagggcagctgacctggatgtgggtgtgaacggacagattgaatacgtctttggtgccgccactgagagtgtgcgacggctgctgcgtctagatgagacttctggttggttgtccgttctacatcgaattgatagggaggaggtaaaccagttacgatttaccgtgatggctcgcgatcggggccagcctccaaaaactgacaaagcgacagtcgttttgaacattaaggacgaaaatgacaacgtgccttctattgagatccgcaaaatcggaaggatcccactgaaggacggtgtggctaacgtggccgaggatgtcttggtggacacccctatagcactggtgcaggtgtcagacagggatcaaggggaaaacggtgtggtcacttgtactgtggttggtgacgttcccttccagctgaaacctgcaagcgacacagaaggcgaccaaaataaaaaaaagtactttctgcacaccagcacaccactggattacgaagctactagagagttcaacgtggtgattgtcgccgtggattctggttccccaagtctaagctcaaataatagtctgatcgtgaaagtgggcgacacgaatgataaccctcctatgttcgggcaatcagttgtcgaagtgtactttccagaaaacaacatccctggtgagcgcgtggccacggttctcgctacagacgccgattctggcaagaatgcagaaatcgcctattcacttgattcttctgtgatgggcatctttgcaatcgatcccgactccggtgacatactggtgaataccgtactggaccgggagcagacggatcgctatgagttcaaagtgaatgcaaaagataaaggcatccccgtgttgcagggctctacgaccgtgattgtgcaagttgccgataagaatgacaacgatcccaaattcatgcaggacgtttttacgttttatgtgaaagagaaccttcagcctaactccccagtgggaatggttaccgtgatggacgctgacaagggacggaacgccgagatgagcctctacatagaggaaaataataacattttcagtatagaaaacgacacaggtaccatctactcaacaatgtccttcgaccgggagcaccaaacaacatatacgttcagggtgaaggcagtggacgggggggacccccctcgatccgccaccgctaccgtcagcttattcgtgatggatgaaaatgataacgcccccacagtgacgctgccaaaaaatatttcctacaccttgttgcccccatctagcaacgtacgcactgtcgtggccacggtgctggcaacagattccgacgatgggattaacgctgacctgaattactcaattgtggggggcaatccgttcaagttgttcgagattgatcctacatcaggggtcgtctcgttagtgggcaagctgactcaaaagcactacggactgcatcgcttagtggtgcaggtaaacgattccggccagccctctcagagtactactactctggtacacgtgttcgtgaacgagagtgtctccaacgccacagctatcgactcacagatcgcaagaagcttacacatacccctcacccaggacattgctggcgacccatcctatgagattagcaaacagaggttgtccatagttatcggcgtcgtggctgggattatgaccgtgatccttataatactaattgttgtgatggccaggtattgcaggagcaagaacaaaaatggttatgaggccgggaagaaggatcatgaagatttttttactccccagcagcacgacaagtccaagaaaccgaaaaaagataagaaaaataagaaatctaagcagccactgtatagctctatcgtcacagttgaggcatcaaagcccaacggccagagatacgacagcgtgaacgaaaaacttagtgactctccaagcatggggcgctatcgttcagttaacggtggacctggtagtccagacctcgcccggcactacaagtccagctcccccctgcccaccgtgcagctgcacccacagagcccaaccgccgggaaaaagcaccaggcagtgcaggatctcccaccggctaacacgtttgtgggggcgggcgacaatatctccatcgggtctgaccactgctccgaatactcatgtcaaacaaataataaatattcgaagcagcctttcagaagagtgaccttttctgtggtgtcacagccacaagatcctcatcaggggagtctgcagtcctgttacgatagcggcctggaagagtctgagacaccctccagcaaatcttcctccggcccccgacttggagccctacccttgccagaggataattacgagcgaactacccccgatggcagtgtgggggaagcagagcacatggagaatgacagccgtcctctgccagacgtagcactcaccgggaaatgcacccgagaatgtgacgaatacgggcattcggactcttgctggatgccagtacggacaagccccgagagaaagaagtctcaacccaaattatcaacgttcatgccagttgatgagaggggcagccaggagaaattggccaatggcgaagccgccatcatgggagatcggaacagaaatttgctgaacaagaagctcactagcagttacgaaaccttttcggcggcatcttttagcaaaaacgaagaagctaatcccgaggatattccactcacgaaaactggcgaatataagccaagcccggtcaacacgctcactaggcgagaggtgtatctttag

SEQ ID NO: 131082 - DNA, 2922 bp, synthetic construct
  misc_feature 1..2922: note = Description of Artificial Sequence: Synthetic coding sequence
  source 1..2922: mol_type = other DNA
atgagccccgtgaggcggtggggctcgccttgcctgtttccattacagcttttctccctgtgttgggtgttatccgtggcccagtctaagacagtgcgttactctacttttgaggaagacgcacccggtacagtgatagggactcttgctgaagacctccatatgaaggtttcgggagatacgtcttttcgcctgatgaaacagttcaacagctcgttgttgcgtgtgagggaaggtgacgggcaacttacagtgggggacgcggggctggatagagaaaggttatgtggtcaggcacctcagtgtgtgctggccttcgatgttgtctcgttcagccaggagcagttcagactggtacatgtggaagtcgaggtccgggacgtgaatgaccacgcacccaggtttccgcgtgcacaaatccctgtggaggtgagcgaaggcgctgccgtgggaacacgcatcccgctggaagtacccgtggacgaggatgtgggagccaacggattacagaccgttcgcttagcagagccacattctccctttagagtggagctgcagacaagggctgatggagcccaatgcgccgatctggttctgcttcaagagctcgacagagagtctcaggccgcgtactctctcgaactggtggcccaggacggaggaaggcctccaagaagtgccacagccgccctaagtgtgcgcgtccttgacgccaatgaccacagccctgcatttccacagggcgccgtggcggaagtggaactagccgaggacgcaccggttggctctctgttgctcgacttggacgcagcagatccagacgaaggacccaacggggacgtcgtgttcgcgtttggagcacggacgcctcctgaggcccggagattgtttagactcgaccccaggagcggacgacttactttggcgggcccggtggattatgagcgccaagacacgtacgagctggacgtcagagcgcaggacagaggcccaggaccaagagccgcgacatgtaaggtaattgtgagaatcagagatgtgaatgacaacgctcctgatatcgccatcactcccttagccgctccaggagccccagcaacttctccctttgccgccgctgccgcggctgccgccctgggcggggcagacgcctcttctcctgcaggcgccggaaccccagaagctggagcgacctcgttagttcccgaaggggctgcccgcgagtcactggtggctctggtgagcacgtcagatagggactccggcgctaacgggcaggttaggtgcgcactatatgggcacgagcacttccgtctacagcccgcctacgcggggtcttatttagtggtgactgcagccagcctggaccgcgaacggatcgctgaatataaccttactttggtcgccgaggacagaggagccccgcctctgagaacggtgcgaccctacaccgtccgggttggggatgagaatgataacgcccctctcttcacccgccctgtctacgaggtctctgtgagggaaaataaccctcctggcgcttacttagctacggtagccgccagggaccgggacctgggccgcaatggacaggtgacctacaggctccttgaagccgaagttggccgggcagggggggcggtgagcacttatgtctccgtcgatcccgctacaggggccatatacgcactgaggagtttcgattacgaaacgttgcgtcagctggacgtcaggattcaggcttcagatggaggatcacctcagctgagctccagtgcactggtacaggtcagggtccttgatcaaaatgaccacgcccctgtgttagtgcatcccgctcccgcaaacggctccttggaggtggcggtacctggccgaaccgctaaagacacggtggttgcaagggtccaagcccgcgatgccgacgagggcgccaacggggaactggcctttgaactgcagcagcaagagccaagggaagctttcgcgattggacgccgtacgggtgagatattgctgactggtgatttaagccaggagccacccggtagggtgttccgtgccctgctggtcatctccgacggaggccggcctccattgaccactactgctacagtgtcgttcgtcgttaccgccggtgggggtagggggccagctgccccagcttctgccggatcccctgagcggagtcgccccccaggttcgcgccttggtgtgtctggaagcgtcttacaatgggatacacctttgattgttatcattgtgctggctggctcctgcaccctgttgttggcagcaataatcgctattgctacaacctgcaacaggcggaagaaggagccctatggcgcaagcccgggattcggcaaggagcccgctccacctgtcgctgtgtggaagggtcatagctttaatactatctcgggacgcgaggctgagaagttttccggcaaggacagcggtaaaggggattcagacttcaatgattctgacagtgacatttccggcgacgctcttaaaaaggacttgattaaccatatgcagtcaggactgtgggcttgtacagccgagtgcaagatccttgggcacagtgatcggtgttggagtccttcttgcagcggacccaatgcacacccttctccccaccctccggcccagatgagtactttctgcaaatcaactagcctaccgagagacccattgcggcgcgataattattatcaagctcagctccccaaaacggtgggcttacaatccgtctacgagaaagtacttcaccgggactacgataggactgtcactctgctcagccccccaagaccgggacggctgcctgatctccaagagattggcgtgcctttataccagtccccccctggcaggtaccttagtcccaaaaagggagcaaacgagaatgtatag

SEQ ID NO: 131083 - DNA, 3213 bp, synthetic construct
  misc_feature 1..3213: note = Description of Artificial Sequence: Synthetic coding sequence
  source 1..3213: mol_type = other DNA
atgagccccgtgcgccgttggggctccccctgtttgttcccactgcagcttttctctctgtgctgggtgctgtccgtggcacagagcaagaccgtccgctattctacgtttgaggaagatgctccaggcaccgtgattggcaccctggccgaggatctgcatatgaaggttagcggagacacgtcttttaggctgatgaagcagttcaattctagcttgttgcgcgtgcgcgagggtgatgggcagctgactgtgggcgacgctggcttggatcgggaacgtctgtgtggacaggcccctcagtgtgtgctcgcctttgatgttgtgtctttctcacaggagcaatttcgcctggtccatgtggaggtcgaggtgagggatgttaatgaccatgcgccacgttttccgcgcgcacaaatcccggtagaagtgagcgagggggctgctgtgggtacacggatcccgctggaagtgcctgtggatgaagatgtgggagctaacggccttcagaccgtcaggcttgccgagcctcactccccatttcgggtggaacttcagacaagggccgatggggctcagtgcgcagacctggtgttgttacaagaacttgatcgtgagtcccaagcagcgtacagcctcgaactggtcgctcaggatggcggcaggcctcccagaagcgccacggccgctctttccgtgcgggtcttggacgctaacgatcacagtcctgccttcccacaaggcgcagtggctgaggttgaacttgccgaagacgcgccagtgggtagcctgttgcttgatctggacgctgctgatcctgacgagggtcccaacggagacgtagtgtttgccttcggtgcccgaacaccacctgaggcaaggcggctttttcgtctggatcctagaagtggacggctaactctggccggtcctgtcgattatgagaggcaggacacgtatgaattagatgtgcgagctcaagaccgtggtcccggccctcgtgcagctacctgtaaggtaatcgtccgaattagggatgtgaacgataatgcccctgacatcgccattacacctctagccgctcctggtgcaccggctacctccccatttgcagccgcggccgccgccgccgccctcggcggtgcagatgccagcagccctgccggagcaggcactcctgaggcgggtgcaaccagcctcgtgcccgagggagccgcgcgcgagagtctggtggccctggtgtcaaccagcgatcgcgacagcggagccaacggtcaggtgaggtgcgccctttacggacatgaacacttcagactacagccagcctacgccgggtcttacctggtcgtgactgctgcctctctggacagggagagaattgctgaatacaatctgaccctcgttgcggaagatagaggcgcccccccactgaggacagtgcgaccctacaccgttcgcgtgggcgatgagaacgataatgcccctctgtttacacggccggtatacgaggtatcagtgagggagaacaatcctccgggcgcataccttgccactgtagccgccagagatagagacctaggacggaacggacaggtaacgtaccgacttctcgaggccgaagtgggtagggccgggggagccgtgtctacttacgtttcagtcgatccagcaactggggcaatttacgctctcagaagtttcgactacgagaccctccgccaactggatgtcagaatccaggcatcagacggcggatcacctcagctgagctcatctgcacttgtgcaggtacgggttctcgatcaaaacgatcacgcccccgtcctggtccaccctgctccagccaatggtagcctggaggtagccgtgcccggcaggacagcaaaagacaccgtcgtggcacgggtacaagcacgcgatgctgatgagggggctaatggggagttagcgttcgaactgcagcaacaggagccaagggaagctttcgccattggcaggaggacaggagagatactgctcacaggcgatcttagccaggagcctccggggcgggtgttccgcgcccttcttgtgattagcgacggtgggcggccccctctcaccacaacagcaacggtgagttttgtggtgaccgctggtggcgggagggggcccgctgcccccgcctctgccgggtcccccgagaggtcacgaccacctggctcacgactcggagtaagtggcagcgtgttgcagtgggatacgcccctgatcgttatcatcgtgctcgcagggagctgtactctcctgcttgccgcaatcatcgctattgcgactacatgcaacagaagaaagaaagaggtcaggaaggggggtgctttacgtgaggagagaccgggggccgccggaggcggtgcctccgcacctgggtctcctgaagaagccgcccgaggggccggcccgcgacctaacatgtttgatgtgctgactttcccgggtacaggcaaggctccatttggaagccccgccgccgacgcacctcccccagccgtggccgcagctgaggtgccgggctcagaaggtggaagtgccactggtgaaagcgcatgccattttgagggacaacagcgtctgcggggtgctcatgccgaaccttatggtgcctctccaggcttcggtaaggagcctgcaccacccgttgcggtttggaaaggacacagctttaatactatctccgggagagaggctgaaaagtttagcgggaaggactctgggaagggggatagcgattttaatgattctgactccgacatttctggcgacgccctgaagaaggatctgattaatcatatgcagtctggcttatgggcgtgtacggccgaatgcaagatcctgggccactctgaccggtgttggtcgcctagctgcagcggacctaatgcacacccttcaccacaccctccagcccaaatgtctaccttttgcaagagcaccagtctgcccagagatcctctaagacgcgacaactactatcaagcacaactgcctaagaccgttggtttgcagagtgtgtacgaaaaggtcttgcacagggattatgataggactgtcaccctgctgagccctcctcgtccggggcgcttacctgatctgcaggaaataggggtgcccctataccagagtccacccggacgctatctttctcctaaaaagggcgccaatgagaacgtgtag

SEQ ID NO: 131084 - DNA, 1791 bp, synthetic construct
  misc_feature 1..1791: note = Description of Artificial Sequence: Synthetic coding sequence
  source 1..1791: mol_type = other DNA
atgtcacccgtccggcgttggggctctccctgcttgtttcccttgcagctcttttctctgtgctgggtgctgtccgtagcccagagtaagaccgttagatattccacatttgaagaagacgcacccggcaccgttatcgggacacttgccgaggacctgcatatgaaagttagcggggatactagcttccgtcttatgaagcagttcaattcatcccttctgagggtgcgcgaaggagatgggcagctgacggtgggagatgccggactggaccgagagcggttgtgcggacaggcccctcagtgtgtcttggctttcgacgtggtgtctttttcacaggaacagtttaggttagtccatgtggaggtcgaagtccgtgacgtgaatgaccacgctccggttctcgtccacccggccccggctaacggttcactggaggtcgccgtgcccggtaggaccgccaaggacacggtggtcgcccgcgtacaggcccgcgacgccgatgaaggagccaatggagaattagcctttgagctgcagcagcaagaacccagggaggcctttgcaatcggccgacgcacaggcgagattcttttgacaggtgacctgtcccaggaacccccagggagagtgtttagagccttgttggtaatttcagacggtgggcgtccacctctgactaccacagccacagtctcttttgtggtgaccgccggcggcggcaggggaccagcagctcctgcttccgcagggagtcccgaaaggtccaggcctcctggttcccggctgggcgtcagcggaagcgtactgcagtgggataccccgttaatagtcataattgtgctggccggttcatgcaccctgctgctagctgctattatcgccatagctacaacctgtaatcgccggaagaaggaggtgcggaaaggcggagctctgagggaagagcgccctggggccgccgggggcggtgcaagcgcaccgggttctccggaagaggctgctagaggcgccggaccaagacccaacatgttcgatgttctgacattcccgggcacgggcaaagccccctttggaagcccagctgccgacgcacccccacccgctgtcgcagccgccgaggtacccggatctgaaggcggaagtgccaccggggagtctgcctgtcacttcgagggacagcaacgtctgcgtggggcccacgccgaaccctatggcgcctccccaggctttggtaaggaacctgccccccccgtagccgtgtggaaggggcactcattcaatacaatatctggccgggaagccgaaaagttttccggaaaagactctggcaagggagactctgacttcaacgattccgatagcgacatttctggggacgccctaaagaaggacctgattaaccatatgcagtcaggcctgtgggcttgtactgcggaatgcaagattctcggccactcagaccgatgctggtccccgtcatgctccggcccaaacgcgcaccccagcccacatcctcccgcccagatgagcaccttctgcaaaagtactagtttgcccagggaccctctgagaagggacaactattatcaggctcagctccccaagaccgtaggactccaatctgtgtatgagaaggttcttcaccgggactacgacagaacagtcaccctcttgtcccccccccggccgggaaggttgccggacttacaggaaataggggtgcctttgtaccagagcccacccggccggtatctgtccccaaaaaagggtgctaacgaaaacgtgtag

SEQ ID NO: 131085 - DNA, 2742 bp, synthetic construct
  misc_feature 1..2742: note = Description of Artificial Sequence: Synthetic coding sequence
  source 1..2742: mol_type = other DNA
atgagcccagtgaggagatggggatccccgtgcctgttcccacttcagttattttcactctgctgggttctttcagttgcccagtccaagacagtgaggtacagcacttttgaggaagatgcccccgggacagtcatcgggaccctcgcagaagacttacatatgaaagttagtggagatacttcattccggttaatgaaacagttcaattccagcctgttgcgcgtgcgggaaggagacgggcagctgactgtcggagatgcggggctggatagggaacgcctgtgtggtcaggcccctcagtgcgtgctggcattcgatgtcgtcagctttagccaggaacaatttcgcttggtccacgtggaggtggaagtacgggacgtcaatgatcacgctcctagattcccaagggcacagatccccgtggaggtctcagagggagccgccgtcggcacccgcataccactcgaggtgccagtcgacgaggacgtcggggccaatggcctccagaccgtccgccttgccgaaccccattccccttttcgcgtggaattacaaacccgggccgatggtgctcagtgcgccgatctggtgctcctgcaagaactggatcgcgaaagccaggccgcatacagtctagagctggtagcacaggatgggggcaggccacctagaagtgccacagctgcgctgagcgtgagagtcctggacgccaatgaccactcccccgccttccctcagggagctgttgctgaggttgagctcgcagaagatgcccctgtcggaagcttgctactggatcttgacgcggctgaccccgacgagggacccaacggtgacgttgtttttgcgtttggggcccgcactcctcctgaggcccggaggctgtttagactggatccgcggagtggaagactaaccctggcagggcccgtagactatgagcgccaagatacctatgagctggatgttcgggcccaggaccgcggaccaggaccccgggccgccacatgtaaggtgattgttcgaatacgcgacgtgaacgacaatgcacccgacatcgcaattaccccactcgcagcgcctggcgctggcaacctcaccttgcgacggaacggtcaggttacttaccgtctgctggaagcagaagtcgggagggctgggggagccgtaagcacttacgtaagcgtggacccagcgactggggcaatttacgctttaaggagcttcgattatgagaccctgcggcaacttgacgtccggatccaggcgagcgatggggggtccccccagttgtcctccagcgcactggtccaggtgcgagtcctggatcagaacgaccatgctcccgtacttgtgcatccagccccggccaatgggagcctggaagtcgcggtcccagggagaacggcgaaggacacggtcgtcgcaagggtacaggctagggacgccgatgagggagctaacggtgagctggccttcgaactgcaacagcaagagcctcgcgaggcgttcgccataggacggaggactggagaaatcctcctcactggtgacctgtctcaggaacctccaggacgcgtgtttcgagccctgctggttatcagtgatggaggccggccacctctcaccaccacggctactgtctcattcgtggtgaccgcggggggtggaagaggccctgccgcacccgctagcgccggcagtccggaaaggtcacgtcccccaggatcaagactcggtgtatccgggagcgtgcttcagtgggatacccccctgatcgtgataattgtgctggccggcagttgcaccttgctgctggccgctattattgctatagccacgacctgtaatcgaagaaagaaggaagttaggaaaggtggggcgctgcgcgaagagcggccaggagccgcgggcggcggggctagcgcccctggcagccccgaggaagctgccagaggcgccggccctagacctaacatgttcgatgtcctgacatttcccggcactggcaaagccccttttgggagtcccgccgccgacgccccaccaccagctgtggcagctgcagaagtacctgggagcgaagggggtagcgctacaggtgaatcagcctgtcattttgagggacaacagcgacttcgaggcgcccacgccgagccatatggagctagccccggatttggaaaggagccagctcctcccgtggccgtgtggaagggtcattcattcaacactattagtggccgggaggctgagaagttttcagggaaggattccggcaaaggggacagtgatttcaatgactcagacagcgacatctcgggggatgcattgaaaaaggacctgataaaccacatgcagtctggcctgtgggcgtgcactgccgagtgcaaaattctcggccactctgacagatgctggtcaccgtcctgttcaggacctaacgctcacccctcccctcaccctcccgcccagatgtcaaccttctgtaagtctacatctctccctagggatcctctgcgaagagacaactattaccaggcccagctgcctaaaaccgtgggcctccagtccgtgtacgaaaaagtccttcaccgcgactacgaccgaacagtgaccttgctaagtcccccccggccaggtcggctccctgatctgcaggagataggagtccccctctatcagtcaccacccggccgttatctgagcccaaagaagggggcaaacgaaaacgtctag

SEQ ID NO: 131086 - DNA, 3612 bp, synthetic construct
  misc_feature 1..3612: note = Description of Artificial Sequence: Synthetic coding sequence
  source 1..3612: mol_type = other DNA
atggaccttcgagatttctatcttttggctgcgttaatcgcctgccttaggctcgattcagccatcgcgcaggaacttatttacaccatccgtgaagaactccctgagaatgtgccaatcggcaacatccccaaagacttgaatatcagccacatcaatgccgcaacaggcacctctgccagcttggtgtaccggttagtttctaaggcaggcgatgcacctctagtcaaggtatcatcctccactggcgagatcttcacgacaagtaaccgtattgatcgggagaagctctgtgccggcgcctcatacgctgaagaaaacgagtgttttttcgaattagaagtggtgatacttccaaacgattttttcagactcattaagatcaaaattattgtgaaggacaccaacgacaatgcacctatgtttcccagtccagtgattaatattagcattcccgaaaacactctgatcaacagtcggttccccatccctagcgcaactgatcctgataccggatttaacggcgtgcagcactatgagctgctaaacggccagtctgtgtttggcctagatatcgtggaaacccccgagggcgagaaatggccacagctgattgtgcagcagaacttagaccgggagcagaaagacacttatgtaatgaagatcaaagtggaagatggaggcacgcctcagaagtcgtccacagccattctgcaggtcacggtcagtgatgtaaacgataatcgccctgtgtttaaagaaggacaggtggaggtgcacattcctgaaaacgcaccagtcggcacatccgttatacaactgcacgccacagatgcagacatcggaagtaatgcggaaatcagatatatcttcggggcccaggtcgctcctgcaaccaagaggctgtttgcactgaataacaccaccggactcattaccgtacagcgttctctcgatagggaagagactgccatccataaagtcaccgtgctggccagcgacggctctagcacacctgcacgggctacagtaacaattaacgtcaccgacgtaaacgataacccccctaacatcgaccttagatatatcatatctcctattaacggcacagtctacctctcagagaaggaccccgttaataccaaaatcgcccttatcaccgttagcgacaaggacaccgacgtcaatggaaaggtcatttgtttcatcgaaagggaggtgccgttccacctgaaagccgtgtatgacaaccagtatctgctggagacctcctccctcttggattatgagggaaccaaagaatttagtttcaagattgtcgcctccgatagcggaaagccaagtctgaaccaaaccgcgctcgtgcgggtgaagcttgaagatgagaacgataacccccctattttcaaccagccagtgatcgagttgagtgtatcggagaacaaccggcggggactgtatctgaccaccatctcagctaccgatgaggacagtggaaaaaatgccgatatagtatatcagctgggtcccaatgccagtttcttcgacctcgatcgaaaaactggggttctgaccgcctctagggtattcgaccgtgaagaacaagagagatttattttcacagtgaccgcacgagataacgggacaccccctctgcagagccaggctgctgtcatcgtgacagttcttgacgagaacgataacagtcctaagtttacacataaccacttccagttctttgtcagcgaaaacttgcccaagtactctactgtgggggttattaccgtaaccgatgccgatgctggcgaaaacaaagccgtgacgctttctatacttaacgataacgacaactttgtgctcgacccgtacagcggcgtaataaagagcaatgtgagctttgatagggagcagcagagtagttacacattcgatgtgaaggcaaccgatggcggacagccacctcgttctagtacggccaaggtaactattaacgtgatggacgtgaatgacaactctcctgtggtgatctcccctccttccaatacaagctttaagctggtgcccctgtcggcaataccaggttccgtcgtggctgaagtatttgcggttgacgtggacacggggatgaacgcggagttaaaatacactattgtgtctggtaacaataagggactgttccgaatagacccagtcactgggaacatcacgctcgaagagaaaccagcacccactgacgtgggacttcatcggctcgtagtgaacatcagcgacctcgggtatccaaaaagtctccacactctcgttttggtgtttctgtatgtgaatgatacagccgggaacgccagttatatatacgacctgataagaaggaccatggaaacgccactggaccgcaatattggcgactcatcccagccctaccagaatgaggactacttaactatcatgattgccattattgctggagccatggtggtgattgtcgtgatctttgtgacagtgttggtacgatgcaggcatgccagcagattcaaggccgcccagagatctaagcagggggccgagtggatgagcccaaaccaggaaaataagcagaataagaaaaagaaacgcaagaagcggaagtcacctaaatcctcgctgcttaatttcgtcacaattgaagaaagcaagccagatgacgcggtgcatgaacccattaacgggacgatttctttgcccgccgagttggaggagcaatcaattggtcggtttgactgggggcctgcaccccctaccacttttaagccaaacagtccagacctggctaaacattacaagagcgccagtcctcagcccgccttccaccttaagccagatactcctgtgagcgtcaagaagcatcacgtgatccaagagctgcccctcgacaacacctttgttggcggctgtgacaccctctccaaacgatcctcaactagcagcgatcacttctccgctagtgagtgtagctcccagggggggtttaagaccaagggaccgctacacacacggcagtcccaaagacgggttacctttcatctgcctgacggtagtcaagaatcttgctcagactccggcttaggggatcatgagcccgtaggcagcggtacattaattagccatccgctacccctagtgcagcctcaggatgagttttatgatcaggcatcgcctgataaacggaccgaggctgacggaaacagcgatcccaacagcgatggaccactaggcccccgaggactggcagaggctaccgaaatgtgcacacaagagtgcctggtcctgggacattccgataactgctggatgcccccagggctggggccatatcagcatcctaagagtccactcagcacattcgcccctcagaaagagtgggtgaagaaggacaagctcgtgaacggtcatactctgacacgcgcctggaaagaagatagcaaccgaaaccagttcaatgaccgcaagcaatacgggagtaatgagggccacttcaataacggcagtcacatgacagatatccccctggccaacttgaaatcgtataaacaagctggcggagctaccgagagccctaaagaacatcagctgtag

SEQ ID NO: 131087 - DNA, 3099 bp, synthetic construct
  misc_feature 1..3099: note = Description of Artificial Sequence: Synthetic coding sequence
  source 1..3099: mol_type = other DNA
atggacttgcgcgatttctatctgcttgccgctctaatcgcatgtttacgcctagatagcgccattgcccaggaactgatttacacaatccgggaagaactgccagagaacgtccctatcggtaacatccccaaggatctgaacataagtcatatcaacgccgctaccgggacatcagcctccttagtctacagactagttagcaaggcgggcgacgcaccattagtgaaagtttcaagtagcacaggagaaatctttaccacttcaaaccgtattgatcgagaaaagctgtgcgcaggggcatcctatgccgaagagaacgagtgcttttttgagctggaggtggtaattctgcctaatgattttttccggctgattaagatcaaaatcattgtgaaggacacgaatgataacgcccctatgttcccctcacccgtgatcaatattagcattccagagaacacgcttattaacagccggtttcctattccaagtgcaacggatcccgataccggcttcaatggcgtccagcactatgaactgctaaacggacagtctgtgtttggcttggacatcgtggagacaccagagggtgaaaagtggcctcagctaattgttcagcagaatctcgacagggaacagaaagatacttacgtgatgaagatcaaagtggaagatggcggcacccctcagaagtcatccacggcgatattgcaagtgacagtgtcagacgtaaatgataatcggccggtgttcaaagagggccaggtggaagtgcacattcccgaaaacgctccggtgggaacctcagttatccagttacacgcaaccgacgccgatatagggtctaacgcggaaatccggtacatttttggggcacaggtggccccagcaacaaagcgccttttcgctctgaacaatacgaccggactgattacagtacagcgaagccttgaccgcgaggaaaccgctatccacaaggttacggtgttggcaagcgacgggagctcgactcccgcccgcgccacggtaactatcaatgtaactgatgtgaacgataacccacctaatattgacctccgctacattatctctcccatcaacggcaccgtttacctatcagagaaggatcctgttaataccaagatcgctctgattaccgtatctgataaagatacggacgttaacgggaaggtgatttgttttatcgaaagagaggtgccctttcaccttaaagccgtctatgataaccaatatctgctggagacaagctccctcctggattacgagggaactaaagagttttccttcaagatcgtagcctctgattccggaaaaccgagccttaatcagacagcactggtgagagtcaaactcgaagatgaaaatgacaatccccctattttcaaccagcccgtgatcgagctgtccgtgtccgagaacaatcggcggggactgtacctgacaaccatctcagcaacggacgaagattcgggcaaaaacgcagacatcgtatatcagctgggccccaatgcaagttttttcgatctcgatcgtaaaactggggttctcactgcttcgcgcgtttttgatcgagaggagcaggaacgcttcattttcaccgttacagcccgagataacggaaccccacccctgcagagtcaggctgccgtcatcgtgactgttctggacgagaacgataattcacccaagtttacgcacaaccactttcagttcttcgtctctgagaatctgcccaagtacagcaccgtcggcgtgatcaccgtcaccgacgccgatgctggcgaaaacaaagctgtcaccttatccattctcaacgacaacgataacttcgtgttggacccatattctggggtaattaagagcaatgttagcttcgaccgtgaacagcaatcgtcttacacctttgacgttaaggctactgatggcgggcagccccctagaagctcaactgctaaagtcaccatcaacgtaatggacgtaaatgacaactcccccgtggtaatctcgcctccctcaaatacctcattcaagttagtccctctcagtgctatccccggctctgtcgtagcggaggtctttgccgtagacgtcgacacgggaatgaatgccgaattaaagtacaccatcgtgtctggaaataataaggggttgttccgcatcgaccctgttacgggaaatataacgcttgaggagaagccggctccaacagacgtggggttgcatcgactggtggtcaatatcagcgatctcgggtatccgaagtctctgcacaccttggtcctggtctttctctatgtgaacgacactgccggcaacgcaagttacatctatgacttaattcgaaggaccatggagacccccctggatcgcaacataggtgattcttcgcagccttaccaaaacgaggattatctcacaatcatgatcgcaatcattgccggtgctatggtggtgattgtggttatattcgtgacggttctggtcaggtgccggcacgcaagcagatttaaggcggcccagagaagtaaacaaggagcagaatggatgtctcccaaccaggagaataagcagaataagaaaaaaaagcgcaagaaaaggaaaagtcctaagagctcgttgctgaacttcgttaccattgaggagagtaagccagacgacgctgtgcacgagccaataaatggtaccatttccctgcctgctgagctcgaagaacagagcatcggccgtttcgattgggggcccgcgccgcccaccactttcaaaccgaactcccccgatctcgccaagcattataaatctgccagtccccagccagcctttcatctgaaaccagacacaccggtttcagtgaagaagcaccatgtgatccaggagttgccccttgataacaccttcgtgggtggatgtgacacactttctaaacggtcttcaacctcgagcgatcacttcagcgccagcgagtgttcttcgcaggggggatttaagaccaagggccccctgcacacaaggcaagtcaatgaacacttctattggtcgatttccaccgcttacaagtgtccagtgaatcagtactag

SEQ ID NO: 131088 - DNA, 3714 bp, synthetic construct
  misc_feature 1..3714: note = Description of Artificial Sequence: Synthetic coding sequence
  source 1..3714: mol_type = other DNA
atggacctcagagatttttacttattagctgccctgattgcttgcctgcgacttgactctgctatcgcccaggagctgatctatacaatccgagaagagctgccagagaacgtccccatcggaaacatacctaaggatctcaatatttcccacatcaatgccgctaccggcacctctgctagtctggtttatagattagtgtcaaaggcaggcgacgcaccactggttaaggtgtcaagtagtacaggtgaaatttttactactagcaaccggatcgaccgcgaaaagctttgcgctggcgcatcttacgccgaagaaaacgaatgtttctttgagcttgaagtcgttattctgcctaacgattttttcaggctaattaagattaagatcattgtcaaagatactaatgacaacgccccaatgttcccctcgcctgtgataaatatcagcattccagagaacacacttatcaatagccgattccctatcccttctgccaccgaccccgatactgggtttaatggggtccagcactatgagctcctcaatgggcagtcagtctttggcctggatatcgtggagacccccgaaggtgagaagtggccccaactcatcgtccagcagaacctggacagggaacagaaagacacctatgtcatgaagattaaggtcgaggacggaggtacgccgcagaagtcttccactgcgatcctccaggtgacagtttctgatgttaatgataatcgcccagtgtttaaagaaggccaggttgaggtccacatccctgagaatgctcccgttggcacatcagtcatacagttacacgctaccgacgctgacataggatctaacgccgagattaggtacatttttggggcccaggttgctcccgcaaccaagcggctcttcgcacttaataacaccaccggtctcatcacagtgcaacgatctcttgacagggaggaaacagcaattcacaaggtcactgttctggcaagcgatggtagctctactccagcacgcgccaccgttactattaatgtgaccgatgttaacgacaaccccccaaacatcgatctacgctatatcatttctcctatcaacggaactgtatatctgtctgaaaaagatcctgtcaataccaagatcgccttgatcaccgtctcggataaggatacggacgtcaacgggaaggtgatctgtttcatcgagagggaggtccccttccacctcaaggctgtgtatgacaaccagtacctcctggaaacttcaagcctgctggattacgaaggaacaaaagaattttcatttaaaattgtggcctcagatagtggtaaaccgtcattaaaccaaaccgcccttgtcagagtcaagctggaagacgagaacgataatcctcccatctttaaccaaccagtcattgagctaagtgtttcagagaataaccgtcgaggactgtacctgactaccatctccgctactgatgaggattctggcaagaacgctgacatagtgtatcagctgggcccaaacgcatcctttttcgatcttgatcgtaagaccggtgtgcttaccgcctccagggttttcgatagagaggagcaggagcgtttcatcttcacagttactgctagggacaatggcactccccccctgcagagccaggctgctgttattgtgaccgtcctggatgaaaatgacaacagcccaaagtttacacataatcacttccaattctttgtgagtgaaaatttaccaaagtatagtactgtgggtgtaataacagtgacagatgcagatgccggtgagaataaggccgtgaccctgagtattctcaatgacaatgacaacttcgtgctcgatccttactctggtgtcatcaagagcaatgtgagcttcgatagggaacagcagtccagctatacgttcgacgtgaaagccacagatgggggtcagcctccaagatcctcaactgcaaaggtaacaattaatgtcatggacgtgaacgacaactcccctgtggtaatttcaccacctagtaatactagctttaaactggtgcccttgagtgctatcccgggctccgtagttgcggaagtgttcgccgttgacgtagacacaggaatgaatgccgagttaaagtacacaatcgtgagcggtaacaacaagggcctgttcaggatcgatccggtgaccggcaacataactctggaagagaagccggcccctaccgatgttggcctgcataggcttgtggtgaacatctctgacttgggttatccgaaatcactgcatacactggttctggttttcctgtacgtgaacgatacagcaggcaatgcctcttatatctacgatttgattaggcggacgatggagacgccattagatcgtaatattggtgattcaagccagccttatcagaatgaggactatctcacaattatgatcgcaattatagccggcgccatggtggtgatcgtagtgatctttgtaaccgtcctggtcaggtgtagacacgcatcgaggttcaaggccgcgcagcgatctaagcagggtgctgagtggatgtctccaaatcaggagaacaagcaaaacaaaaaaaagaagcggaaaaaaagaaaaagtcccaaatcttccctgctgaatttcgtaaccatcgaggagagcaaacccgatgacgccgttcatgagcctatcaacggaaccatttcactgcccgccgagctggaagagcagagcatcgggaggtttgactggggcccagctccccctactacctttaaacctaactcacccgatctggccaaacattataaatctgcctcgccgcagcctgcgtttcatctaaagcccgacacaccagtgtcagtgaagaagcatcacgtcatacaagagcttcccctcgacaatacattcgtgggagggtgtgacacactgtccaaacgaagctccacctcttcagatcacttctccgcatctgagtgctcgtcacaaggagggtttaagacgaagggtcctctgcacacacgccagtgtaattctcacagcaaatccgataacatccctgtcaccccccagaagtgccctagcagtaccggtttccatattcaggagaacgaggagtcccactatgagtcccaaagaagagtgacgttccacctcccggatgggtctcaggagtcgtgctccgattcagggttgggcgaccacgaacctgtgggaagtggaactctcatcagccaccctctgccactggtccagccccaagacgaattttatgaccaggcaagccccgataagcggactgaggcggatggcaatagcgatcctaattctgacggcccattaggcccgcgcggtctcgccgaggctaccgagatgtgtactcaggagtgtttggttcttgggcatagtgataactgttggatgccacccggactgggcccataccagcaccccaagtctcccctttcgacttttgccccccagaaggagtgggttaaaaaggataaactcgtcaacgggcatactcttactagggcctggaaggaagactcgaaccgaaaccagttcaatgaccggaagcagtatgggtcgaatgaagggcacttcaacaatggcagccatatgacagacattcctctagctaatcttaaatcatataagcaagctggcggcgctacagaatccccaaaggagcatcagctctag

SEQ ID NO: 131089 - DNA, 3612 bp, synthetic construct
  misc_feature 1..3612: note = Description of Artificial Sequence: Synthetic coding sequence
  source 1..3612: mol_type = other DNA
atggacctgagggatttctacctgttggccgcgctgattgcatgtttgaggctggacagcgcaatcgcgcaggagctgatctacaccataagggaagaactgcctgaaaatgtgccaataggcaatattccgaaagacttgaatatttctcacattaacgctgccacaggcacttccgcttcccttgtgtataggttggtcagtaaagcgggcgatgcccctctagtgaaggtgtcttctagcacgggcgaaatcttcacgactagtaacagaatcgaccgagagaaactgtgcgcaggtgcatcatatgccgaagagaacgagtgtttctttgagctagaagtcgtgattctgccgaacgactttttcagattaattaagatcaagatcatcgttaaagatacaaatgacaacgcgccgatgttcccctcccccgttattaatatcagcatccctgaaaacaccctgattaactctaggttccctatcccctcggccaccgatcctgacactggatttaacggggtgcagcactatgagctgttgaacgggcagagtgtcttcggtctggatattgtcgagacccccgaaggagaaaaatggccccaacttatcgttcaacagaatctggacagggagcaaaaggacacatatgtgatgaaaatcaaggtggaggatggcgggaccccacagaaaagtagcactgccatcttgcaggtgaccgtttctgatgtcaacgacaacaggcctgtctttaaggaaggccaggtagaggtacacatcccggaaaacgcccctgtgggcacatccgtgatccagttgcacgcaacagatgccgatatcgggtcaaatgcagagattcgctatatcttcggagctcaggtggcccccgccactaagcgcctgtttgctttaaacaatacgactggccttataacggtccaacgtagtttggatagggaagagactgccatacataaggtcactgtgctcgcttccgacggaagttccacaccggcccgcgccacagttacaataaatgttacagatgtgaatgacaatccaccgaatatcgacctccggtacattatatccccaatcaatggaactgtatacctgtctgagaaggaccctgttaataccaagattgccctcatcacagtgtctgacaaagataccgacgttaatggaaaagtgatttgtttcatagaaagagaagtgccttttcacctaaaagctgtgtacgacaatcagtacttgcttgaaaccagtagccttctggattatgaaggaacgaaggagttctcttttaaaatcgtggccagcgacagcggcaagccttccctgaaccaaacagcacttgttcgggtgaaactcgaggacgagaacgataatcccccgatctttaatcaacccgttattgagctctccgtctctgagaataatcgccgtggcctgtatttgaccacaatctcagcaaccgatgaggacagcggaaaaaacgccgacattgtgtaccaactaggaccaaatgccagcttcttcgacctcgacaggaagactggcgttcttaccgcctcccgcgtttttgatcgagaggagcaagaacggttcatttttacagtcaccgctagggacaatgggactcctccactccagtcgcaggcggccgtgattgttacagtcctggacgagaacgacaactcacctaagttcacacataaccactttcagttctttgtgagcgaaaaccttccgaaatatagtaccgtcggggtgatcacagtcaccgacgccgacgcgggtgaaaataaggcagtgaccctgagcattttaaacgacaatgataacttcgttcttgacccgtatagtggtgtgatcaaatctaacgtgtccttcgatcgtgaacagcagtctagctacacatttgatgttaaggctactgatggcgggcagcccccacgtagttcaaccgctaaggtgaccataaacgtgatggatgtcaatgacaactccccagtggtcatcagtcccccatccaataccagtttcaagctggttcccttaagcgccatcccaggaagcgtggtggccgaggttttcgctgtagacgttgatacagggatgaacgcggagctgaagtacacgattgtatccgggaataataagggtctgtttcggatcgatccagtgaccgggaacataactctggaggaaaagccagccccaacggacgtgggactacaccgtcttgttgtgaacatctctgatcttgggtatcccaagtcactgcatacactcgtcctcgtgttcctgtatgtaaatgatacagctggtaacgcatcatacatatatgacctgatccgccgcaccatggagacaccacttgatcgaaacatcggggattcttcacagccataccaaaacgaggattacctaacaattatgattgccatcatcgcaggcgctatggtagtgattgtggttatcttcgtgacagtgttggtgcgctgtcgccacgccagtcggttcaaggcggcccagaggagtaaacagggggccgagtggatgagtccaaatcaggaaaataaacagaacaaaaaaaagaagcggaagaagcggaagagcccgaagtcttcacttctcaactttgttaccatcgaggagagcaagccggacgacgcggtgcacgaacctattaacggtacaatcagtcttccagcagagttggaggagcaatccatcggccgttttgactgggggccagctcctcccactacattcaagccaaacagtccagacctggccaagcattacaaaagcgcctcccctcagccagcattccatctgaagcctgacaccccagtctctgtaaaaaagcatcatgtgatacaagaactccctctggacaatacattcgtcggagggtgcgatactctctctaagcgctccagcacctcatctgaccatttttccgcttccgagtgttcttctcaaggaggatttaaaacaaaaggacctctgcacacaagacaatctcaaaggcgggtaacatttcacctgcctgacggttctcaggaatcatgcagtgacagtgggctgggcgaccacgagccagtaggttctggtactcttatttctcatcctttacccctggtccagccacaggatgagttttacgaccaggcatctccagacaaaaggaccgaagctgacggtaactcagatcccaattccgatgggccacttggaccgcgcggactagccgaggcaaccgagatgtgtactcaagaatgcctcgtgctggggcattcggataattgctggatgcccccagggcttggcccatatcaacaccctaaatctccattgtccacctttgcaccccagaaggagtgggtgaaaaaagataagcttgtcaacggacatactttaaccagagcctggaaggaggactcgaacaggaaccagttcaacgataggaaacaatacggatccaacgagggccactttaacaacgggtcacacatgacagacatacctctggctaacttgaagtcctacaaacaggcaggaggcgcaaccgagtcacccaaggagcatcaattgtag

SEQ ID NO: 131090 - DNA, 3714 bp, synthetic construct
  misc_feature 1..3714: note = Description of Artificial Sequence: Synthetic coding sequence
  source 1..3714: mol_type = other DNA
atggacctccgggatttttacctgctggccgctctcatcgcgtgtctgaggctagattccgctatcgcccaagagctgatctatacaatccgtgaagaactgcctgagaatgtccctattggaaatatccctaaggacctgaacatatcacatatcaacgcggctaccggtacgagtgccagtcttgtgtatagactggtgtccaaagctggggacgctcccctggtaaaggtttcctctagcaccggtgagatctttacaaccagcaaccggattgacagagagaaattatgtgcaggagccagctacgctgaggagaacgagtgcttcttcgagctcgaagtagtcatcctgccaaacgacttctttcggctaattaaaataaaaatcatcgtgaaggatacaaatgataacgctcccatgtttccaagccctgttataaacatcagcattccagagaataccctaatcaattctagattccctatcccttctgctaccgacccagataccgggtttaacggagtacaacactacgaactcctgaacggacagagcgtgttcggcctagatatcgtagagacccccgagggggagaaatggccacagctgattgtccaacaaaatttagatagagagcaaaaagacacttatgtaatgaagattaaagttgaagatggtgggaccccacagaaatcatccacagccattttgcaggtcactgtgtctgacgtgaacgataacagacccgtctttaaagaaggacaagtcgaggtgcatatcccagagaatgcccccgttggaaccagcgttatccagttgcacgcaacagatgcagacatcgggtccaatgctgaaattcgctatatcttcggggcacaggtggccccagcaactaaaaggctgttcgccctcaataacactactggactcattacagtgcagagaagcctagaccgcgaggagacagccattcataaggtaacagtgctcgcctctgatggtagcagcactccagcccgtgctacggtcaccatcaatgtgaccgacgtcaacgataatccccctaacattgacttacgttatataatctctcctattaacggcaccgtgtatctttctgaaaaagatcccgtgaatactaagatcgctcttatcactgtgtccgataaagacacagatgtcaatggcaaagtaatttgcttcatcgagcgcgaagtgccattccatctaaaagccgtatacgataatcaatacctgcttgagacatcatcactgctggattatgagggaaccaaagagttcagcttcaaaattgtcgcttcagatagtgggaaaccatcactgaaccagaccgccctggtgcgcgtaaagttagaagacgagaatgataaccctcccatatttaaccagcccgtgatcgagctgagtgtgagtgaaaacaatcgacgggggctgtatttgaccactatcagcgccaccgacgaggatagtggaaaaaatgcggatatcgtataccagcttggcccaaatgcaagctttttcgatcttgaccgaaaaacaggtgtgttgacagctagcagggtgttcgatcgggaagagcaagaacgcttcatattcaccgtaacagccagggataatggcacaccccccctccagtctcaggccgccgtgatagtgactgttttggatgaaaatgataatagccccaaatttacccacaaccacttccagttttttgtatccgagaatttacccaagtattctacagtgggtgtcataaccgtcaccgatgccgacgccggagagaacaaggccgtcaccctgtcaattctgaacgataacgataactttgtgctggacccttacagcggcgtcatcaagtccaacgtttctttcgacagagagcaacagtccagttatacattcgacgtgaaggcaaccgacggaggccagcccccccggagttctactgccaaagtaacaattaacgtaatggacgtcaacgataattcaccagtagtcatcagccctccgagtaatacatccttcaaactggtccccttatccgctattcctggaagtgtcgtggccgaagtgttcgcggttgacgttgacacaggcatgaatgctgaactgaagtacaccattgtgtctggtaataacaagggcctcttcaggatcgaccccgttaccggaaacatcacattagaggaaaagcctgcaccaacggatgttggcctgcatcgacttgtggtcaatatcagtgacctcggttaccccaagtctctgcacaccctggttttagtcttcctttatgtaaacgacacggccggaaatgcctcatacatctatgatttgatccgccggacaatggagacccccctggatcgaaatatcggcgatagctcgcaaccttatcagaacgaagactatttgaccataatgatcgccatcatcgcaggagccatggttgtcatcgtggtcatttttgtgaccgtattggtgcggtgccgccacgcatccagattcaaagctgcacagagatctaaacagggggcggagtggatgtctcctaatcaggagaataaacagaacaagaaaaagaagaggaagaagagaaaaagccctaaatcttcccttttgaacttcgtgacaatagaagaatccaaacccgacgatgccgtccacgagcccattaatgggacaatttctttgccagccgagttggaagaacaatctattggtcggtttgactgggggcctgcaccaccaaccaccttcaaaccaaactccccagacctggccaagcattacaaaagcgcctccccacaacccgccttccatttgaagcctgacacacctgtgtcagttaaaaaacatcatgtcatccaggagctccccctggataatacctttgtgggcggctgcgacacactgtctaaaagaagttcgaccagctctgatcacttcagcgctagcgaatgctctagtcaggggggttttaaaactaaggggcctcttcatacacgacagtgtaacagccactccaaaagcgacaacatacctgttacgcctcagaagtgcccgagcagtacggggtttcatatccaagagaatgaagaatcccactacgaaagtcagcggagggtgacattccatctcccagatggtagccaggaaagctgcagtgactctggactgggcgaccacgaacctgtgggctcaggcactcttataagccacccattgcccctcgtccagcctcaggatgagttttatgatcaagcttcccccgataagcggaccgaagccgacggaaattccgatcccaattcagatggccctctaggacctcgtggactggcagaggccaccgagatgtgtactcaggaatgcttagtcctgggacatagcgacaactgctggatgcctccaggcctgggaccataccagcatcccaagagtccgctgtccaccttcgctcctcaaaaggaatgggtcaagaaagataaactcgttaacggtcataccctgactagggcctggaaagaagactcaaatagaaaccagttcaacgaccgaaagcagtacggctcgaacgagggccatttcaacaacggaagccacatgaccgatatccccctggccaatcttaaatcgtataagcaagccggaggggccaccgagtcccccaaggagcatcagttatag

SEQ ID NO: 131091 - DNA, 2424 bp, synthetic construct
  misc_feature 1..2424: note = Description of Artificial Sequence: Synthetic coding sequence
  source 1..2424: mol_type = other DNA
atggtattttccaggcggggtgggctgggcgcacgagatctcttactgtggctgcttcttcttgctgcatgggaggttggatccggccaactacactactccatcccagaggaagcgaagcacgggacattcgtgggtcgcgttgcccaagatcttggcctggaattggctgaattggtcccacgactattccgggtggcctcgaagacccaccgcgatctactcgaggttaatctccagaacggcatcctgtttgttaacagtcgaatcgaccgggaggagctgtgccagtggtctgccgaatgcagtatccaccttgagctgatcgctgatagacctttgcaggtgtttcacgtcgaggtaaaagttaaagacataaacgataacccccctgtttttcgaggccgcgagcaaatcatcttcattcccgaaagcagactcctcaattcacgatttcccattgagggcgcggctgacgcagacatcggcgccaacgctctattaacatacaccctctcccccagcgattattttagcctagatgtcgaggcctctgatgaactgagcaagagcctgtggctggaactgagaaaatacttagatcgggaagaaaccccggagcttcacctcctgctgacagccactgatgggggaaaacccgaattacaggggaccgtggagctcttgataactgtgctggatgtgaacgataatgcacctttgtttgatcaagcagtctaccgggtgcacttgctcgagaccaccgcaaatggcaccttggtaacaactctgaatgcttctgatgcggacgagggcgttaacggagaggtcgtcttctctttcgattcaggcatctctagagatatacaggaaaaatttaaagtcgattcgtccagcggcgagatcagactcattgacaaactcgattatgaggagacaaagtcctatgaaattcaagtgaaggccgtcgacaaaggttccccacctatgagcaatcactgcaaagtgctagtcaaggttctcgatgtgaatgacaacgctcctgagctggccgtaacttccctttacctccccatcagggaggatgctcccctctcaaccgtcatcgccctgatcaccgtgtccgatcgagactccggcgccaacggacaggtgacatgtagtctgatgcctcatgtgccgtttaagctggtgagtacatttaagaattattactctctagtgctcgacagcgccctcgatcgcgagtcattaagtgtctacgaacttgtggttacggctagagacggcgggagtccatcgctttgggccactgcacgggtctcggtggaagttgctgacgtcaacgataacgctccagccttcgcacagcctgagtacacagtttttgtaaaggagaacaaccctccgggatgccacatattcaccgtcagcgctcgcgacgctgacgctcaggagaatgccctggtttcttacagcctggtggaaagacgagttggggagcgcgccctgtcgaactacgtgtccgttcacgcagaaagtgggaaggtgtatgctctgcaacctctagaccatgaggagctggaactgctccagtttcaggtatcagcgagagatgctggggttccccccctgggcagtaacgttacactgcaggttttcgttctggatgagaacgataatgctcctgctctgcttgcacccagggtcggaggaacaattggagctgtgtccgagcttgtgcctcgcctcgtgggcgcgggccacgtcgtagctaaggtccgagccgtggatgccgatagcggatataatgcctggctctcatacgagctacagcccgcggcaggtggggctaggatccccttccgcgtgggtctatatactggggagatttccaccacacgcgttctagacgaggcggatctgtctcgctatcgactcttggtactggtgaaggaccacggcgagcctgccttgaccgccacagcaactgtgttggtgagtctggtggaatctggccaagcccccaaagcctcttccagggcttctgtgggggtagccggccccgaagcggcactggttgatgttaacgtgtacctgatcatagccatctgcgcggtctcgtcactcctggtcctcacactcttgctctacactgcactgagatgcagtgtgccccctactgagggtgcgtacgttccaggtaaacccaccctggtttgttcgtctgcacttggctcatggagcaatagccagcagcggcgacaacgcgtgtgcagttctgaaggaccacctaagacagatctgatggccttctcccccggtctaagtcccagcctgaatacttccgaacgtaacgaacaaccggaggctaaccttgatctcagcgggaatgtctctcctactttcgagttttggctatag

SEQ ID NO: 131092 - DNA, 2061 bp, synthetic construct
  misc_feature 1..2061: note = Description of Artificial Sequence: Synthetic coding sequence
  source 1..2061: mol_type = other DNA
atggtgtttagccggaggggagggttaggcgctcgagatctgctgctatggcttctgctgttggccgcatgggaggtgggcagcggccagctccactactccataccagaagaagcaaaacatggaaccttcgtaggacgagtggctcaggatttagggttagagctggctgaactggtaccgcgactattccgagtagcaagcaagacgcacagagacctcctcgaggttaacttgcagaacgggatcttattcgtaaactcgcgtattgaccgcgaggagctgtgccagtggtccgccgagtgtagcattcacctggagctcatcgcagataggccgcttcaagtatttcacgtggaggttaaagtaaaagacataaatgataatccccctgtgtttcggggcagagagcaaattatttttataccggaatcgcgactgttaaattcacgcttccccatcgaaggcgctgccgacgctgacattggtgccaatgcactgcttacatacacactctccccatccgattattttagtctagatgttgaagcgtcggacgagttatccaagagcctgtggctggaactccggaaatacctggatcgagaggaaacacctgaactccacctgctactcaccgccacagacggcggcaagcccgaactgcagggaactgtcgagctgttgatcactgtactggacgtgaatgacaacgctcctttattcgaccaggccgtataccgcgtgcacctgcttgaaaccacagcgaacggtactcttgtgacgactctcaacgcgtcagatgccgatgagggggtgaatggagaggtagtgttctcctttgattccggcattagtcgggacattcaggagaagtttaaagtcgatagtagcagcggtgagatccggcttatcgacaaactggactacgaggaaaccaagagctacgagatccaagtcaaagccgtcgataagggcagcccacctatgtccaaccactgcaaggtgcttgtcaaggtcctcgatgttaacgacaatgcccccgaattggcagtgacctccttatatttgccaatccgagaggatgcccccctgtcgaccgtcatagcacttatcacggtaagcgatagggacagcggcgctaatggccaggtcacctgcagtctgatgccacacgtgccattcaaactcgtaagcacctttaagaattactactctttggtgctggactccgccctggaccgagaatcactctccgtgtacgaattggtggtgacagcccgagacgggggatctccgagcttgtgggcaacggcaagggtatccgttgaagtggccgatgtgaacgacaatgctcccgcattcgcccaacccgaatataccgtttttgtgaaggaaaacaacccacctggatgccacatcttcactgttagtgcgagagacgccgacgcgcaggaaaatgccttagtatcctactccttggtggagcgccgggtgggcgaacgggcactgtccaactatgtgagcgttcacgccgaaagcgggaaggtttatgccttacagcctcttgaccacgaggaactcgaacttctgcaatttcaaccgagacaaccaaacccagactggcggtattccgccagcttgagggctggaatgcactcctcggtgcatctcgaagaagcggggattcttcgagcaggaccaggtggacccgaccagcagtggcccactgtctctagtgctactcccgaaccagaggcgggagaggtgagccctcccgttggagccggtgtgaatagcaattcttggacctttaagtacggacccggcaacccaaagcagtccggccccggagagctccccgataagtttattattccggggtcgccggcgatcattagtattcgccaggaaccaaccaacagccagatagacaaatccgacttcatcactttcgggaagaaggaggaaacaaaaaagaagaagaagaagaaaaaggggaataaaacccaggaaaaaaaagaaaaaggcaatagcactacagacaactccgaccagtag

SEQ ID NO: 131093 - DNA, 2853 bp, synthetic construct
  misc_feature 1..2853: note = Description of Artificial Sequence: Synthetic coding sequence
  source 1..2853: mol_type = other DNA
atggttttttcaaggagaggcggtctgggcgcgagagacctgctcctttggttgctgctgctggcagcgtgggaggtcggatccgggcagctccattatagcattcctgaggaggccaaacatggtaccttcgtgggtagggtcgcccaggacttaggtctagaactcgccgaacttgtgccccgcctctttcgcgttgcgagcaagacccaccgagaccttttggaggttaacctacagaacggaattctcttcgtgaactctcggattgatcgtgaagagctatgtcaatggtctgcagaatgcagtattcatttggagctaatcgctgacaggcccctccaagtcttccatgtggaagttaaggtcaaagacatcaatgacaatccgcctgtgtttcggggaagagaacagatcattttcataccggagagcagactgcttaactcccgctttcccattgaaggcgcagccgatgcagacatcggggcaaatgcactgctaacgtacacactgagcccatctgactatttttctttggacgtagaagcatcagacgagctgtccaagagtttatggctggaactgcggaaatatctggacagggaggaaacaccagagctacatcttctgctcacggccactgatggaggaaaaccagagctgcaggggacagtggaactcctgataactgttctagacgttaatgacaatgctcccctgtttgaccaggcagtctatagggttcatcttttggagaccacagccaacggaacgctcgtgacaacactcaatgcaagtgacgcagacgagggagtaaatggtgaggtggtcttctcatttgactcagggattagccgggacatccaagaaaagtttaaggtcgattcttcatccggagagatccggctcatcgacaagctggattatgaagagaccaaatcctatgaaatacaagtcaaggccgtggataagggctcgccaccaatgtctaaccactgtaaggttctggtgaaggtcctggatgtgaacgacaatgctcctgagctggcagtaacctcattatatttgcctataagagaagatgcacccttaagcaccgtaattgcacttattactgtgagcgatcgcgacagcggcgctaatggacaggtcacctgcagtctcatgcctcacgtcccctttaagctcgtgagtacatttaaaaattactacagcttggtcctggattcagcgcttgaccgcgagtctctgagcgtctacgagctcgtggtgaccgcccgggacggcgggagccctagcctgtgggccaccgccagagtgagtgtcgaagtggctgatgtcaatgacaacgctccagccttcgcgcaacctgaatataccgtatttgtgaaagaaaacaacccacctggatgccacatctttacagtatcggcgagagatgctgacgctcaggagaacgcactagtctcctactcccttgtggagaggagggttggtgagagggctctatctaactacgtatccgttcacgctgaatctggcaaggtttatgcattacagcccctagatcacgaagagcttgagctgctgcaattccaggtgtctgcaagggacgcaggtgtgcccccgctgggatccaacgtcaccctgcaagtgttcgtcctggatgagaatgacaatgcccccgctctgttggcccctagggtgggtggtaccatcggtgcagtctcagagctcgtgccccgattggttggtgctggtcacgtagtcgctaaagtccgtgccgtcgacgccgacagtgggtacaatgcgtggctcagttatgagctacagccggctgcaggtggggcgcggatcccattccgggtcggtctctatactggggagatctccaccactcgggtgctcgacgaagcagacctgtcaagataccgacttctcgtcctggtgaaagatcatggtgaacccgccctgacagcgactgctactgtcttagtcagccttgttgaaagtggccaagctccgaaagcatccagtcgggccagcgtcggagtcgcaggccctgaggcagctttggtggatgtgaacgtttacttgatcatagcgatctgcgctgtctcctcgctgctggtcctcacccttttactctataccgctctgaggtgctccgtccctcctacagagggcgcctacgtgcccggcaaaccaaccctggtctgttcctccgcactcggaagttggtcgaacagccaacagaggcggcagcgcgtgtgctccagcgagggtccccctaagaccgatcttatggccttctctcctggcctgtctccttcattaaacactagcgaaagaaacgagcaacccgaggctaacctggatctctcagggaacccccggcaacctaatccagactggcgctatagcgcgtctttgcgcgctggaatgcacagctccgtacacctggaagaagccggtatactaagagctggccctggaggccctgatcagcaatggccgacggtttcaagcgcgactccagaaccagaggccggcgaagtgtcaccacctgtcggagctggggtgaacagcaattcatggaccttcaaatatggcccgggaaatcccaagcagagcggacccggggagttacctgataaatttattatcccaggatccccagcaatcatctctatccgccaggaaccgacaaatagtcagatcgacaaaagcgattttattaccttcggcaagaaggaggagacaaaaaagaagaaaaaaaagaagaaaggcaataagacccaggaaaaaaaggagaagggtaattccactaccgataatagcgaccaatag

SEQ ID NO: 131094 - DNA, 2847 bp, synthetic construct
  misc_feature 1..2847: note = Description of Artificial Sequence: Synthetic coding sequence
  source 1..2847: mol_type = other DNA
atggtttctcgctgtagttgcttgggagtacagtgtttgctcctctccctgctcctgctggctgcttgggaggtgggaagcggccagctgcactatagcgtatatgaggaagcccggcacggcaccttcgtaggtcggatcgctcaggatctgggtctagagttggcagagctggtgcagcgattatttagggtggcctctaaaagacatggagacctgctcgaagtgaacctgcaaaacggaatcctgttcgtgaatagcaggattgatagggaagaattgtgcggacggtccgtggagtgcagtatacatctggaggtgatcgttgacagacccctgcaggttttccatgtggacgttgaagtgaaagatataaatgacaaccccccccggttttctgtgaccgaacagaagttatcaataccagaatctcgacttctggactcgcgctttcccctggagggagcttctgacgcagacgtcggagagaatgcgcttctcacctataaactgtcaccgaatgagtactttgtgctcgatataatcaacaagaaggacaaggataagttccctgtgcttgtcctcagaaagctgctggatcgagaagaaaaccctcaactaaaattgctgttaaccgccacagatggcggaaaacccgaatttacaggttcagtttcccttctgatattagtgctggatgcaaatgacaacgctccaatttttgaccgacccgtgtacgaggtgaagatgtacgagaaccaggtgaatcagacattagtgatcaggctaaatgcttccgattctgacgaagggatcaacaaggagatgatgtactccttcagcagcctagtgccaccgactatcagacgaaaattttggattaacgagaggaccggggagatcaaagttaacgacgctattgattttgaagacagcaatacatatgaaattcatgttgatgtgacagacaagggaaatcctcctatggtcggccactgcacggtgctagtggagcttctggatgaaaacgataattccccggaagtcatcgtcacaagcttgtccctgcccgtgaaggaagacgcacaggttggaacagtgattgcattgatttctgtgtccgatcacgatagcggggccaacgggcaggtcacttgctccttgacacctcatgtgccctttaagcttgtgtccacttacaaaaactactatagcctggtcttggacagcgccctggatagagagagggtttccgcctatgagcttgttgtgaccgctagagatggaggctctccccctctatgggctacagcctcagtatcagtcgaagtggctgacgtgaacgataacgccccagctttcgcacagtctgagtacacagtatttgtaaaagaaaacaaccccccaggatgtcacatctttaccgtttccgcctgggatgcagacgcacaggaaaacgctctggtgagttattctctagtggaacggcgactaggcgaacgttctttatctagctacgtgtcggtccacgccgaatctggcaaggtgtacgctctccagcctttagatcacgaagaactggagctcctgcagttccaggtttccgctagagacggtggcgtcccaccactaggaagcaacctgacactgcaggtgttcgtgctggatgagaatgataatgcccccgccttactcgctagtccagcaggatcagcaggaggggccgtatcagaactggtccttcgatccgtggtcgccgggcacgtggttgccaaggtccgtgccgttgatgcggactcaggctacaatgcttggctctcgtatgaactccaatccgcagctgtcggagcgagaattcctttccgcgtgggtctatatacaggcgaaattagtacgacgcgggctctggacgagacggacagtccaaggcagcgcttgttggtattggtcaaagatcatggagagccctcacttacggcaacagccactgtgctcgtcagtctggttgagggctcacaggcacccaaggcttcctctagagcgagtgtgggcgtagcccccgaagttgctttagtggacgtgaatgtctatctcatcatcgcaatctgcgccgtttcttccttactggtcctcactcttttattgtacaccgctctgcgatgctccgccgccccaaccgagggggcctgtggcccagtcaagcccaccctggtgtgtagcagcgcagtcgggagctggtcgtattcccagcagcggcgacagcgtgtttgcagcggagaagggctgcctaaggccgacctaatggctttctccccgtctttgcctccttgtccaatggtagacgtggacggggaggaccagagcatcggaggagatcattctcggaagcctcggcagcctaaccctgattggcgctactcagcttccttaagagccggcatgcactcttcagtgcacctcgaggaggccggcatcctgagggcaggccccggcgggccagatcagcagtggcccaccgtgagcagtgccacacccgagcccgaagccggcgaggtgtccccccccgtgggagccggtgtgaattctaatagctggaccttcaaatatggtccgggaaatcccaagcagagcggaccgggagagcttcccgacaagttcataattccgggaagtcctgccataatctcaattcgccaggagccaacgaactcgcagatcgacaagagtgatttcatcacattcggaaaaaaagaggagactaagaagaaaaagaagaaaaaaaaggggaacaagacacaggaaaagaaggagaaaggtaacagcacgacagacaatagcgatcaatag

SEQ ID NO: 131095 - DNA, 2058 bp, synthetic construct
  misc_feature 1..2058: note = Description of Artificial Sequence: Synthetic coding sequence
  source 1..2058: mol_type = other DNA
atggttagccgttgtagttgtctgggtgtccagtgtctgctgctctctctcttgctgctggccgcatgggaagtgggaagcggccagctccactacagtgtgtacgaggaagcgaggcatgggacattcgtgggaaggattgcacaggatctcggcctcgaactagctgaactggtgcaacgcctgttcagagtggcaagcaagcggcatggggaccttctcgaggttaatctgcagaatggtattctgttcgtgaattctagaatcgatcgagaggaactgtgtggccgttctgtggagtgcagcattcatctcgaggtgatcgtggatcggcctttgcaggtgttccacgtcgatgtggaagtcaaagacatcaacgacaaccctcccaggttttcagtaactgagcaaaagttatctatccccgagtcaaggctgctagatagtagattcccacttgagggtgcttccgatgccgatgttggagaaaacgccctgctaacatataagctctctcctaatgagtatttcgtgctcgatattatcaataaaaaggacaaagacaagttccctgtgctggtgcttcgaaaacttttggacagagaagagaacccacaactgaaacttctcttgaccgcaaccgatggcgggaagccagagttcacaggatctgtgtcactgctgatcttggtgctcgatgccaacgacaacgcacctatctttgacagacccgtctatgaggtgaagatgtacgagaaccaagttaaccagacactggtgatacggctgaatgccagcgatagcgacgagggcatcaacaaggaaatgatgtattctttttcttctctcgtacccccgaccataaggcggaaattttggattaacgagagaacaggcgagatcaaggtcaatgacgccatcgatttcgaggactccaatacctatgagattcatgtcgatgtaactgacaagggaaacccgcccatggtgggccattgtacagtcctagtcgagctgctcgacgagaatgacaactctccagaagtaattgtcaccagtctgtctttgccagttaaggaagatgcccaggtaggtaccgttatagccctgatctctgtctctgaccacgactcgggagctaacggtcaggtgacttgtagtctgacacctcacgtgccgtttaaactggtttcaacgtacaagaattactactctctagtgttagatagcgccctcgatcgcgagagggtgtctgcgtatgagcttgtcgtgactgcacgggacggaggctccccaccgctgtgggccacagcctcagtaagcgtggaggtggccgacgtgaatgacaacgccccggccttcgctcaatcggagtacacagttttcgtgaaagaaaacaatcctcctggctgtcacatttttaccgtgagtgcttgggacgccgatgcacaggagaatgccctggtgtcctattctctcgtggaaaggcggctcggggagagatcacttagtagttacgtgtctgtgcacgcggaaagcggaaaagtctacgctttgcagcccctggatcacgaggagcttgagctgctccaattccagccgaggcagccaaacccagattggcggtactcggcttcattacgcgcaggcatgcatagcagcgtgcatctcgaggaggctgggattctgcgcgccggccccgggggaccagatcagcaatggcccaccgtgagctcagccactcctgagccagaggcaggggaggtcagtcctcctgtgggcgcaggagtaaacagcaatagctggacatttaagtatggacctggaaacccgaaacagagtggcccgggagaactgcctgacaaatttataatccctgggtctccagccataatctcaatacggcaggagccgactaattcacagatagacaaatcagacttcattacgtttggaaagaaagaagagacaaagaaaaagaagaaaaagaaaaaggggaacaaaacccaggaaaagaaagagaagggcaactctactaccgataactccgaccagtag

SEQ ID NO: 131096 - DNA, 2850 bp, synthetic construct
  misc_feature 1..2850: note = Description of Artificial Sequence: Synthetic coding sequence
  source 1..2850: mol_type = other DNA
atgttcggattccagcggagaggactgggaacacctcgtctgcagttatggctgctccttctcgaattttgggaggttggaagcggccagctgcattattcagtgagcgaggaagccaagcatggcaccttcgtaggaagaatcgcccaagacctcggactggaattagcagagctggttcagcgtttattccgagtggcatctaagacacatggtgatctgttggaggtgaacctgcagaatgggattttgtttgtcaacagtcggatcgatcgcgaggagctttgcggacagtccgcagagtgtagtattcatttggaagtgatcgtcgataggcccttgcaagtttttcacgttaatgtcgaggtcaaagatatcaacgacaaccctcccgtgttttctctacgggaacagaaactgttaattgctgaatccaagcagtccgactcaagatttccactggagggagcttctgacgccgatatcgaggagaatgccctgctcacttataggctatcaaagaacgaatacttttcattagacagcccgaccaatggaaagcaaattaagcgattatcactgatcctgaaaaaatcacttgaccgggaaaaaacccccgagcttaacctactactgaccgcaacggatgggggaaagccagaactgactgggactgtgagactgctcgttcaggtcctagacgtcaacgacaatgatccggagttcgacaaaagcgagtacaaggtctcactcatggagaacgccgctaaggagacccttgtgctgaaattgaatgccacagatagagacgagggggttaacggagaggtcacatactctctgatgtctattaaaccgaacggaaggcacctgttcacattagatcaaaataacggggaggtgcgggtgaatggtactctagactacgaggagaataagttttataagattgaggtacaagctaccgataagggaaccccccccatggcgggacattgtactgtgtgggtggaaatactcgacactaacgataactcccctgaggtcgccgtgaccagccttagcttgcccgtcagagaggatgcgcagccatctactgttatagccctcatatcggtgagtgatagggactcaggcgtgaatggccaggtcacctgctccttgactccgcatgtgcccttcaagctcgtctctaccttcaagaattactattcgctagtattagatagcgccctggatagagaaaatgtctgggcctacgagttggtagttacagccagagatggcgggagtccgagcctgtgggcaactgcccgggtgagtgtcgaggtggccgacgtaaatgacaatgctccagcatttgctcagccagaatacactgtctttgtcaaagagaacaatccacctggttgccatatattcacagtgtcggctcgagacgctgacgctcaggaaaatgccctggtttcttattccctggtggaaagacggctaggcgatcgggctctcagttcatatgttagcgtgcacgccgagtccggaaaggtctatgccctgcagcccctcgaccatgaggaattagagcttctgcagtttcaagtgtctgcgcgagatgccggagtgcccccattatcctccaacgtgactctgcaggtttttgtactcgatgaaaatgataatgctcctgccttattggccacacaggctgggtctgctgggggagccgtcaacaagctggtgccccgcagcgtgggggctggccatgtcgtggccaaagttcgagccgtggatgcagacagcgggtataacgcctggctgagctacgagctacagccagcagcaggcggatcaagaattccgtttcgggtgggattgtatacaggcgagatatccacgacccgcgctctagatgaggcggatagcccccgtcacagactgctggtgctggttaaagaccacggtgagcccgccctcacagcgactgcaaccgtgttggtcagcctagtggaaagcggacaagcgccgaaggcatcctcccggaccctagccggcgccgcaagccctgaagctgcattggttgacgtgaacgtgtatttgatcattgccatctgcgtcgtcagctcgctgctggtgctcaccctgttgctgtatactgcactgtggtggtcagcaactccaacagagggagcttgcgctccagggaaaccaactctcgtctgtagtcgagctgtgggctcttggtcttactctcagcagcgccgccagcgggtgtgcagcgaggaggggccgcctaaaacagacctcatggccttttctcctagcttgcccttggggctgaataaggaagaggagggcgaacggcaagaacctggctctaatcacccaggccaacctcgccagccgaacccagactggcgatattcggctagcttgagagctggaatgcactctagcgtgcatctcgaggaagcaggcatccttagggcagggccagggggccctgaccaacagtggccaaccgtgtctagcgccactccagagcctgaagcaggagaggtgtccccacccgtgggcgcaggggtgaactcgaactcatggacttttaaatatggccctggaaaccccaagcagagtggacccggcgaactgcctgataagttcattattcccggatcccctgctatcatatcaattcggcaggagccaacaaactcccagatagacaaatccgattttattacattcggaaagaaagaggagaccaaaaagaaaaagaagaaaaagaagggcaataagactcaagagaaaaaagagaagggtaactccacgacggacaactccgaccagtag

SEQ ID NO: 131097 - DNA, 2826 bp, synthetic construct
  misc_feature 1..2826: note = Description of Artificial Sequence: Synthetic coding sequence
  source 1..2826: mol_type = other DNA
atggtaatcatcggcccccggggacccggcagtcaacgccttttgctgtctttgcttctgctggccgcatgggaggtgggttcaggccagctgcattactctgtgtatgaggaggcgaagcatggaacctttgtgggaagaattgcacaggaccttggattggagctggccgaactggtcccacgtctgttccgcgtcgcctctaaacggcacggtgatctgttggaagtgaacctacaaaatggcatcctgtttgtgaactctagaattgatagagaaaaattgtgtggccgaagcgctgagtgttctatccacttggaggtgatcgtggatcgccctttacaggtttttcacgtcgatgtggaagtcaaggatattaacgacaaccctcccgtttttagggagagagaacaaaaggtgcccgtaagtgagtcagcacctctggacagccatttcccactggaaggcgccagtgacgcagatatcggtgtaaacagtctgctcacttatgccctatccctaaatgagaacttcgagctaaaaataaagacgaagaaggataaatctatcctccctgaattagtgctccggaaattgctggatcgagaacagacacctaaactgaatctgcttctgatggtcattgacggaggcaaaccagagctgactggatccgtgcagatacagatcacggtgcttgatgttaacgacaacgggccagcattcgacaaaccctcctataaagtggttctcagtgagaatgtgcagaacgataccagagtcattcagctgaatgcttcagacccagacgagggtctgaacggagagatttcttacggaatcaaaatgattctgcctgtgtcagaaaagtgtatgttttctattaaccctgacactggcgaaatacgcatctacggtgagttggatttcgaagagaacaacgcatacgaaatccaggtgaatgcaatagataaaggcattccctcaatggccgggcattccatggttcttgtggaggttcttgacgtgaacgacaacgtgcccgaggtcatggtcacatccttgtcactcccagtacaagaagacgcccaggtggggaccgtgatagcactcataagtgtctcggatcgcgactccggtgcaaacggacaggtgatatgcagccttacaccccatgtcccgtttaagttggtgtcgacatataagaactactattcactggtgttagattccgccctggatcgagagtcggtgtccgcttatgaactggtggtcaccgcccgtgatggtggcagcccttcactatgggccaccgctcgggtctctgtggaggttgccgacgtgaatgataacgctcccgcatttgcacagccggagtacaccgtatttgttaaggagaataatcccccaggctgccacatcttcacagttagcgcttgggatgcagatgcccagaaaaatgccttagtatcttacagtcttgtggaaaggagggtgggggaacatgccctcagttcttacgtttctgttcacgccgagagcggcaaagtttatgcgctccaaccattggaccacgaggagctcgagctgctgcagtttcaggtttccgcccgcgacgctggggttccccctctcggcagcaacgttaccctgcaggtctttgtgttggacgagaacgacaacgctcccgccctcttagctactcccgcaggaagcgccgggggcgccgtgtcagaacttgtcccacggagtgtgggcgcaggccacgtcgtggctaaggttagagcggtggacgccgacagcgggtacaatgcctggttgagctatgaacttcagccagccgctgttggcgcacatattccctttcatgtcggcctgtacaccggcgagatcagcaccacgaggatcttagacgaagccgatgctcctagacatcggctgctagtcctagtgaaagaccacggcgagcccgcactgacatccaccgctactgtactcgtatctctggtggaaaatggccaggcacccaaaacttcctctagggcatcggtcggcgccgttgacccggaggctgctttggtagacatcaatgtttatctgatcatcgcaatttgtgctgtgtcttctctgctggtacttacactgctgctctataccgccctccgctgcagtgcaccacccacagtttctcgttgtgctccaggcaaacccacactggtgtgcagctccgctgtgggttcctggtcctactcgcagcagagacggcagagagtttgttctgcagaaagtccaccaaaaacagaccttatggctttttctccctccctgcaactttctagagaagactgtctgaatcccccttcagaaccacggcagcccaatcccgactggagatatagcgcaagtctcagggcgggcatgcacagctcagtgcacttggaagaagccggcattctgagggccggcccaggcggacccgaccagcagtggccgaccgtaagcagtgcaacccccgagcccgaagccggcgaggtgtcgcctcccgttggtgcgggagtgaacagtaacagttggaccttcaagtacggtcccgggaaccccaagcagagcggccccggggagctcccagacaagttcattattcctggtagtccggccatcatctcaattagacaggagcccacaaactcgcagatcgacaagtcagatttcataacattcgggaaaaaagaggagacaaagaaaaaaaaaaaaaagaagaagggaaataaaacccaggagaaaaaggagaaaggcaactcaactacagataactccgaccaatag

SEQ ID NO: 131098 - DNA, 2853 bp, synthetic construct
  misc_feature 1..2853: note = Description of Artificial Sequence: Synthetic coding sequence
  source 1..2853: mol_type = other DNA
atgctgtcctcatggcaggggggcccaagaccccgtcaattactattgtggctcctgatcctggcagcctgggagactggttcaggacagctgcattacagcgtgcctgaagaagcaaagcacggcacttttgtggggaggatagcccaggacctgggtctcgagctggctgaacttgttccaaggctgtttagggtggctagcaaaaggcatggggaccttcttgaggtgaatctgcagaacggaatcctgtttgtaaactcgcgtatcgatcgggaggaactgtgcggtcggtcagctgaatgttctatccacctggaggtaatagtggacagaccccttcaggtttttcatgtagaggtcaaagtgcgtgacatcaatgataacccccctatattcccagagagtaagaagagaatcattatcgcagagagtagaccacccgaaacgcggtttcccctggatggggcatccgacgctgacatcggggtgaatagtgctttgacttacagactggatcctaatgactacttcacgttggatgctcagaacagtctggagcaaatgagcagcctcagcctagtactacgaaagaccttagaccgagaggaaatccaagagcattctctgcttctgacagcttcagacggcggaaaacctgagctcactggcactgtccaactgcttatcaccattttggatgtaaatgacaatgctcctgagttttatcagtctgtctataaagtgacagtgcttgaaaacgccttcaatggcacgctcgttataaaactgaatgccaccgacccagacgacggcacaaacggtgacatagtctactcattcagaagaccggtatggcccgccgttgtctacgccttcactataaaccccaacaatggagagattagaactaaaggcaaactggactttgaggagaaaaagctgtacgagataagtgtggaggccgtcgacaaggggaatattcctatggcaggccattgcacgctgcttgtggaggtgctagatgtcaacgataatgcgcctgaagtgaccatcacttctctctccctgccgatcagagaggatacccagccctcagcaatcattgcactaatttccgtctcggacagagattctggttctaatgggcaggtgacctgcacgctaacgcctcacgttccctttaagctggtgtcgacctataaaaactactatagcttggtcctggacagtgcgctagatagggaaagcgtgtccgcctacgaactagtggtcactgctagagacggaggctccccttcgctatgggccaccgcctcggtgtcagtgggcgtcgctgatgtcaacgataacgctcccgccttcgcccaacccgaatacactgtatttgtgaaggaaaataatccaccgggctgccatattttcacagtgagtgcgcaagatgccgatgcccaagaaaatgccctggtcagctactcgttagtggaacgacgggttggagagagagccttgagttcctatgtcagcgttcatgctgagagtggaaaagtgtacgccctccagccgctggatcacgaggagctggaattgctgcagtttcaggtgtctgcacgcgacagcggtgtgcccccattgggatccaacgtaacactccaggtgttcgtgttggatgagaacgacaatgccccagcattactcacacctggcgccggaagcgccgggggaacagtttccgagctgatgccccgatcagtaggtgctggccacgtcgttgctaaggtgagggctgtggacgcagacagcggctacaacgcatggttaagttacgagttacagctcgccgcggtgggggctcggatccccttccgagtgggcctttataccggcgagatttccactacacgacctctcgatgaggtggacgccccgcaccatcggctgctagtcctcgttaaggaccatggagagcccgccctgacagctactgcgactgtcttgctaagtctggttgagtcaggccaagctccacaggcttcttccagagccagtgctggtgccgtgggtcctgaggccgctttagtggacgtaaatgtatacctgattatagcaatctgcgccgtatctagtctgctcgttcttacgctgctgttatacactgcgctccggtgttctgcaccgcccaccgagggcgcttgtgctcctgggaaaccaactctggtttgctcctcagccgcgggttcatggtcttattcacaacagcgacgaccaagggtgtgttcaggtgagggaccccacaagacagacctcatggccttcagcccaagcctcccaccgtgtctgggaagcgctgaggggactggacaaagagaggaggactccgagtgtctgaaagagcccagacaaccaaacccagactggcgctattccgccagtctccgggctgggatgcattcatctgtgcatcttgaggaggcgggaattcttcgcgctgggcccggggggcctgaccagcaatggccgaccgtgagcagcgctacacccgagcccgaagctggggaagtgagtccccccgtgggagccggtgtgaactcaaattcatggaccttcaagtatggacccgggaatcccaagcagtcaggccctggagagttgcctgataagttcattattccaggcagccccgctatcatatccatccggcaagagcctactaattctcagattgataaatctgactttattacattcggaaaaaaagaggagacaaaaaagaagaaaaagaaaaagaaaggcaataaaacccaagaaaaaaaagagaagggaaatagcactacagacaacagcgaccagtag

SEQ ID NO: 131099 - DNA, 2715 bp, synthetic construct
  misc_feature 1..2715: note = Description of Artificial Sequence: Synthetic coding sequence
  source 1..2715: mol_type = other DNA
atgcttagtagttggcagggaggacctcgtcctcgtcagctgttgctgtggctgctcattttagctgcctgggagacaggcagcggccagctacactattccgttcccgaggaggctaaacacggaacgttcgtcggcaggatagcacaagatcttggcctagagctcgccgagcttgtcccgaggttgtttagggtggcctccaagaggcacggggacctcctcgaggtgaatctacaaaatggcatcctgtttgttaatagtcgcatcgatcgcgaagaactgtgtggacgctcagcagagtgtagtatccatctggaagtgatcgttgaccggccactgcaggtcttccacgtggaagtgaaagtccgagatatcaatgataatcctcccatctttccagagtcaaagaaaaggattatcattgccgagagcaggcccccggaaactcgcttccctctcgatggcgcaagcgatgccgacatcggggtgaacagcgcccttacctacaggttggaccccaacgactactttacgctcgacgctcagaacagcctggaacagatgagcagcctgtctctcgtattgagaaaaacactggacagagaggagatccaagaacatagcttgctgctgaccgcttcagatgggggcaagccagaactcacaggaactgtacagctgctgattaccatcctggatgtgaacgataacgcaccagagttctaccagtccgtctataaagtcacagttctcgaaaacgccttcaacgggactttagtaattaagctcaacgcaactgaccctgatgacggcaccaatggcgacatcgtgtacagtttccgaaggccagtctggccggccgttgtctatgctttcactattaaccccaacaatggggaaatcagaaccaagggaaagttggattttgaggaaaagaaactatacgaaatttctgtcgaagctgtcgacaagggcaacattcctatggcaggtcattgtaccctgttggtcgaagtgctggatgtgaatgacaatgcccccgaagtgactatcacaagtcttagcttgccgatccgcgaggatacccagccttcggcaattatcgctcttatctctgttagcgaccgggacagcggcagcaatgggcaggttacatgtacactcacaccacatgtcccttttaaactggtatcaacatataaaaactactattcgttggtgctggattccgccctggatagagagtcagtgtccgcatatgagctagttgtcacggctcgggacggcgggagccccagtctatgggcaaccgccagtgtcagcgtcggggtggctgacgtcaacgacaacgccccggccttcgcccaacctgagtatactgtcttcgtgaaggagaataatccccctggctgccacattttcaccgtgagcgcccaggatgccgacgcccaggaaaacgctcttgtgagctacagtttagtggagcgaagagtgggtgagcgggccctgtctagttacgtcagcgtgcacgcagaaagtggcaaagtatacgccctgcagccgctggaccatgaagagctggaactcctgcagtttcaagtaagcgccagagatagcggcgtaccgcctctgggtagcaacgtcacactccaagttttcgtcctagatgagaatgacaatgctccagcgttgctcactccaggtgcgggcagtgcaggcggtacagtgtcggagctgatgccaagaagtgtcggtgcggggcatgtggttgctaaggtccgcgcagtcgacgcggacagtggttacaacgcatggcttagctatgaactccagcttgccgcagttggggctaggattcccttccgggtgggtctttacacaggtgagatttccactacacgacccctcgacgaagtcgatgcccctcaccaccggctcttggtcctcgtgaaagaccatggggagcctgccctcacagcgaccgctaccgttctcctgtctttagtggagtctggccaagcaccgcaggcttccagccgtgcatccgccggcgctgtcggtcccgaagccgcattggtggacgtgaacgtgtacttgataatagctatttgcgccgtgtcaagcctgcttgtgctgaccctgctcctgtacactgccctccgatgcagcgccccaccaactgagggtgcatgtgcaccaggcaagcctaccttggtctgttcgagcgcggccggctcttggtcgtacagtcagcagcgccgacctagagtatgctctggggaggggcctcacaaaactgacctcatggcattcagcccttccctcccaccctgcctgggatctgccgaaggaacaggacaacgcgaagaagactctgagtgtttgaaggagcctcgtcagcctaaccccgactggaggtacagtgcaagcctgagggcagggatgcactccagtgtgcacttagaggaggctggcatcctgagagcgggaccgggtggacctgatcagcagtggcccactgtcagctcggccactcccgagccagaggcaggagaggtcagccctcccgtgggcgcaggtgttaactccaacagctggacttttaaatacggtcctgggaacccgaaacagtcaggacccgagcccaagaaacagacccaagtgtctttcctgcttaggcggaagggcgaagcgtctcaacctagacaatag

SEQ ID NO: 131100 - DNA, 2475 bp, synthetic construct
  misc_feature 1..2475: note = Description of Artificial Sequence: Synthetic coding sequence
  source 1..2475: mol_type = other DNA
atggctagtagcattcggagggggcggggggcctggacacggctgctctctttgctccttttagcggcctgggaggtgggaagtggccagcttcggtactcagtgcccgaagaagccaagcacggtacgttcgtgggcagaattgcacaggacctcggattggagttggaagagctcgtgcctcgcttgtttagagtggctagcaagaggcacggagatttgttggaggtgaatctccaaaacggcattctgttcgtgaacagccgcatcgatcgtgaagaattatgcggcaggagcgccgaatgctctatccatgtagaggtaatagtcgacaggccactgcaggtcttccacgtggaggtcgaagttaaagatatcaatgataaccctcctatatttcccatgacagtcaaaaccattagatttcccgaaagtcggctgttggacagccgattccctctggagggagcctcggatgccgacatcggagtaaatgctctgcttagctacaagcttagcagttccgaatttttcttccttgatatccaagccaacgatgagttgagcgagagcttgagtctagtgctgggaaagtctctcgatcgggaggaaactgcagaagtgaatctactgctggtggcaactgacggcggtaagcctgaattgactggtacggtgcaaattctgattaaggtgttggacgtcaatgacaatgaaccaacgtttgcacagagtgtttacaaggtgaagcttttggagaatactgcaaacggaaccctggtcgtaaaactgaatgcttccgatgcggacgaaggccccaacagcgagatagtttattccctgggtagcgacgtgtcaagtaccattcagaccaagttcactatcgaccccatctcaggggagattaggaccaaagggaagctcgattacgaggaggccaagtcttacgaaatccaggttaccgctactgacaaaggaactccttccatgagcggtcattgcaagatttccctcaagctggtggatattaacgataatactcctgaagtgtcaataacgtcactgagtctgcccatcagtgagaacgcttccttaggtaccgttatagctcttattactgtgagcgacagagatagcggcacaaatggacacgtcacttgtagccttacccctcacgttccattcaaactggtctccactttcaaaaattattactctctggtgctggactccgccctcgaccgtgaatcggtgagcgcatacgagttggtggtgaccgctcgagacggaggcagcccttcgctctgggcaaccacatccgtctcaattgaggtggcagatgtgaatgataacgcacctgcattcgcccagcccgagtatacagtattcgtcaaggagaataaccctcctggatgccacattttcactgtatccgcgtgggatgcagacgctcaggagaatgctctcgtgtcatattctctggttgaacgccgagtgggagagagagccttgtctagctacgtgtcagttcacgccgaatcaggcaaagtatacgccctccagccactggatcatgaggaagttgagctgttgcagtttcaggtctccgcaagagacgcaggagtgccacccctagggtcaaacgtgactctgcaggtttttgtcctggacgagaatgataacgctcccgcccttctggcacccagagcaggaactgctgcaggcgccgtatcagagctggtcccctggtcagtcggtgccggacatgttgtggcgaaggtccgggccgtggacgcagactcaggctacaatgcttggctgtcatacgagttgcaattgggaacagggagtgcaaggattccttttagagtgggcctgtatacgggggagatctccacgactagggccttagacgaggcagactccccacgccaccgtttgttagtgttggtcaaagatcacggagaaccagcgctcacagctacagcaaccgttctggtcagtctggtagagagcgggcaggcccctaaggcgagctcaagggcatgggttggggccgcagggtccgaggctacactggtggacgtgaatgtgtatctgataattgcaatctgcgccgtgtcgtccctactagttctgaccgtgctgctttacaccgcgctgaggtgttctgtgccgcctacagagggcgccagagcgcccggtaagccgacactggtgtgttcctcagccgtgggcagctggtcctacagtcagcagaggcgacagcgcgtctgttcgggggaagatccgcctaagacagatctgatggcattctccccttctctgagtcaggggcctgatagtgctgaggagaagcagctgtccgagagcgaatacgttggcaaagtctcactactcctgtttctcgccaatagtaaaatcgtgttatttaagaagttctacatgatatcgacctcatacctggattcctag

SEQ ID NO: 131101 - DNA, 2847 bp, synthetic construct
  misc_feature 1..2847: note = Description of Artificial Sequence: Synthetic coding sequence
  source 1..2847: mol_type = other DNA
atggctagcagtatccgccgaggaagaggcgcttggacaagactccttagcctgcttttgctggccgcctgggaagtgggctctggccagctgagatacagtgtgcccgaagaagccaaacacggaacctttgtaggacgcatagcacaagacctcggcctggagctggaggaactggtgcctagactgttccgcgtggcatctaaacgccatggtgatctcctggaggtcaacctgcaaaatggcatcctcttcgtcaacagcagaatcgaccgcgaggagctgtgtggacgatctgccgagtgcagtattcatgtagaggtgatcgtggaccgccccctgcaagtatttcacgtggaagtcgaagtgaaggatattaacgataatccacccatttttccgatgacagtaaaaacaattagattcccagagtcgcgcctcctggatagccgcttccctctggaaggcgcttccgatgccgatattggggtaaacgcactgctgtcttataaattgtctagcagcgagttttttttcttggatatacaggcgaacgatgaacttagtgagagtctgtcactggtgcttggcaagtctctggatcgagaggaaactgccgaagtgaacctcctactggtggctactgatggcggaaagcctgaattaacaggcactgttcagatcctgatcaaggtcctggacgtaaacgacaatgagcctacctttgcacagtccgtgtacaaggtaaagttgctcgagaacaccgccaatggcacacttgtggtaaaactaaacgcctccgacgcggatgaggggccaaattctgagattgtgtactctctggggagcgacgtatccagcaccatacagaccaagttcaccatcgaccccatctctggcgaaatcaggactaagggaaagctcgactatgaggaagccaagtcctacgaaattcaagtgactgccactgataagggcaccccctctatgtctggacattgcaaaataagcctaaagcttgttgatattaacgataacacaccagaagtatctattacttccctgagtctcccaattagcgagaatgcttctcttgggacagtgattgcgcttatcactgtttcggaccgggacagcggtaccaacggccacgttacatgttctctgactccacatgttcccttcaagcttgtgagcaccttcaaaaactattatagcttggtgcttgactccgccctggacagggagtccgtctccgcatatgaattggtcgtcaccgctagagacggcgggtcaccctctctctgggcaaccacatctgtatcaatcgaagtggctgacgtgaatgacaacgcacccgcctttgcacagcccgagtacacggtcttcgtgaaggagaataaccctcccggttgtcatatcttcactgtcagtgcatgggacgcggatgcccaggaaaacgctttggtttcttactccctggtcgagagaagagtcggcgagagggccctgagttcatatgtttcagtacacgccgaatccggaaaggtctacgcccttcagccgctggaccacgaagaggtagagcttttacagtttcaagttagcgcgcgggatgccggggttccgcccttgggcagtaatgtcaccttgcaagtcttcgtccttgatgagaatgacaatgcccccgcgctacttgctcctcgggctgggacggccgctggagcggtttctgaactggtgccatggtcagttggggcaggccacgtggttgctaaagtgagggccgtcgacgccgactcgggatacaatgcctggttgagttacgagttacaactggggactggctctgcccgcataccctttagagttggtctgtataccggcgagatttccacaactcgggcgcttgatgaagccgatagcccccggcacaggctgctcgtactcgtgaaggaccacggagaaccggcacttaccgccacggcaacagtactggttagtttggtggaaagcggccaggcgcctaaagctagcagccgggcctgggtcggggctgctgggagcgaggccactctcgtggatgtgaacgtgtacctcatcatcgccatttgtgctgtgtcctcactgctggtgttaacagtcctactttacacagccctaagatgtagtgtgcctccaaccgagggggcccgagctccagggaagcctaccctcgtgtgtagcagtgccgtggggtcatggtcttatagccagcaacgccggcagagggtttgttctggagaggacccccctaagacagacctgatggcgttcagtccatccctgtcccaggggcccgactctgccgaggaaaagcagctgtcagagtccgagtatgtggggaaaccaagacagcccaatcctgactggcgatactccgcatctcttcgcgctggaatgcactcctcagtgcatttagaggaagccggaatcctgagagccggccccggggggcctgaccagcagtggcctaccgtttcctccgcgacaccggaaccagaagcaggtgaagtgagccccccggtgggtgctggagttaacagcaactcctggacatttaagtacgggcccggcaaccccaagcagtctggacctggagagttgcccgacaaatttattataccaggatcacctgctatcatctcaatcaggcaagagcccacaaattcacagatcgataagtccgatttcattaccttcgggaaaaaagaagagactaagaagaaaaagaaaaaaaagaagggcaataagacgcaagaaaagaaagagaagggaaactccaccactgacaactcagatcagtag

SEQ ID NO: 131102 - DNA, 2853 bp, synthetic construct
  misc_feature 1..2853: note = Description of Artificial Sequence: Synthetic coding sequence
  source 1..2853: mol_type = other DNA
atgctgttctcatggcgcgaagaccccggggctcaatgtctgttactgtccctgctcctcctggccgcctccgaggtcgggagtggccagttacactactcggtaagtgaggaagctaaacacggtacctttgttgggcggatcgcacaagaccttgggcttgagctggctgaactcgtgcctcgattatttagagtggcatcgaaacgtcacggcgacctcctggaggtgaacttacagaacggcatcttgtttgtgaattcacgcattgacagggaagaactctgcggccggagcgcagagtgctccatacacttggaggtgattgttgaccgacccttgcaggtgttccacgttgaagtcgaagtaaaagatattaatgacaatgcacctgtgtttcctatggctgtgaagaatctgttcatttccgaatcacgccagcccggaagccgattttccctggaaggcgcttccgacgccgacatcgggacaaatagcttactgacttactccttagatagtactgagtactttactttggatgtaaaacgcaatgacgaggagatcaagtcactggggctggtcctgaagaagaacctcaacagggaggatactccaaagcactacctgctaattacagcgatcgacggagggaaacccgagttaaccggaaccacccaactgaaaatcaccgtgctcgatgtaaatgataatgcccctgctttcgagcgcacaatttataaagtcaggctgttagagaacgctccaaacggtactcttgtggttacagttaacgccactgacctagacgagggggtgaataaggacatcgcctacagttttaacacagatatgagcgccgatatcctcagtaagtttcacctcgatcctgtcaacggccagatatcggtgaagggaaatatcgacttcgaggaatcgaagtcctatgagatacaggtggaagccacagataaaggcaacccccccatgtctgaccactgcacagtcctactcgagatcgttgacattaatgacaacgtacccgagctggtgattcagtcgttgtcgttgcctgtcctggaggattctccgctttccaccgtaatcgcactgatctccgtgtcagacagagattcaggagtgaacgggcaggtgacatgctctctcaccccacacgtgccattcaagctagtctcaacatttaaaaattactattcacttgtgctggatagccccctggatcgggagagcgtttctgcatatgagctggtggtgaccgctcgggacggcggttcccccagcctgtgggctaccgccagtgtgagtgtggaggtagctgacgtgaatgacaacgcccccgccttctcacagtcagaatatactgtctttgttaaagaaaacaatccccccggatgtcatatctttaccgtgagcgcccgggatgcagatgcccaggagaatgcactggtctcctacagccttgtggagaggcgggtgggagagagggcactcagttcctatgtctcggtgcacgcagagagtgggaaagtgtatgccctgcagccgctcgaccacgaggaactggaactcttgcaattccaggtgtctgcccgcgatgcaggcgtgccaccgctcgggagtaacgttactttacaagtgtttgtcctggacgagaatgataacgctcctgccctgctgatgccaagagtgggcggaattggaggcgccgtttcagagcttgttcctcgcagtgttggggcgggccacgtcgtcgccaaagttagagcagtagatgcggactctggttacaatgcctggttgtcctacgagctccagcctggaacagggggcgcccggattccctttcgcgtagggttgtataccggggaaataagcacaacaagggccctggatgaggttgacgctcctcgacatagattgctggtgctggttaaagaccacggggagccaagtctcacagccacagctactgtgctggtgagcctggttgaatccggccaggctccaaaggcatcaagtcaagcatcagcgggtgccaccggtccagaagctgcacttgtggacgtgaatgtctatttaattgtggccatctgtgctgtgtcttctttgctcgtgctgaccctgctgctctatacggctctgcgctgctcagctccccccacagagggtgattgtggccccggcaagccaaccctggtgtgttcaagcgccgtgggctcctggtcctattcccagcaacgccagcagcgggtctgcagcggcgaaggcctgccaaaaaccgacctcatggccttctcgccttcgctgccaccctgccccatatcacgggaccgcgaggagaagcaggacgttgacgttgacttgtcggccaagccacggcaaccaaatcctgattggcgctacagcgcctccctgagagcaggaatgcattcctctgtacatttggaggaggccggaattctacgtgccggccccggggggccggaccagcagtggcctaccgtgtcatctgccacacctgaacccgaggcaggtgaagtctctccccctgtgggcgcaggcgtgaattctaactcatggaccttcaagtacggacccgggaaccctaagcagagcggccctggcgagctgcccgacaagttcattattccaggcagtccagccatcatttctattcggcaagagcccaccaattcccagatcgataagagcgattttatcacttttggtaagaaggaggaaactaaaaaaaagaagaaaaaaaagaaaggaaataaaacccaggagaaaaaagagaaggggaatagtactaccgataacagcgaccagtag

SEQ ID NO: 131103 - DNA, 2475 bp, synthetic construct
  misc_feature 1..2475: note = Description of Artificial Sequence: Synthetic coding sequence
  source 1..2475: mol_type = other DNA
atgctgttttcctggcgggaagaccccggggctcagtgtctgttgttgagccttttgctgctggctgctagtgaagtgggaagcggccaactgcactacagcgtcagcgaagaggctaaacatggtacgttcgtggggcggatcgctcaggatctgggcctggagctggcagaactggtgcctcgtctgttccgcgtggcctcaaagcgccacggtgatctcctggaagtgaatctgcagaacgggatcctatttgtgaattcaagaatcgatcgcgaagagctttgtggtaggagcgccgaatgcagcatccatctggaggtgattgtggaccgcccactgcaagtgtttcatgtggaagttgaggtgaaagacattaacgacaatgcaccagtttttcctatggctgtgaagaatctgttcatctctgagagccgccagccagggtcgagattctccctggagggggccagtgacgccgacatcggaacgaatagccttctgacatattctctggactcaactgaatatttcaccctggacgtaaaacgaaatgacgaggagatcaaatccctggggctggtcctgaaaaagaacctgaatcgggaggatactccaaagcattacttgctgatcacggccatcgatggggggaagcccgaacttactggtaccacccagcttaagattacggtgttggacgtcaatgataacgcccctgcattcgaacgcacgatctataaggtacgcctcttggagaacgcgccaaacggaaccctggtcgttacggtcaacgccacggatctcgatgaaggggtgaacaaagacatcgcttacagtttcaacacagatatgtctgccgacatactgtccaagtttcaccttgaccctgtgaacggacagatctccgtgaaaggcaacatcgattttgaagagagtaaaagttacgaaattcaggtggaggctacagataagggcaacccccctatgtcggaccactgtactgtgctgctcgaaattgtcgatatcaacgacaatgtacccgagctggtcattcagtctctatccctcccagtcctggaagacagcccactgagcactgtcattgccctgattagtgtcagtgatcgggacagcggggtaaatgggcaggttacctgctctttaaccccacatgttccattcaaactggtgtcaactttcaagaactattatagtctcgttctggactcgccactggatcgggagtccgtatcagcttacgagctagtcgtgaccgcccgcgatgggggctctcccagcctgtgggccacggcctcggtgtccgtggaagtggcagacgtgaatgacaacgcaccggccttttcccagagtgaatataccgtattcgtgaaagagaacaaccccccggggtgtcacatattcaccgtctctgctagagatgcagatgctcaagaaaacgcgctggtgagctatagccttgttgagcgtcgagtgggcgaaagggccctgtctagctatgttagcgtacatgccgaaagcgggaaggtgtacgcactccagccgcttgaccacgaggaactggaactcctgcagtttcaagtcagtgcccgcgacgccggggtgcccccactgggctccaacgtgaccctccaggtgttcgtactggatgaaaacgacaacgcccctgcactgttgatgccccgggtgggtggaattgggggagccgtctcagaattagtgccacggtccgtcggggcgggacacgtggtggctaaagtccgggccgtggatgccgactcgggctacaatgcatggctgtcctatgaactgcaacccggaactgggggggctcgaataccttttagggtggggctgtacaccggcgagatttctacaactcgagccctcgatgaggtggatgctccaagacaccgtctcctggtcttagtaaaggaccacggagaacccagcctgacagcgactgcaaccgtgctggtgtctctggtcgaatccggccaggcacccaaggcatcaagccaggcctctgctggggcgaccggacccgaagccgccctggtagatgtcaatgtttatctgattgtagctatttgcgccgtgagcagccttcttgttttgacattactgctgtacaccgctctgcgttgtagcgcccccccaacagagggcgactgtggccctggaaagcccacgctggtctgcagtagcgcagtcggttcttggtcctattctcagcagagacagcagagagtgtgctccggcgaaggtcttcccaaaactgacctgatggcttttagcccctcccttccaccttgtcctattagtcgtgacagagaggagaaacaagatgtggatgtggacttatcagccaaggtgtcaaatttttatctgtttttcccaaagtgcctgtgttttagttttctcaacgtctcaacccctctggaaatacactag

SEQ ID NO: 131104 - DNA, 2451 bp, synthetic construct
  misc_feature 1..2451: note = Description of Artificial Sequence: Synthetic coding sequence
  source 1..2451: mol_type = other DNA
atggtgtattcgagaagaggaagcctcggcagcaggctcctcttactctggttgcttttggcctactggaaagccggcagcggtcaactccactacagcatacccgaagaggctaagcacggaactttcgtcggccggatagcccaggacctgggactggaactggccgagttagttccaaggctgttcagggtcgcatccaaaggaagaggtgatctgcttgaggtcaacctccagaatgggatcctgttcgtgaacagccgtatcgacagagaggagctgtgtagaagacgcgctgagtgctctatccacctcgaagtaattgtggatcgaccactgcaggtcttccacgtcgaggtggccgtgaaggacatcaacgacaacccccccagattctctcggcaggagcagcggttattcatcctggaaagccgcatgcccgattccaggttcccgctggagggcgctagcgaccttgatatcggagcaaacgctcagctaagataccgcctcaatcccaatgagtatttcgacctggatgtgaaaaccaacgaagaggagacaaattttctggagctggtccttcgaaaatcgttagaccgcgaagagacacaggagcatcgattgttggtgattgcgactgacggcgggaagccagagctcaccggaactgttcagcttttgataaacgtgctcgacgcaaatgacaacgcaccagagtttgataagtccatttacaatgtgcgtctcctcgagaacgcgccctctgggaccctggttataaaactgaacgcttccgacgctgatgagggtatcaacaaagagattgtgtatttctttagtaatctggtcctagacgacgttaagtccaagttcattattaatagcaacactggagagatcaaagtgaacggggaactggattatgaggactacaactcatacgaaattaacatcgatgccatggataagtcgaccttcccgctgtccggccactgcaaagtggttgtcaaacttctggacgtaaatgataatacccccgaaatggccattaccaccttattcctcccagtgaaggaagacgcccccctttcaaccgtcatcgccctgatctctgtttctgaccgcgactcaggagccaatggtcaggtgacctgcagcctaatgccacacgtgccgtttaagctcgtctccacatttaagaactactactccctggtgctagactccgccctggatcgggaaagtgttagcgtgtatgagctcgtggtgactgcccgcgacggaggctcgccgagcctctgggccactgccagcgtttccgttgaggtagccgatgtgaatgacaatgccccagctttcgcacaaccccagtacaccgtgttcgtgaaggagaataacccacctggctgccacattttcactgtgtcggccagggatgctgatgcccaagagaatgccctcgtatcatatagcctcgtcgagcgccgcgtgggcgaacgcccattgagctcatatgtgtcagtccacgcagagagcggcaaagtttatgccctccaacccctggaccacgaagaggtagaactgctacagttccaggtatccgcaagggatgcaggcgtaccaccccttgggtccaacgtaacactccaggtatttgtcctcgatgagaacgataacgctcctgcactactggttcctcgcgtaggtggaaccgggggagcagttagcgaactcgtgcctagaagcgttggcgctggacatgttgtcgctaaagtccgtgcagtcgatccagactctggctataatgcttggctgtcatatgagctgcagccagcaccaggttcggcgaggatcccgttccgcgtagggctctacaccggagaaatatccacaacccgatcgttagacgaaaccgaggccccacgccataggctcctggtcctggtcaaagaccatggcgaacctcctctcacagcgaccgccacggtgcttgtcagcctggtggagagtggtcaagctcccaaggcttcaagtcgggcatccgccggcgccgtcggccccgaggcagccctcgtggacgttaatgtgtatttaattattgccatctgcgcagtttctagtctgctcgtgcttacgctgctcctctatacggctctgcgatgtagcgctcagcccaccgaagctgtctgcaccaggggcaagcccactctcctgtgtagctccgcagtgggcagctggtcttattcacaacaacggagacagagagtatgtagcggcgaggcgccacccaagactgatcttatggcctttagcccttccctgccgcaaggaccaacttcgacagataatgtgagctttctgattctgacgagcatttttccgtcacagtttagcaacatcaagtgtcacattcaccccttgttcctgtatcttaagatcatgagctag

SEQ ID NO: 131105 - DNA, 2673 bp, synthetic construct
  misc_feature 1..2673: note = Description of Artificial Sequence: Synthetic coding sequence
  source 1..2673: mol_type = other DNA
atggtgtattcacggcggggatctctgggttcccggctcctcctcttgtggctgctgttggcttattggaaggcaggctccggccagctacactactcaatcccagaggaagccaagcatggcacattcgtcgggcgcatcgcccaagacctggggctggagctcgcagagcttgtgcctcgactgtttagagtcgccagcaagggcaggggggatctgcttgaagtaaatctccagaatggcatcctgtttgtgaacagccgaatcgaccgcgaagagttgtgccgtcggcgtgccgagtgttccattcatttggaggtcatagtggaccggccccttcaagtctttcacgtggaggtcgcagtaaaggatattaatgataaccccccccggttcagtcggcaggagcagaggctgtttatactggaaagtcgaatgcctgactcgagattcccactggagggtgcttccgacctggatattggagcaaacgctcaattgcggtacaggctaaatccgaatgaatattttgacctcgacgttaaaaccaatgaggaggagaccaatttcctcgaattggtccttcgcaaatctctggacagggaggaaacccaggagcaccgcttactggtgatcgccacagatggcggcaagccggagttgaccggaaccgttcagctgcttattaacgtgttagacgcaaacgacaacgcccctgagtttgataaaagcatctataacgttaggttactggaaaacgccccctcggggacactggtgattaagctgaacgcctctgacgcagacgaaggaatcaacaaggagatcgtttattttttctctaatctggtcttggatgacgtcaagtccaaattcatcattaatagcaatacgggcgagatcaaggttaatggtgagctcgattacgaagactataacagctatgaaattaacattgatgccatggacaagagcacattccccttgtccggccattgcaaggtggtcgtgaaattgctggacgtgaatgacaatacgcctgaaatggccatcacaaccctgttcctgcctgtgaaggaggacgccccactctcaaccgtgattgcacttatttcggtgagcgaccgcgatagcggcgccaatgggcaggtgacttgttcgctgatgccacacgtgccattcaaactggtgtctacattcaagaactactattctctggtgctggatagtgcacttgacagagaaagcgtgagcgtgtacgagctagtagttaccgcccgggacggcggcagcccaagcctttgggcaacagcatctgtgtctgtcgaggtggctgacgtgaacgataatgctccagcattcgcgcagccgcagtatacggtgttcgttaaggagaacaaccctcccggctgtcacattttcacagtgtctgcgcgggacgccgatgcgcaggaaaacgcccttgtctcctattcactggtggaaagacgcgttggtgagcgccccctgtccagttacgtgagtgttcacgcagagagcggaaaggtatacgctctgcagccacttgatcatgaggaggtagagcttcttcaatttcaggtttcagctcgggacgcaggtgttccccctctgggctccaacgtgacactccaggtatttgtactggacgaaaatgataacgccccagctctgcttgtaccccgcgttggggggactggcggcgccgtcagtgaacttgttccacgcagcgtgggcgccgggcacgtagtggcgaaagtgagggctgtggatccagattcaggatacaatgcctggttaagctacgagcttcagcctgcacctgggagcgcacgaattccattccgggttggcctgtacaccggcgagatctccacgacaagaagcttggatgagactgaggccccccggcatagactgctggttttggttaaagaccatggagagccgcccctcaccgccactgccactgttctggtatccctggtggagtccggccaggcgcccaaggcgtctagcagggccagtgccggcgcggtgggacccgaggccgcgctggtggacgtgaacgtctatctcatcattgctatttgtgccgtcagctcactgctcgtgctgactctcctactgtatactgccctgagatgctcggcacagccgacggaagcagtgtgcacacgaggaaaacccaccctgctgtgcagctccgccgtgggatcttggagttacagccagcagcgacgacagcgggtgtgttccggcgaagccccgcccaaaaccgacctcatggctttctctccctcactcccccagggaccaacttctacagacaacccacgccagcctaaccctgactggagatattccgcgtctctaagagccggcatgcactcaagtgttcacctcgaggaagcagggatcctgcgggcaggaccaggaggacctgatcaacagtggccaaccgtgtctagcgctaccccagagccagaggccggcgaagtaagcccaccagttggagccggtgtaaactctaactcatggacattcaaatacggaccaggtaaccctaagcagagtggacccgaacctaaaaagcagacgcaggtgtcattcttgttgcgacgcaaaggagaagcgtctcaacctaggcagtag

SEQ ID NO: 131106 - DNA, 2811 bp, synthetic construct
  misc_feature 1..2811: note = Description of Artificial Sequence: Synthetic coding sequence
  source 1..2811: mol_type = other DNA
atggtctactctagaaggggatctctgggatcgcgattattactactttggctgctgctggcctactggaaggctggctccggccagcttcactattcaattcctgaagaggctaagcatgggactttcgtcggacgtatcgcccaggaccttggtctggagttggccgagctggtgccccggctattccgcgtggcttcgaaagggagaggagacctcctcgaagtcaaccttcagaacggtatcctgttcgtgaactctagaatagaccgggaagagttatgcaggcgcagggcagagtgcagtatacatctggaggtgatcgtggacaggccacttcaagtgtttcacgtcgaggttgcagtcaaggacatcaatgataatccccccagattcagccgccaggagcagcgcctgtttattctggagtcccggatgcctgatagtcggttcccattggagggtgcttccgatctggacatcggtgccaacgcccagcttcgctatcggctgaaccccaatgaatactttgacctcgatgtgaagactaacgaggaggagacaaatttcttggagctggttctccgtaagagtctagatagagaagagactcaagaacacaggctattggtcattgccactgatggaggtaagcctgaactaactggtaccgtgcaactcttgatcaacgtgctagacgcaaatgataacgccccggagtttgataagagtatttataacgttagactcctggaaaatgcgccctccggcactctggtgataaagctcaatgcctcggatgccgatgagggaattaacaaggaaattgtatacttcttctctaatcttgtgctcgacgacgttaaaagtaagttcatcataaactcgaatacgggggaaattaaggttaacggtgaactcgactacgaagattacaactcctacgagatcaacatagatgcaatggacaagtccacattcccattatctggtcattgcaaagtcgtggtaaaacttctcgacgtaaacgacaacacgcccgagatggccatcaccactctgttcctgcctgtaaaagaggacgccccactctcaacagttatcgctctcatctctgtgagtgacagagattctggtgcaaacgggcaggtcacctgcagccttatgccacatgtgcctttcaagctggtgagtactttcaagaactattacagcctggtccttgattcggctctagaccgagagtcagtgtcggtgtacgagttagtcgtgacggctagagacggaggtagcccaagcctgtgggccactgcctctgtttcagttgaggtggcggacgtaaatgacaatgcccctgcctttgcccagccccagtataccgtttttgtgaaagagaataacccccctggatgccacattttcaccgtgtccgcccgcgacgccgatgctcaggaaaatgccctggtaagttattctctggtggagagaagggtgggggagcgcccccttagctcgtacgtctctgtccacgcggagagcggaaaggtgtatgccctccaacctctggaccacgaagaggttgaattgctgcagtttcaagtttcggcacgggatgcaggagtgcctcccctgggcagcaacgtgaccctgcaggtttttgtgctggatgagaatgacaatgcgcctgccttactagttcccagagtgggaggcaccggaggggctgttagcgaattggtgccacgatctgtcggcgccgggcacgttgtagccaaggtccgtgccgtggaccccgactccggctacaacgcttggttgagctatgaattgcagccagcacccgggagcgcccggattccattccgggtcgggctctataccggggaaattagcactacccggtcgctcgatgagacagaagcacccagacatcgcctcctggtgctggtgaaggaccacggggagccaccactgacagccactgcgaccgttttagtatccctggtggagagtggacaagcccccaaggcctccagcagggcctcagccggagccgttggcccggaggccgcccttgtcgatgtgaatgtttatttaataattgctatctgtgccgtcagtagcttgctggtgctgaccctcctgttatataccgccctgcggtgctctgcccagccgaccgaggcagtgtgtacgaggggcaagcctacactcctatgcagctctgccgtgggatcatggagctatagccagcagcgacggcagcgggtttgtagcggtgaagctcctccaaagactgatctgatggcgtttagcccctcactgccacagggtcccacgagtacagacaatccacggcaacctaaccctgattggagatactctgccagcctccgtgcaggaatgcacagttcagtgcatctcgaagaggcgggcatcctgcgtgccggccccggaggacctgatcagcagtggcccactgtgagctcggccacacccgagcccgaagctggcgaggtgagccctcctgttggcgccggcgtgaacagcaacagctggaccttcaaatacggccctgggaaccccaagcaaagcgggcccggcgagttacctgataagtttatcattcccggcagcccagccattatttctatcaggcaagaaccgactaacagtcaaatcgacaagagcgattttatcaccttcgggaaaaaagaggagacaaaaaaaaagaaaaagaagaagaaggggaacaagacccaggaaaagaaggaaaaaggaaacagcaccaccgacaactctgaccagtag

SEQ ID NO: 131107 - DNA, 2061 bp, synthetic construct
  misc_feature 1..2061: note = Description of Artificial Sequence: Synthetic coding sequence
  source 1..2061: mol_type = other DNA
atggttttcacccccgaagataggttgggaaagcaatgtctgttgctaccacttctactgctggcagcttggaaagtggggagcggacagcttcactactcagtgcccgaggaggcaaaacatggcacattcgtcggcaggatcgcgcaggatttgggattggaactcgctgaactggtgccccgcttgttccggatggcttctaaagaccgcgaagatcttctggaggtgaatctacagaacggaattctcttcgtgaattctagaatcgatcgggaggagctctgcggtcgttcggccgagtgtagcatccaccttgaggtgatcgtggatagacctctccaggtctttcatgtcgatgtcgaagtgcgggacataaacgataatcccccgttattcccggtagaggaacagcgcgtactcatctacgagtcccgcctccccgatagcgtgtttcctctggaaggtgcatccgatgcagatgtgggatctaattctattctgacctataaattgagctcaagcgagtactttgggcttgacgtgaaaatcaactcggatgataacaaacagattggtctgttgctcaaaaagagcctagaccgggaagaggcccctgcccacaacctctttctgactgccaccgatgggggtaagccggaactgacagggacagtacagctattggtgaccgtgcttgatgtgaacgacaatgcaccaacatttgaacaatccgagtatgaggtgaggatttttgagaatgctgacaacggcactactgtgatcagactaaacgcttctgaccgggacgagggagcaaacggagccatctcttactcattcaattctctggttgcagctatggtcattgatcatttctctatcgacaggaatactggcgagatcgtgattaggggtaaccttgatttcgaacaggagaacctgtacaaaatccttatagacgcaacagacaaagggcatcctcctatggcaggacattgcactgtgctggtaagaatcctggacaagaatgataacgttccagagatagctctcacctcactctcactgccagtgcgcgaagatgctcagttcggcacagtgattgctctcatcagtgttaatgatctggatagcggtgctaacggccaggtgaactgctccttaacgccgcacgtgccattcaaactcgtgtccaccttcaagaattattacagcttggtccttgattctgcactggaccgggaatccgtgagtgcttatgaattggttgttacggcaagggacggtggaagtccctccctgtgggccactgcctcattatctgtggaggtggcagacatgaacgataacgctccagcattcgcccagcccgaatataccgtgttcgtgaaggagaacaatccacccggctgtcatatatttactgtgagtgctcgtgacgccgatgcccaagagaatgcgctggtgtcctatagtttagtggaaagacgcgtgggtgagagagctctgtcatcctatattagtgtgcatgctgaatccggtaaggtatacgcactccagccgctagatcacgaggagctggagctgctgcagttccagccccgtcagccaaaccctgactggcgctattcagcaagcctcagagctggaatgcactcaagcgtccatctggaagaggcgggtatacttagggcaggccctggcggtccagaccaacagtggcctacagtttcaagcgccaccccagaacccgaggctggcgaggtctcccctcctgtgggtgcaggcgtcaatagcaacagttggacattcaaatacggacccgggaatcctaagcaatctggtccaggagaattacctgacaagttcattatccctggcagtcccgccataatctctatcaggcaggagcccacaaatagccagattgataagtcagattttattacatttgggaaaaaggaggagactaagaaaaagaaaaagaaaaagaaaggcaacaaaacccaggaaaagaaggagaaagggaactcaaccacggataactccgaccagtag

SEQ ID NO: 131108 - DNA, 2853 bp, synthetic construct
  misc_feature 1..2853: note = Description of Artificial Sequence: Synthetic coding sequence
  source 1..2853: mol_type = other DNA
atggtcttcaccccggaggaccgcctgggtaaacagtgtcttttactcccacttcttctcttagcggcgtggaaggtggggagtggccagctgcattacagcgtacctgaagaggcaaagcatgggactttcgtgggccggatcgctcaagatttaggtctggaactcgcagagctggttccacggctctttcgcatggcgagtaaggacagagaagacctgcttgaagtcaatctgcagaacggaatcttgtttgtcaactctcggatagaccgagaggagctgtgtgggaggtcagctgagtgctctatccatctggaggttatcgtcgatcgccctctccaggtttttcatgtagatgtggaggtgagagacatcaacgacaatcccccactctttccagtggaggaacagagggtgctgatctacgagagccgactcccagattccgtctttccacttgagggcgctagcgacgcagatgttggctctaattccatcttaacatataagctgtcttcgtctgaatacttcggcctggacgtcaagataaacagtgatgacaacaagcaaatcggactgctcctcaagaagtcattggaccgcgaggaggccccggcccacaatctattcctcaccgccaccgatggtgggaagccggaattaactggcacagtgcaactgctggtcaccgtcctcgatgtgaacgacaacgctcctacatttgagcaaagcgagtatgaggtcagaatctttgagaacgccgataacggcaccacagtgattcgcctcaatgcctctgatcgcgacgagggggccaatggagccatctcctattcttttaattcactagtcgccgccatggtgattgatcatttctctattgatagaaacacaggtgaaattgtgatcagaggcaaccttgattttgagcaggaaaatttgtataaaatcctcattgacgccacagataaaggccaccctcctatggccggtcactgcaccgtccttgtgcgtatattagataagaatgataacgtacccgaaatcgcgctgacatccttgtctctccccgtccgcgaagacgcccaatttggtaccgttatcgccctgatcagtgtgaacgacttggactcaggagcaaatggacaggttaactgttcgctgactcctcacgtgccattcaaactggtcagcacttttaaaaactattatagtttggtgctggacagtgctctggaccgcgagtctgttagtgcatacgagctcgtggtgacagccagagacggcgggtctccaagcctttgggccacagcttcattgtccgttgaagtggcagacatgaacgataacgcacctgcatttgcacagccagagtacactgtttttgttaaagaaaataacccccccgggtgtcatatcttcaccgtgtcggctcgcgacgccgacgcccaagaaaacgccctggtatcttattctctggtggagcgcagagttggggaacgggctctgagctcctacatttccgtgcacgctgaaagcggaaaagtgtacgcacttcagccccttgaccacgaggaactagagcttctccagttccaggtcagcgccagggatgccggcgtccctccgttaggaagtaacgttactctccaggttttcgtcttggatgagaatgacaatgcccccgccctgcttgccccacgggtcggtggtactggcggggccgtgtctgaactggtaccgaggtcactgggagcaggacaggtcgtggccaaagtgagggcagtcgatgctgactctgggtataatgcatggttaagttatgaactccaacctccagcgagcagcgccaggttcccctttcgggtgggactttacaccggcgaaatcagtactaccagggtgctggatgaagccgactcacctcgtcatcgactccttgtgctggtgaaggatcacggcgaacccgccctgacggccaccgcaactgttttggtgagcctcgtcgaatctggacaagcaccaaaagcatcgtcacgggctagcgttggagcagccgggccagaggcagctctggtggatgttaacgtgtacttgattatagcgatctgtgccgtgtcatctctcctcgtcctgaccctgcttctttacacagctctgcggtgcagcgcgccaccaacggagggggcttgtacagccgacaaacctacgttagtgtgtagttccgccgtgggcagttggtcctactcccagcagcgccggcagcgggtttgcagcggggaagggccccccaagatggaccttatggctttcagtccctctttaagcccatgtccaatcatgatgggcaaggcggagaaccaggatctcaacgaagaccatgatgccaagcccagacaacctaatcccgactggagatactcagcttcactgcgggctggtatgcacagttccgtgcatttggaggaagcaggcattctgagagccggaccaggcgggccagaccaacaatggcctaccgtgagctcagctacaccagagccagaagctggcgaagtgtcccctccagtgggcgcgggggtgaacagcaatagctggaccttcaagtatggacccggtaatccaaaacagtctggccccggggagcttccagacaaattcattattcctggcagccctgcaatcatatctatccgacaggaaccaacgaattctcagatagacaaatctgacttcatcacctttgggaaaaaggaagaaacaaagaagaagaagaagaaaaagaaggggaacaaaacacaggaaaagaaagagaagggcaactccactaccgataattctgatcaatag

SEQ ID NO: 131109 - DNA, 2370 bp, synthetic construct
  misc_feature 1..2370: note = Description of Artificial Sequence: Synthetic coding sequence
  source 1..2370: mol_type = other DNA
atggtgtgccctaatggctacgatcccggtggcagacacctgctcttatttatcatcattctggccgcttgggaggcagggaggggtcaactgcattatagtgtcccagaggaggcgaaacatggaaactttgtcggaagaatagcccaggacctggggctggaactcgccgagctagtgccgcgcctcttcagagccgtttgcaagttcagaggcgacttgctggaggtcaaccttcagaatggtatcctgttcgttaacagccgcattgatcgggaggaactctgcggcagatcggccgaatgttctatccacctcgaagtaattgtcgaacggcccctacaggtgttccatgttgacgtagaggtaaaggacatcaatgacaacccaccagttttccctgccacccagcgtaacctgtttatcgccgagtcgcggccgctcgacagcagattcccactggaaggagcttccgatgctgacatcggtgaaaatgcactcctgacttacaggttgtccccaaacgagtatttctttctcgacgtgccaacatccaatcagcaggtgaagcccttggggcttgtgctgcgcaagctgctggacagagaggagacacctgaactccacttactcctcacagcgactgacggaggcaagcctgagttgacgggcaccgtccaactgctaattaccgtactggataataacgacaatgccccggtttttgatcggactctgtatactgtaaagttgcccgagaatgtcagtattggcacgcttgtgatccaccccaatgcatctgacttggacgagggtctgaacggcgacattatatacagcttctcttcagacgtgagtcctgacattaagtctaagttccacatggacccactgagcggcgcgattacagtgatcggccatatggactttgaggaatcaagagcccacaagattcccgtcgaagcggttgacaaggggttcccgcccctagcaggccactgtaccgttctggtcgaggtggtggatgttaacgataacgccccacaattaaccttaacatccctcagccttccgatccctgaagacgcccagcccggcacagtgattactctgatcagtgtctttgaccgcgatttcggcgtgaatggtcaagtgacctgcagcctgactccaagggtccccttcaaactggtatcaaccttcaagaattactacagcctggttctggacagcgccctcgacagggagtcggtcagcgcctatgaactggtggttacagcacgggacggtggttctccatccctgtgggccacagccagcgtcagcgtagaagtggccgatgttaacgataacgctcccgccttcgcccaacccgagtataccgttttcgttaaggaaaacaatccccctgggtgtcacatctttaccgtgtccgcaggcgatgccgacgcccagaaaaatgcattagtctcatattctctggtcgaactacgtgtaggagaaagggcactcagttcatacgttagtgtgcatgcggagagcggaaaggtatatgctttacagcccctggaccatgaagaattagagttgttgcagttccaggtctctgcaagggacgccggggtccccccactgggctcgaatgtcaccttgcaggttttcgtgctggacgagaatgacaacgccccggcactgttggcaccccgggttggcggtaccggtggcgccgtgcgcgagctggtcccaagaagcgtcggagctgggcatgtggtggcgaaggtccgcgccgtcgacgccgacagtggatataatgcttggctgtcttacgagctgcaacctgtggctgccggggcttccattccttttagggttggcttgtataccggagaaatcagcacaacaagagccctggacgagacagacgctcccaggcatcgtctgttggtgctcgtcaaagatcacggagaaccctccctgactgccacggccaccgtgctggtgtccttggtcgaatccggacaggcccctaaagcctcatcccgcgctagtttgggcatcgctgggcccgaaaccgaattggtggacgttaacgtatatcttataatcgcaatctgcgctgtgtccagcctgctcgtgctcactttgctcctgtatactgcattacgttgttcagctccctcatccgagggagcttgctccttagtgaaaccaactctggtctgttcaagcgcagtgggcagctggagcttctcgcagcaacgcagacagcgtgtgtgtagcggagagggtccacctaaaacagacctcatggcattcagcccctccctgccgcagggccccagcagcaccgacaatgtgagccataagtag

SEQ ID NO: 131110 - DNA, 2814 bp, synthetic construct
  misc_feature 1..2814: note = Description of Artificial Sequence: Synthetic coding sequence
  source 1..2814: mol_type = other DNA
atggtttgtccgaatggatatgatcccggcgggcggcacctcctgctctttataattattttagccgcgtgggaggcgggacggggtcagttgcactacagtgttccagaggaggcgaagcacggaaactttgtgggacgtatcgcccaggacttggggttagagcttgctgagctggtgcctcggctctttagggcggtgtgcaagtttagaggcgatctgctggaggttaacctgcagaacgggattctgttcgtcaacagcaggatagacagggaggagctctgtggacggagtgctgagtgcagcatccatctcgaggtgattgtggaacgccctctacaggtgttccacgttgatgtcgaagtaaaagacattaatgacaaccctccggtttttcccgcaactcagcggaacctgttcattgctgagtcgaggccccttgattcacgttttcctctcgagggagcaagcgatgctgacatcggggagaacgccctactcacttaccggctatctcctaacgaatacttcttcctggatgtacctacctctaatcagcaggtcaaacctttggggcttgtattaagaaaactcctcgaccgcgaagagacacccgagctgcacctgcttctcacggcaacagatggaggtaaaccagagctgaccggcacagtgcagctgctgattacagtgttagacaacaatgacaatgctcccgtgttcgaccggaccctttatacagtcaagctgccggagaatgttagcatcgggaccctagtcattcatcccaacgcctcagatctggatgaaggcttaaatggcgacattatttattcattcagctcagatgtgtccccagacattaaatcaaaattccacatggacccactttccggggccatcacagtaatcgggcatatggatttcgaagaatcccgcgcccacaaaattcccgtggaggcagtggataagggcttcccgcccctggctggacattgtaccgtgctggtggaggtcgtggatgtaaacgataacgccccccagctgaccctcacgtccctgagcctaccaatccctgaggatgcacagcccggaaccgtcattaccctcatatccgtgttcgaccgtgatttcggggtcaacggacaggttacgtgctcgctgactccacgtgtgccatttaaactagtgtcgacgtttaagaattactattcattagttctagactcggcactcgacagagagtctgtgtctgcatatgagctcgtggtcactgccagagatggggggtccccaagtttatgggccaccgctagcgtgtctgtggaggtggctgatgttaacgacaacgcacctgcgttcgcacagccggaatacacagtttttgtaaaggagaataatccccccggctgtcacatttttacggtgtccgcgggggacgccgatgcccagaaaaacgctttagtttcctattctctcgtagagctcagggttggtgagcgggcactgagttcatatgtgagcgtgcacgccgaaagcggcaaagtttacgccctccagcccctggaccatgaggaacttgaattattacagttccaggtcagtgcgcgagatgctggggtgcctcctctgggcagtaatgtaacacttcaggtatttgttttggatgaaaacgacaatgcccccgcactcctcgcaccacgcgtcggtgggaccggtggggccgtaagagaacttgtgccacggtcggtgggggccgggcacgtggtggctaaagttcgtgccgtagacgcagacagtgggtataacgcttggctgtcgtatgaactgcaacctgtggctgctggcgccagcattccatttcgcgtcgggctctatactggtgagatctccactacgcgcgcactggacgagacagacgcaccaagacacaggctgctcgtcctggttaaggatcacggagaaccctccttaaccgctacggccaccgtgctagtcagcctagttgaaagcgggcaagcccctaaagcgtcaagcagggcctccctggggatcgctggcccggagaccgaactcgtggacgtgaatgtctacttgataatagccatctgtgctgtgtcttcgctgctggttcttacactgctattatacacagctctgagatgctcagcccccagctctgagggtgcctgtagcctagtcaaacccacactggtatgctccagcgccgttggcagttggagctttagtcaacagcgtcgtcaacgggtgtgtagcggggaaggtccacccaaaaccgatctgatggctttttccccttcgctaccgcaggggccctcctccacagacaacccccggcagccaaatccagattggaggtattctgcttctctacgagccgggatgcattcttctgtgcacctggaggaggcaggaatactgcgggccggtccaggtggtccagaccaacaatggcctactgtctcatcagccactcccgagccagaagcaggtgaagtgagcccacccgtgggcgctggcgtaaatagcaattcctggacttttaagtatggacccggaaacccaaagcagtcgggtcccggggagttgcccgacaagttcataatccctggctccccagcaataatctccatcaggcaagaaccaaccaatagccaaatcgacaaatccgatttcattactttcgggaaaaaagaggaaaccaagaagaagaagaagaagaagaagggcaataaaacccaggagaagaaggagaaaggaaattccaccacagacaacagcgaccagtag

SEQ ID NO: 131111 - DNA, 2445 bp, synthetic construct
  misc_feature 1..2445: note = Description of Artificial Sequence: Synthetic coding sequence
  source 1..2445: mol_type = other DNA
atggactaccattggcgcggcgaactgggctcctggagactgctcttgctgcttctgctgctggctgcttggaaggttgggtctggtcagttgcactattctgtccctgaggaggcgaagcacggaactttcgtcggacgcattgctcaggatctcgggctggagttggccgagctggtgccgaggctgttcagagtggcatccaagagacatagagatttgctggaggtctctttgcagaatggaattttattcgtcaattcaaggatagatcgcgaggagctgtgtggccgtagcgccgagtgcagcattcaccttgaggttatagtagaccgaccattacaggtttttcatgttgatgtggaggtaaaggatgtcaatgataacccacctgtgtttcgcgttaaagaccaaaagctcttcgtttctgagtctagaatgcccgactctcggtttccgctggagggtgccagcgatgcggacgtgggcgctaactccgtattgacttacagactcagttcccacgattattttatgctggatgtcaattctaaaaacgacgaaaacaagctggtggaactcgtgctgaggaaatccctcgatcgtgaggatgctcccgctcatcacctgttcctgaccgcaactgacggagggaaacctgaacttaccggcaccgtgcagctgctggtcactgtcctggatgttaacgataacgcacccactttcgagcagtccgagtacgaggtcaggatttttgagaacgcggacaacggaacgacagtaattaaattgaatgccagcgatcccgacgagggcgcgaacggagctattagctacagcttcaactcactggtagagaccatggtcattgaccacttttctatagataggaatacaggcgagattgttattaggggcaacctcgattttgagcaggaaaatctttacaagatactgatcgacgctacggacaaaggtcacccacctatggctggtcactgcacagtgctagtaaggattctcgataagaacgacaacgtgcccgagattgcccttacttctctcagtctgcccgtgagagaggacgcacagtttgggaccgtgatcgcactaatttctgtgaatgacttggattcaggcgctaatggacaagtgacatgctcactcatgcctcatgttcccttcaagctggtgtctacatttaaaaattactactctctggtcttggactccgccctggatcgcgagcgggtcagtgcctacgaactcgtagtaaccgctagagacggcggtagtccgtctctctgggcaacggccagtttatccgttgaggtggccgatgtgaacgacaacgcacctgcttttgcccaacctgagtacactgtctttgtgaaggagaacaaccctcccggctgccacatctttacggtgtctgcccgtgatgccgacgcccaagagaacgcattggtcagttactctttggtggaacgccgcgtcggtgaaaggagcctgagctcttacatttctgtacacaccgagtctggcaaagtgtatgctcttcaacccctagaccacgaggagctggagctcctccagttccaagtgtcagcaagggacgccggtgtgcccccccttgggagcaacgtgacgctgcaggtgtttgtgctcgacgagaatgacaatgctcctgcactcctcgaaccccgggtcggcggaacaggcggcgccgcatcaaaacttgtgcctcggagcgtcggtgccggacatgtcgtcgccaaagtacgggctgtggacgcagatagcggatacaatgcttggttaagctacgagcttcagcccgctgcctcttccccgaggataccgtttcgcgtcggcctttacactggcgagatcagcactacacgtgtcctggatgaggccgacagccccaggcatagactgctcgtacttgtaaaagatcacggtgaaccagctctgaccgcaaccgctacagtcctcgtctcactcgtggagtccggccaggcacctaaggcctcaagccgtcagagcgccggtgtgctcggacccgaggcggctctcgttgacgtgaacgtatacctgatcattgccatatgcgctgtctcttccctactggtgctgaccctattactttacacggcccttagatgctcagctctgcccactgagggcggctgtcgggctgggaaaccaactctggtctgcagctctgcagtcggatcctggagttacagtcaacagcagccacagcgtgtttgcagcggtgagggacctcccaagacagacttgatggccttcagcccatgtctgccacctgatttaggatccgtagacgtcggagaagagcaggatttaaacgtggaccatgggctcaaagtcagcccttttaagttcaggacacataaattctatctatggaaactatag

SEQ ID NO: 131112 - DNA, 2853 bp, synthetic construct
  misc_feature 1..2853: note = Description of Artificial Sequence: Synthetic coding sequence
  source 1..2853: mol_type = other DNA
atggattaccattggaggggggaacttggaagttggcgactgctcttgctgctgctgttactggctgcctggaaggtgggctcagggcagcttcactactctgtgcctgaggaggccaaacatggaactttcgtggggaggatcgcccaggacctcgggctggaacttgcggaattggtcccacggctgtttagggtggctagcaagcgacatcgcgaccttctggaagtaagcctgcagaacgggatcctctttgtgaactcccgtattgatcgcgaagagctctgtggtagatctgccgaatgcagcatccacttggaagtgatcgtcgatcgcccactccaggtctttcacgtcgatgtggaggtgaaggatgtgaacgataatccacccgtgttcagagtgaaagaccagaagctctttgttagcgaatcccgtatgcctgattctcggtttcccttggagggagcgagtgacgccgatgtcggcgccaatagcgtgttgacatacagactgtcatctcacgattacttcatgctggacgttaacagcaagaatgacgagaataagctcgtggaactcgtcctccgcaagtctctcgatcgagaggacgcacccgcccaccatctatttctgaccgctaccgatggtggaaaacctgagctcaccggcaccgtccagttgctggtgacggttttggacgtaaacgacaacgctccaacattcgagcaaagcgaatatgaggtacgaatattcgagaatgctgataatggcaccaccgtgataaaactgaatgcgtccgatcccgacgagggtgcaaatggcgcaatttcttatagcttcaatagcctggttgaaactatggtgatcgaccatttttctattgacagaaataccggtgaaattgtaattcgcggtaatctcgacttcgagcaagagaacctctacaaaatcctcattgacgcaaccgacaagggccaccctccaatggctgggcattgtacggtgttagtgagaattcttgacaaaaatgataacgtcccagaaattgcgctcacctctctttcccttcctgtgagggaggatgcgcagtttggcacagttattgccttgattagcgtgaacgaccttgatagcggtgctaacggccaggtgacctgctcactgatgccacacgttcctttcaaactggtttcaacgttcaaaaactactattcccttgtgctcgacagtgcactggaccgcgaacgagtaagcgcctacgagctagtcgtcaccgctcgagacggaggcagtccatccctgtgggcaaccgccagcctatcagtagaagtagcagacgtgaatgacaacgctcctgcctttgcccaaccagagtacacagtctttgtgaaggagaataatccccctggctgccacatttttacggtcagcgccagggatgccgatgcacaggaaaatgccttagttagttactccttagtggagcgcagagtgggagaacgatccctgtcaagctatattagtgtccatacagagagcggaaaggtgtatgccctgcagcctttagaccacgaagaactcgagctgctccaatttcaggtgagcgcccgggatgccggggtcccaccattgggctcaaacgtgacattacaggtgtttgtgctagatgagaatgataacgctccggcacttctggagcctagggtcggcggtacgggcggagctgcgtctaaactggtgcccagatcagtgggcgccggacacgtggtcgccaaagtgcgcgccgtggatgctgattccggttacaacgcgtggcttagctacgaactgcagcccgctgcgtctagcccacgtatcccctttcgcgtcggcttgtatacaggtgaaatctcaacgactcgagtattggatgaagcagattcccctcgccaccggttgctggtcctcgtgaaagatcatggcgagcctgccctcaccgcaactgcgacagtccttgtgtctctggtggaatcgggccaggcgcccaaagccagtagtaggcagtcagcgggagtgttgggcccagaggcagctctagtcgatgtgaacgtctacttaatcattgccatttgtgctgtatcctcactgttagtcctgactcttcttctttatacagcccttcggtgtagtgcgctgccaaccgaaggcggatgcagggcaggcaagcccactttggtgtgctccagcgccgtggggagctggtcctattcccagcagcagccgcagcgcgtgtgttccggcgaaggtccaccaaagaccgatctgatggccttctccccctgcctaccacccgacttaggatcagtagacgtcggagaagagcaggatttgaacgtagatcatggcctcaagccaagacagcctaaccccgattggcgatactcagcatcgctccgggctggcatgcacagctctgtccaccttgaagaggccggcattttaagagcaggcccaggagggcccgatcaacagtggcccacagtgagttccgcgacccccgagccggaggcaggggaggtgtctccaccggtcggcgccggtgttaattctaacagctggacctttaaatacggccctggtaacccaaaacagagcggtcctggcgagctgcccgataagtttataatccctggctcccccgccatcatcagtatccgacaggagcccacgaactcccagattgataaatcagatttcatcacattcggaaagaaagaggagacaaagaagaagaaaaagaaaaagaaggggaacaaaacacaggaaaaaaaggagaagggcaattccactaccgacaactccgaccaatag

SEQ ID NO: 131113 - DNA, 2529 bp, synthetic construct
  misc_feature 1..2529: note = Description of Artificial Sequence: Synthetic coding sequence
  source 1..2529: mol_type = other DNA
atgctgtattcatcacgtggcgacccagagggacagcccctcctgttgtcgctcctgattctcgctatgtgggttgtggggtctggacaactgcactattcagttcccgaggaggcagaacatgggacattcgtcggcaggattgcccaggacttggggctcgagctcgctgagttggtgccaagactttttcagctggactctaagggcaggggtgacttattagaggttaacctccagaacggtattctatttgtcaatagcaggattgaccgggaggagctgtgtgggcggtccgctgaatgctccattcatcttgaagtgatcgtagaccgaccactgcaggtgtttcacgtggatgttgaggtgaaagatatcaatgataaccctcctgttttcccagctacacagaagaatttgtttatcgccgaatcccggccccttgactcacgctttcccctcgaaggagcgtcagacgccgacattggagaaaacgccctgctgacataccgactcagtccgaacgagtattttttcttggatgttccaacttcaaatcagcaagttaaaccgctcggactggtcctcaggaagctgcttgatagagaggaaacccctgaacttcaccttctccttaccgcaaccgatggcggcaagccggagctgaccggtacggttcagctcctgattaccgtactggacaacaatgacaacgcacctgtttttgaccgcaccctgtatactgtaaagctccccgaaaatgtgagcatagggaccctcgtcatacaccccaacgcatcagatctagacgaagggctgaatggcgacattatatactccttttctagcgatgtgtcgcccgatataaaatcaaagttccatatggacccccttagcggcgcgattactgtaattggacacatggattttgaggagagccgtgctcataaaatccccgtggaggcagtggataagggctttcctcccctggctggacattgtactctgttagtggaggtggtggatgtgaatgacaatgcccctcagctgaccattaagacattgagcgtccccgtcaaggaagacgctcaattaggaacagtgattgctcttatcagtgtcattgatctagatgctgacgctaacggccaggtgacgtgttcgcttacccctcatgtcccattcaagctcgtatccacgtataagaattattattccctggtgctggaccgggcactggatcgggaatctgtttcagcatacgaactggtcgttacggctagagacgggggatcaccgtccctgtgggctactgctcgagtctcagtggaggtggctgacgtgaacgataacgcacccgccttcgctcagtccgagtataccgtgtttgtaaaggagaataacccaccaggctgtcacatcttcacagtgtcagcaagggatgctgatgcgcaggaaaacgccctagtctcctattcactggtagaaagaagactgggggaaaggtccctgagtagttacgtgtccgtacacgccgagagcggcaaggtctatgcacttcagccgttggatcatgaggagctcgaactcttgcagtttcaggtgagtgccagagatgccggagtgcctcctctgggatccaacgttactctgcaggtgtttgtgctcgacgaaaatgacaatgcgcccgccctcctgaccccgagaatgcgaggcaccgacggggctgtttcggaaatggtcctgaggtcagtgggcgccggggtcgtggtgggcaaggtcagagctgtcgacgcagattccgggtacaatgcctggctgagttacgaactacagccagaaaccgcctcagcaagtataccatttagagtaggcctctatactggcgaaattagtactactcgggctctcgatgaaactgacgccccccgacagcgcttactggtcctcgttaaagatcatggggagccagctttgacagccacagccacagtgctcgtgagcctggttgagtccgggcaggctcctaaatcctcctctcgagctagtgtgggtgcaactggaccagaggtgactttggtggatgtgaatgtctatctcatcatcgctatttgtgctgtgagcagcctgttggtgctgactttactgctgtacacggtactgcggtgctccgccatgccaaccgagggggagtgtgcacccgggaaacccacactcgtctgctcaagtgccgtgggttcttggtcctactcacagcagcggagacagcgcgtatgtagtggagaagggaaacagaagactgacctgatggccttctctccgggcttatcaccttgcgccggaagcacggaaagaaccggtgaacccagcgcatctagcgactccacagggaaggtggggttctcatcgatattattcatctacatcattttctttttggaacggtattacagactgttgccaggggccgtccagatagttctgttcatttttctggagatccagcagatttttttcctgataaaatag

SEQ ID NO: 131114 - DNA, 2853 bp, synthetic construct
  misc_feature 1..2853: note = Description of Artificial Sequence: Synthetic coding sequence
  source 1..2853: mol_type = other DNA
atgctgtattccagtaggggagatccggaaggacaacccctcctgttgagcttgctaattctggctatgtgggtggtgggatcaggacaactgcattatagcgtccctgaggaagcagagcacggaaccttcgtgggtcgcattgctcaggatctgggtctcgaactggcggagttggttcccaggcttttccagctggatagcaagggtcgtggggacctgctcgaggtgaacctgcagaatgggattttattcgtgaattcacggatcgatcgcgaagaactctgtggaaggtccgcagagtgttctatccacctggaggtgatcgtcgaccgtccgctgcaagtgttccatgtggacgtggaggtaaaagacattaatgacaacccacccgtgttccccgcgacccagaagaatttgtttatcgccgaaagccgacccctggactcccggttccctctagagggggccagtgacgcggatatcggcgagaatgcactgctgacgtatcggttaagccccaacgaatatttttttctcgatgtccctacttccaaccagcaggtgaagccccttggtctagtattgaggaagctcctggatagagaggaaacaccagagcttcatctgctcctcaccgcaaccgacggtggaaaacccgaattaaccggaacagtgcagcttctgatcactgtgctggataataacgacaacgccccagtctttgacaggaccctgtacactgtgaaactgccagagaatgtgtccatcggaaccctcgtaatacaccccaatgcctcagacttagacgagggtctgaacggtgacatcatatatagtttttctagcgatgtgtctccagatattaaatcaaagttccacatggatcctttgtctggcgctatcacagtcatcggccatatggacttcgaggagtctcgtgcccataaaatcccagtcgaggctgttgataaagggtttcccccactggccggtcactgtacactgcttgtggaggtggtggatgtgaacgataacgctccgcaactgacaatcaagactctaagtgtcccagtaaaagaggatgcacagctgggaacggtgatagctttgatttctgtgatcgacttggacgctgatgcaaacggtcaggtcacctgctcactcaccccacacgtccctttcaaattggtgtccacttacaaaaactactattcactggtgctcgatcgggccctggatcgcgagtctgtcagcgcatatgagctcgtagtcactgcacgggatgggggttcccctagcttgtgggccacagcacgcgtgtcggttgaggtggcggacgtcaacgacaatgcccctgcatttgcgcaatcggagtacacagtctttgttaaagaaaataacccgcctggctgccacatctttaccgtgtcagcccgcgacgccgatgcccaggagaacgccctggtgagctattctctggtcgaacgcagactgggggagcggagcctgagctcgtatgtgtccgttcacgctgagtctggcaaagtttacgcactccagcctctagaccacgaggagttagaactgctgcagttccaagttagcgcacgagacgccggagttccccccctgggatcaaatgtgaccttgcaggtgtttgtactagacgaaaacgacaatgccccagccctactgaccccccgaatgcgaggtactgacggggctgtgtctgaaatggtgttgcgatccgtgggggcaggcgtggtcgttgggaaggtgcgcgctgtcgacgccgattctggatataacgcatggctgtcatatgaattacaaccagagacggcctctgcctcaattccattccgggtcggattatataccggtgagatcagcacgactcgcgccctggatgaaaccgacgcccctagacaaagacttttggtgctcgtcaaggatcacggcgaacccgccctgaccgctactgcgactgtgctggtgagtctagtcgagagcggccaggctcctaaaagctcgagcagggccagcgtgggagctacagggcctgaagttaccctggttgacgtgaacgtgtacctgataatcgccatttgtgctgtttcctctcttctagtcctgacactattactgtacaccgttctccgttgctctgctatgccaactgagggcgagtgcgcccccggaaagcctaccctagtgtgttcttccgctgttggctcatggtcatactcacagcagcggaggcagcgggtctgtagcggagaaggcaaacagaaaactgatctgatggccttcagccccggactctcgccctgcgctggttctaccgagagaacaggtgagccctcagcatcctctgacagcactggcaagccgcggcagcccaaccccgactggcgctatagtgcatccctccgggctggaatgcactcttctgtgcatctggaagaagcggggattctgcgggccggccccggcggccccgaccagcagtggcccacagtcagcagcgcgaccccggagccagaagcaggcgaagtttcccctccagtgggcgcgggcgtgaatagcaattcatggacatttaaatatggccccggcaatcccaaacagtcaggtccaggggaactgccagacaagttcattatacctggtagccccgcaatcataagcattcgccaggagcctacgaacagccaaatagataaaagcgactttattacctttggcaagaaagaagagaccaagaagaaaaaaaagaagaagaagggcaataagacccaggaaaaaaaagaaaaagggaactctacaacagataattctgatcagtag

SEQ ID NO: 131115 - DNA, 2892 bp, synthetic construct
  misc_feature 1..2892: note = Description of Artificial Sequence: Synthetic coding sequence
  source 1..2892: mol_type = other DNA
atggtgggttgcggcgtcgctgttttatgtctgtgggtctcgtgtggcgccgcggctgggcagttggagtactctgttcctgaggagacggaaaggggagtggcagtcggaaatttaagtgcggatctgagactgcccgccgctgccatgtccagcaggaacttccgatttttgagctctcaccgcgagctatacttcggcgtcgacctccccagcgggaacctggtagtgcgcgaacccgctgaccgcgaacagttgtgtcgggccaaggccgcatgcgtgttgacatatgaccttgtgttagaggacccactggagcttcacaaaattagaatccacgtgctggacaccaacgataacagtcctctctttccggcgggcgacgtgcaactgcacataccagaatttttaacacctggcgcacggttcacattacctaacgcacaggacgacgacgaagggagcaacggtatcttgagctattctctttccccttcccagcatttcagattagacatgggcagcagagtcgatggatccgaatatccagaactggtcctggagaaagctcttgatcgcgaacagagagcaacccatctcctggtcctgacagccagggatgggggactgccggcacggtctggcgatgcacaagtgaccatcatcgtggtcgataccaacgataatgctcccgtcttcgagagatcagtgtatcgaactaaggtgcctgagacggcaccgaatggcacagtcttattccgagttcaggctctagatccagacgagggctctaatggagaggtgcaatattccctgtctaattccacacaggccgaactgcggcacaggtttcatgtgcaccccaagtctggggaggttcaagttgccgcatctttggggccccctgaaacactcctggaggcctacatcgaagcacgggatgagggcgtcttcggtctagctagtacagcaaagctgctggtcgaagtcactgacgtaaatgatcacgcacccgaactggacttcctaactctgagcaatccagtgcccgaggacgccgcacccgggactgtcattgcattgttttcggtgaaggacgaggatctcgactcaaacgggcgcgtcatttgtgggatgtccagtgctggacctttccagttgactgcaagttttgataactactattcgctgctgattgatggaccactcgatcgggagcaaatttcggagtatcaggtcctgatcacagcgtcggactcagggtccccccccctttccaccagacggactattactgtcagcgtcgcagacgtaaacgataacactcccaactttcctcagccacagcaggaactctttgtagccgaaaataacggccccggggctagcttgggcagagtgtttgctcaggatcccgacctgggcaagaacggactggtcagttatgagctacttgatgtgatttccgagggacccagtgcttcatcactcttggcggtggaaagttcttccggagctataacagctaaaacaagctttgatttcgaacagctgagagggttccacttccaggtggagggtagagatggagggatccctccacgatcagctaccgtgacaataaacctttttgtggtcgaccgcaacgataactatccagttattctgttccctttgccaaggaacggctcagtgcccgtagaaatcgtgccacgtagtgcccgaactggacatttggtcactaaagtagtcgccgaagatgccgacagcggcagcaatgcctggctgtcttatcatatatcccgcgcttccgactcttctctatttcgcatttccgccaatatcggagagctgcggactgcccggctcgtgctccccacagatgccgtaaagcagcgcgtggtggtggttgttagagaccacggagaccctccactttccagctccgtaacattgggtgtgctcttgagtaattcagttccacaactactgccagattttgaagatgtctgggaaccaggcggtcagctatccgcacagaatttgtacttagtgattgccctggcgtgtatttcgtttctcttcctgggctgcttactgtttttcgtatgtaccaagctccaccaaagcccaggttgctgcgcgcagagttgctgtcggtcgactgaggaccttagatacggtagcaagatggtatctaacccatgtatgacatctgccacaatagatgtgactactgtagagcggctatcccagacatacctgtaccgagcttcactgggccttgggtctgacaacaactcactcttgcttcggggagagtataatgccgcagatctgcgcaatctcgcaaccggagtaggcctaaatctgcctatctcctgcatccaaatcagaaacaggaagggcgaccacgcaaatgtaaacgccatgccaaggcaacctaaccccgactggcggtactccgcctctctccgcgcaggcatgcacagctcagtgcatctggaggaagcggggatcttacgcgcgggaccaggcggccctgatcagcagtggcctacagtgagtagcgctacccctgaacctgaggctggcgaagtgagccccccagttggagcaggcgttaactcaaattcctggacttttaaatacggaccggggaacccaaagcagagtggaccaggcgagctgccagacaaattcattattccaggcagcccagcgatcattagtatccggcaagaacctacaaactcacaaatagataaatcagatttcatcacattcggcaaaaaggaggaaactaagaagaagaagaaaaaaaagaagggaaacaagacccaggaaaaaaaagaaaaagggaactctacaaccgataacagcgatcaatag

SEQ ID NO: 131116 - DNA, 2457 bp, synthetic construct
  misc_feature 1..2457: note = Description of Artificial Sequence: Synthetic coding sequence
  source 1..2457: mol_type = other DNA
atggttgggtgtggcgtggctgtcttgtgtttgtgggtttcctgcggagccgccgccggccaactggagtactccgtgcccgaagaaacagagcgaggggtggccgttggtaatttgagtgctgacctgaggctacctgcagcagcaatgtcttcgaggaatttccgtttcctgtcttcacaccgagaactgtattttggggtagatcttccctcgggaaatcttgtggtgagagaacccgctgatagggagcaactgtgtagagcaaaagcggcgtgcgtactgacatatgatcttgtgcttgaagacccgctcgaattacacaaaatccgcatccatgtcctcgatactaacgataattcgcccctgttcccagcaggggacgtgcagctgcacatacctgagttccttacccctggggcccgattcactctccccaacgcacaagacgacgatgaaggctctaacggcatactttcctacagcctaagcccctcccagcattttcgccttgatatgggctcgcgtgttgacggaagcgagtaccccgagctcgtgcttgagaaagcccttgaccgcgagcagagggccactcatctgctcgtgttaaccgctcgggatggtgggctgccagccaggtccggtgacgcgcaagtgactattattgtggttgataccaacgataatgcaccggtcttcgagcgctcagtatatcgcaccaaagtgcctgagactgcccccaacggcaccgttttattccgcgttcaggcactcgaccccgacgaggggtctaacggagaggttcagtattcactatcaaactctacccaagccgaactccgccaccgattccacgtgcaccctaaatccggagaagtccaggtcgccgcatcactgggcccccccgagactcttctcgaagcctacatcgaggcaagagacgagggcgtattcggtctggcctcaacagccaagctgcttgttgaagtcacagatgtcaatgaccacgcaccagagcttgactttctgaccctttcaaaccccgtgcccgaagatgccgccccaggaacagtgattgccctgtttagcgttaaagatgaggacttggatagcaatgggagagtcatctgtggaatgtccagcgccggccctttccagctcacagcctcattcgacaattactattccttgctcatcgatggccctcttgatagagagcaaattagtgaatatcaggtactgattaccgcgtccgatagcggttccccacccctgtccacacgcagaacaatcacagtctccgtggctgacgtcaacgacaatactcccaactttccccagccccagcaggagctgtttgtggcagaaaacaatggaccaggcgcatctctgggacgggtgttcgcccaagatccggatctcggtaaaaatggcctcgtgtcatacgagctgctcgatgttatcagcgaggggccatccgcgagcagcctgctggccgtggaatccagctctggtgccattaccgccaaaacctccttcgatttcgagcagcttagagggttccactttcaggtcgagggcagagatggggggatacccccacgctctgccacagtgactatcaacctattcgtggtcgacagaaacgataactatccagtaatcctcttccccttgccaaggaacggaagtgtgccagttgagatcgtccctcggtcagcgcgaacggggcacctggtcactaaagtcgttgccgaggacgccgactccggcagcaacgcctggctaagctatcacatctctcgggcaagtgactcttctctattccgcattagcgctaacattggagaactccgtacagcccgcctggtactcccgacggatgccgtgaaacagcgcgttgtcgtggttgtccgggaccacggggatcctcccctgagcagttccgtcaccctgggtgttctgctcagcaattccgttccgcagctgctccctgatttcgaggatgtttgggagcccgggggccaactctcagcacagaatctctatctggtgatcgcgctggcctgtatatctttcctttttctggggtgtttactcttttttgtgtgcacaaaactccaccagtcaccggggtgctgcgcgcagtcctgctgccgcagtacagaagatctcaggtatgggtccaaaatggtatctaacccgtgtatgacaagtgctacgatagacgttactaccgtcgaacgattgtctcagacttacctgtatagagcctcattaggtcttggcagcgacaacaactccctgttactgcggggcgagtataacgcagccgatctccggaacttggccactggcgttggactgaatcttccaatctcatgtatccaaatccgcaaccgcaaaggcgatcacgctaatgttaacgctatggttagcaaattctacggcatttag

SEQ ID NO: 131117 - DNA, 3024 bp, synthetic construct
  misc_feature 1..3024: note = Description of Artificial Sequence: Synthetic coding sequence
  source 1..3024: mol_type = other DNA
atggaacaggcggggaccagacccgccgctacggaacatccccggctgcgccggcctatgccgtggcttctcctgctgccgctgttactcctcctgctgcttctgttgcccggacccgccgcctcccagctgcgttacagtgttcctgaggaacaggccccgggcgcactggtgggaaatgtggccagggctctcggtcttgagttaagaaggttgggacccggatgcctgcggatcaatcacctgggggcacccagccctagataccttgagctcgatctcacatctggagccctcttcgttaacgaacgcatcgaccgggaggccctttgtgaacaacgcccccgctgcctccttagcctcgaagtgctcgcccacaaccctgtggcagtgtccgcggtggaggttgagattctcgacatcaacgacaatagcccaagattcccacgccccaactaccagctgcaggtgagtgaaagcgtggccccgggagcacgctttcacattgagtcagcccaggatcctgatgtgggagctaatagcgtgcagacctatgagctgtcaccttccgagcacttcgaactggacctgaagccactccaagagaacagtaaggtcctcgaactggttctgcggaagggcttagaccgggagcaggctgccctgcaccatctggtgctgacagctgtggacgggggtattcccgcacggagcggcaccgctcagatttccgtgcgagtcctcgataccaacgataactcccccgcctttgatcaaagtacatacagggtccagcttcgggaagacagcccgcccggtacactcgtggtgaagcttaacgcaagcgatcccgatgaggggtcaaacggcgagctgcggtacagcctcagttcttataccagcgatagggaaagacaactcttttcgatcgacgctagcaccggggaggtgcgcgtcattggcggactagactacgaggaagccagctcatatcaaatctacgtgcaagctactgaccggggccccgtccccatggccggccactgcaaagtcctggtggacatcgtagacgttaacgataacgcccctgaagtggtcctcactgacctctattctcccgtcccagaaaacgctacccccaatactatcgtggccgtgctctccgtcaacgatcaggattcaggacctaaccgtaaggtttccctgggactggaagctacattgcccttccggctgaatggcttcggtaactcctataccctggtggtttcaggcccattggaccgggaaagagtggctgtttacaacatcacggtcaccgctacggacggaggtatcccacagttaaccagtttgcggacactgaaggtcgaaatttctgacattaatgacaatcccccctctttcctggaagatagctacagtatttatatccaagaaaataatctccccggcgtcctcctctgcactgttcaggcaaccgacccagacgaaaaagaaaacgctgaggtgacctattctttgctcgagagagaaatccagggactacctgtcacctcttacgtaagtatcaatagtgctagtgggagtctgtatgcggtgaactccttcgactacgagaaatttagagagttctttgtgactgtggaggctcaggataaggggtcaccacccctgagctctaccgtgactgctaacgtttacgtggtggacatgaatgatcacgctcctcatatcttgtatcctacttccaccaattctagtgcggcgtttgaaatggtgccacggacagcccccgcgggctacttggtaactaaagtgatcgctatggatagcgacagcggacagaacgcctggctgttctatcatttggcacagactagcgacttagatctgtttaaggtggaactgcatactggggaaataagaactacaaggaagatgggggatgaatcagggagtacgtttaatttaactgtcgtcgttagagacaatggtgaaccgagtctgagtgcaagcgttgccattactgtggctgtggtggatcgcgtgagcaagatacttcccgatacgcagcgacacgtcaagtcaccacggacctattctgagattaccctgtacctcataattgctctgtctaccgtatcattcatctttttgttaactattatcattctctcgatcataaagtgttacaggtacaccgcatatggcacagcttgctgcgggggtttttgcggagtgagagaacgctcccctgccgagctgtataagcaagctaacaacaatatcgacgcccggattcctcacgggttaaaagtgcagccccactttatcgaggtccggggtaatgggagcctgactaagacttattgctataaagcctgtctgaccgccgggagcggaagcgatacgtttatgttttacaacactggcgctcagactggcccaggtccatctggggcccaggcagctgtgaccgatagccgcaatcttactgggcaatccggacagaatgccggtaatctcattattctcaagaacgaagctgtgagtcagaatgaaccaaggcagccaaatcccgattggaggtatagcgctagcctgagggccggcatgcactcgagtgttcatttggaggaagcaggcattctgagagccgggcctggcggacccgaccagcagtggccaaccgtctcctcagccactcctgagcccgaggcgggcgaagtctcacctccagttggcgctggggtcaacagcaacagctggacatttaagtacggcccggggaatcctaagcagtccgggcctggcgagctcccagataaattcatcatccctggcagcccagcaatcatctccattagacaggagccaaccaattcacagattgataagagcgatttcatcaccttcggcaaaaaagaagagaccaagaaaaagaaaaaaaaaaaaaaaggaaacaagacacaagagaagaaagagaaaggaaacagtacgacagataacagtgaccaatag

SEQ ID NO: 131118 - DNA, 2457 bp, synthetic construct
  misc_feature 1..2457: note = Description of Artificial Sequence: Synthetic coding sequence
  source 1..2457: mol_type = other DNA
atggcaggtacacggcggaagtccctccagaatcgacaggtgggctctctgctcatctttctgtgcatctcagtgggagatgccaccaccatccgctactccgtcgcagaggaaatggagtcaggttcattcgttgcaaatgttgctaaagacctcgggctggaggttgggaaactggccgcacgcggcgcgagactcgtctccgaaggtaataaaatgcatttccgtctgcatcggaagaccggagacctattcgttaaggagaaattagaccgcgagagcctttgcggaaaggccgacccatgcgtcttgcacttcgaagtggtgctggtggagccactgcagtcgtttagagcagaggtgcgcgtgttcgatatcaacgacaacgcacccgtgttcctgaacaaggagcccctgctgaaaattcctgaaagtaccccactggggtcacggtttccactgcagtccgcccaagatcttgatgtgggcctgaatggcctgcagaattataccctgagtgccaacgggtattttcacctccatacgcgattctgctcacacgggccaaagtatgccgagctggtgttgaacaaaccactggatcgcgaggagcaaccagaggtcaatttgacgatcaccgccgtcgacggaggctctccacctaaaagtggaacggctcatattcacgtggtagtgctggatgtgaatgaccacgttcctcagtttagtaggctagtgtaccgggcgcaagtatctgagaactcacccaacggttctctggtggctactgttactgctgtagacctcgacgaaggcactaataaggctatcacctacagtctggcccagaacccagaagctattctgaagacctttcagattgaccctcagaatggggaggtgcggctcaggggtcctttggatttcgaagctatcgagacatacgatatcgacattcaagcgacagacggcggaggtcttagcgcacactctaaagttctggtagaggtcgtggatgtgaacgataacccacccgaagtcatggtatcctcagtgagcagtcccttacccgaggatagccccccacagacggttgtcgcattatttactattagagacagagacatccgggtcggtgggaaggtaacgtgcttcctgagggaggatttgccgttcgtcatcaaaccgacctttggtaattcctattccttagtaactgaccgcagcctggatcgcgaagaggttagcggttataacatcaccatcgtcgctatggacaccgggccaccttctttatcggccgaaaccatgatcgaggtgctgatttccgatgttaatgacaatcccccgattttccgtgaggactcctatattttgacagtccgggaaaacaactctccggccgtcttcataggaaaagtccatgcagaggacttggatctcggtgagaatgcccagattacctacagcctgctacctcctaagaacggcgacctcagtgtatttgcctacatctccataaacagcgggaacgggaagctgtacgcactccggaccatggattatgaggccatccaagattttcagttcgtggtcaaagcgaccgacggagggttcttatctctgagttcccaggtcacagtaagggtggtggttctcgatgacaatgacaacaggcctatgattctgtatcccctacagaacggcacacttccatgcaacgatctggtaccacgttctgcagaagcaggatacctcgtcactaaggtggtggctgtcgacggcgattccggtcagaattcctggctatcatatcatctacttaaggctacggacctgggtttgttttccgttcagcggcagaatggggaaatccacactctgcgccaaatcagtgagcgggatcctatgatgcaaaaactgatcattctcgtgcaggatcatgggcagccggctctctccacaactgtatcacttaatattcttctcgtggacggattttctgagccctacctgcagttccaggatcctacaaagcactcacgcaaggttaaccctagtaccaagtacctggtgattagcttggtgatcctatcttttttgtttctgctgagcgtgattgtcattttcatcatccacgtgtatcagaaaatcaaataccgcgagaagtttaccatccaggagcacttttacgatgactgcaacttttcaaataatctcgtgcaggggcaggggaacggctctctttccagaccttgtccttacgaaatgtgctccgctacgggaacagggaacagtgagtttaggtttctgaagagatttatgcctaatttcccgttcccccatgctacgggtgaaatcaaaatggaagcaggaagctcactcccgccaaactctgatagaaacaaatctcagcggttggaaggccacgaccaggtgtcagacgactacatgtag

SEQ ID NO: 131119 - DNA, 2394 bp, synthetic construct
  misc_feature 1..2394: note = Description of Artificial Sequence: Synthetic coding sequence
  source 1..2394: mol_type = other DNA
atggaaaatcagggcactagaacacaacagatacggcaggtcctacttttgttcgttttgcttggtatgtctcaggccggaagcgaaacctggtcattctctgtggccgaggaaatgcagagtggaagcttcgtgggtaatctagctaaggacctgggtctgaaagtgagggaactttcgtctcggggggccagagtagtttctaacgacaagaaacagcgcctgcaacttgacattaacaccggagatctgctcctctctgaaaccctcgaccgggaggagttgtgcggtagcatcgagccctgcgtattgcacctgcaggtgctaatgcaaaatcccactcagttcctgcaaattgagctgcaggtgagggacatcaacgatcattctcccatcttctccgaaaaacaaatgctgttagagataccggagaactcccctgtcggcgctgtgtttctcctggaatctgcaaaggacttagacgttgggattaatgccgtgaagtcttatactatctcccctaactcccatttccatatcaaaatgagggtgatccctgacaatcgaaagtatcccgaattggtgctggataaagctctcgactacgaggaactccccgagctgagtttcatcctgagcgcgttggatggcggaagccctcctagaagtggaacagctttggtacgggtcgtcgtcgtcgatataaatgataactccccggaatttgaacaggctttctacgaggtcaagattagggaaaactctatcctcggctcactgatcctgatcgtaagcgcatgggaccttgacagcggtactaatggggagatctgctacacattcagccacgcttctgaagatatccgcaaaacatttgaaattaaccagaagtccggtgagattaccctgagagctcccctcgatttcgagactatcgagtcttattctattataattcaggcgaccgacggcggcggcctgtttggaaagagtaccgttatcattcacgttatcgacgttaatgataatgcccctgaaatcactgtgtcctccatcacatccccaattccggaaaacactcccgagactgtcgttatggtcttctcaattcaagacatagactctggggataatggcaggattgtttgctctattcccgaggatcttccttttgttctaaaatcctcagtcgagaactactacacactggaaactgagcgtcctctagatcgcgaatccaccgccgaatacaacatcactattaccgttacagaccttgggataccacggctcaagaccgaacacaatactacagtgctggtctccgacgtgaatgataatgcgcccacttttactcagacatcctacacattgtttgtgcgagagaacaattcacctgcgctgcacataggctcagtgtccgctacagacagagactccgggactaatgcccaggtaaactattccctgttacctccccaggacttgcatctgccactggcttctctggtgtctatcaacaccgacaatggacatctgttcgctctgagatccctggactacgaggccttgcaggcttttgacttccgcgttggagcaaccgatcgcgggtctccagccctgagttccgaagcactcgtgcgcgtgctggtgcttgacgcaaacgataacagtcccttcgttctgtaccccctgcagaatggaagtgcgccttgtaccgagctcgtgccgcgggcagccgagcccggttatctggtgaccaaagtcgtggctgtagacggagacagcgggcagaatgcatggttgtcttatcagttactcaaagccactgaaccagggctgtttggggtctgggcacataatggcgaggtgcggactgcccggttgcttagtgaaagagatgctgccaaacaccgcctagtagtgctggtgaaggataatggcgagccgcctagatcagccaccgctaccctacaggttctcctggttgatggcttcagccagccctacctccccttgcctgaagctgcaccagctcaggcccaggctgattctctgacagtctatctcgtcgttgctctggcaagcgtcagctccttgttcctcttttccgtgctgttattcgttgctgtaagactatgtagacggagtcgagccgcctccgtcgggtcatgcagtgtgcccaaaggacctttcccggggcacctcgtggatgtatccggaacaggtactctttcacagtcttatcagtatgaggtttgcctcaccgggggcagcgaaactaacgagttcaagttccttaaaccagtcattcccaatatacaggccaaaggtcttggcaagaattcagaagagaattcgacattccgcaatagtttcgggttcaacttctag

SEQ ID NO: 131120 - DNA, 1299 bp, synthetic construct
  misc_feature 1..1299: note = Description of Artificial Sequence: Synthetic coding sequence
  source 1..1299: mol_type = other DNA
atggtgttctccatacaggacattgactcaggcgacaatggccggatagtgtgctccatacctgaggacctacctttcgtcctcaaaagtagtgttgagaactattacactttggaaaccgagagaccgctggatcgtgagagcacggccgagtacaacatcacgattaccgtaaccgacctgggcatccccaggctaaaaactgaacacaatacaacagtcttagttagtgatgtcaacgacaacgccccaaccttcactcagacttcctacaccctgtttgtgcgggagaacaacagccccgctctccacataggcagtgtctccgcaaccgacagggacagtggcactaacgctcaagttaattatagtcttctgcctccacaggatttgcacctcccgctcgcgtccctagtaagtatcaataccgataacggccatctgtttgccctcaggtccctggactacgaagccctgcaggcattcgattttagggtcggcgctaccgaccgagggtctcccgccctgtcctctgaagctctggtcagagttctggtactggacgccaacgataactctccgtttgtactgtaccccctgcaaaatggctcagcaccatgcactgagcttgtgcctcgagcagccgagccaggctacctagtcacaaaggtcgtggccgttgatggagactccgggcagaatgcctggctctcctatcaactgttaaaggccacggagcccggcctcttcggcgtttgggcacataatggcgaagtacgcacagcccgcttactttcggagcgtgatgccgcaaaacatcgtctggtggtactggtcaaagataacggagagccacctcgtagcgcgacggcgactttacaggtactacttgtggatggcttctcacagccatacttgccgctccccgaggcagccccagctcaagctcaggcagattctctgactgtgtatttagtggttgccctagcaagtgtgagctcgctgttcctgttttcggtgcttctgtttgtggctgttcggttgtgtagacgatctcgggctgcaagcgttgggtcttgtagtgtccctaaaggtccgtttcctgggcacctcgtggacgtctccggcactggtacactgtcccagagttaccagtatgaagtgtgtcttactggtgggagcgaaaccaatgaatttaagtttctcaagccagtcatccccaacatccaggcgaagggcctggggaaaaatagtgaggagaattctactttccggaactcgtttgggtttaatttttag

SEQ ID NO: 131121 - DNA, 399 bp, synthetic construct
  misc_feature 1..399: note = Description of Artificial Sequence: Synthetic coding sequence
  source 1..399: mol_type = other DNA
actatcgaaagctattccataatcatccaggccactgatggcggaggtctattcggcaagtctaccgtaatcattcacgtgatcgacgtcaatgataatgctcctgaaattactgtctccagtatcacctcccccatccctgagaacacacctgaaaccgtcgtgatggtgttctcgatccaggatattgacggtaccacagaagagctgttcgtccctttccgcaagacttcacacgtgctgaagtcctcggtggagaactactataccctggagactgagcggccactcgatagggaaagcacagccgagtacaacattaccatcacagtgaccgatcttgggattcctcgccttaagactgaacataataccaccgtgctcgttagcgacgtgtag

SEQ ID NO: 131122 - DNA, 2388 bp, synthetic construct
  misc_feature 1..2388: note = Description of Artificial Sequence: Synthetic coding sequence
  source 1..2388: mol_type = other DNA
atggaaaacggcggcgccggaaccctccagattaggcaagtcctgctcttctttgtgctgctggggatgtcacaggccggaagcgaaaccggcaattttcttgtcatggaagagctgcagtctggttccttcgttgggaatctagctaaaacgctgggactcgaggttagtgagctgtcatcccggggtgccagagtagtatcgaatgacaacaaagaatgtttacagcttgatacaaataccggcgacctcctcttacgggaaatgctagatagggaagaactgtgtgggagcaatgagccttgtgttctttatttccaggtgctcatgaaaaacccgacacagttcctgcagattgagttacaggtcagggatattaatgatcactccccagtcttcctggaaaaagaaatgcttttagagatccctgaaaatagtccagttggtgccgtgttcctgctcgaatccgctaaggatctggatgttggcatcaacgcagtgaaatcctacacaattaacccaaattcacatttccacgtgaagatccgggtcaaccccgacaatcgtaaatatcccgagttggtgctcgacaaggcactggattacgaggagcgccccgaactttccttcatactcacagctttggatggtggctcacccccgcggtcaggcaccgctctggtgcgcgtcgttgttgtcgatattaatgacaactcgccggaattcgaacaagcattctatgaagttaaaattcttgaaaactccattctcggttcactcgtggtaaccgtgtctgcatgggatctggacagcggaaccaactccgaacttagctatacattttcacacgcttctgaagacatccgaaagacatttgaaatcaatcagaagagcggggatattactctgacagcacctcttgattttgaagccatcgagagttactctattatcatccaggccaccgacgggggcggactgtttggcaagagtactgtacggatccaggtcatggatgtaaacgacaacgctcccgagataaccgtcagtagcatcactagcccaattcccgagaatactcctgagaccgttgtaatggtattccggatcagggatagagactccggcgacaatggtaagatggtatgtagcattccagaggatattccctttgtactcaagtcttcggtaaacaattattacaccctagagacggagcgccctctcgatagagagagcagggcggagtataatatcactataactgttacagacctcgggacacctcgactgaagacagagcacaatattacagtgctggtcagcgacgtgaatgataatgctcccgcctttactcaaacaagctacgccctgtttgtccgggagaataactcacctgcattgcacatcggctccatctctgctaccgaccgcgatagcggtacaaacgcccaggttaattactccctactgccttctcaggacccacatctgccactggcaagcctcgtttcaattaacgccgataatggacacctgtttgctcttcgctcgttggactacgaagctctacaagggttccagttcagggtgggggctactgatcacggatctcctgccttaagctccgaggcattagtccgtgtcctcgtccttgatgctaacgacaactcacctttcgtactatatccgctgcagaacggttcagcaccatgcacagaactggtgccatgggccgcggagccaggttacttggtgacgaaagtcgtggcagtagatggggacagcggccagaatgcctggctgtcataccagctactgaaagcaactgagccaggtctgtttggagtgtgggcccataatggagaagtccggacggctaggttgctgtccgagcgagatgcagccaagcaccgcttagttgtgctcgtcaaggacaatggggagccacctcgctccgctacagcaacattacacgtgttactggtggacgggttcagtcagccttacttgccactgccggaggcagcacccgcacaggcccaggctgatagcttgacagtctatctggtggtcgctctggcctctgtatcctctctctttctgttcagcgtcttgttgttcgttgcggtgagactttgtagaagaagtagagccgcacctgtcggccggtgttctgtcccggagggacctttccctggtcatctggtcgatgtctcaggcactggtacgttgagccagtcttaccattatgaggtgtgtgtgacggggggctcccggtccaacaagtttaagtttctgaagcccattatcccaaacttcctgccacaatccactggctcagaagtagaggagaacccacctttccaaaacaacctgggattctag

SEQ ID NO: 131123 - DNA, 1257 bp, synthetic construct
  misc_feature 1..1257: note = Description of Artificial Sequence: Synthetic coding sequence
  source 1..1257: mol_type = other DNA
atggtgtgtagcattccagaggacattcccttcgtgctcaaaagcagcgtcaataactattacactctagagacagagcgaccactcgatagggaatcccgagccgaatataacataacgatcaccgtgacagacctcggcactcccaggttgaagaccgaacacaacatcacagtactagtctcagatgtgaatgacaacgctcctgcattcactcaaactagctacgcactatttgttagggaaaataattcaccagccctccatataggctccatctctgccactgatcgggatagtggaacaaatgctcaagttaactactcactcctcccctcccaagacccccacctgcctctagcgtcactcgtgtctatcaacgccgataatggtcacctgtttgcactacggtcactggactacgaagctttacaaggatttcagttcagagtaggtgccactgaccacggctcaccagcgttgtctagtgaagcccttgttcgggttctggttctcgacgctaatgataactcgcccttcgtgctgtaccccctgcagaacggctctgcaccctgtaccgagctggtgccatgggccgccgaacccggttacttagtgacaaaggtagtggcggtcgacggggattcaggccagaacgcatggctctcttaccaacttcttaaggccacggaacccgggctctttggcgtctgggcccataacggtgaggtccggacagctcgcctgctgtcagagcgagacgcagccaagcaccgtttggtcgtgctagtcaaagataacggcgaacctcctcggtccgccaccgcaaccttgcacgtcctgttagttgacggattctctcagccttatctgccgttgcccgaggcagcccccgctcaggcccaggccgatagccttaccgtctacctggtcgtggccctggctagcgtctcatcactcttcctattttcagtgttgctatttgtggccgtacgactctgcagacgctcaagagcagcgccagtggggcgctgttcagtccccgaaggaccttttcccgggcatcttgtcgacgtgagtggcaccggaaccctgtcccagtcttatcattatgaagtgtgtgtaaccggcggctcaaggtctaataagttcaaatttctgaagcccatcatccccaacttcctgcctcagtccaccggttctgaagtggaagagaatccccctttccagaataatctggggttttggatacaatag

SEQ ID NO: 131124 - DNA, 1377 bp, synthetic construct
  misc_feature 1..1377: note = Description of Artificial Sequence: Synthetic coding sequence
  source 1..1377: mol_type = other DNA
atggatgtgaacgacaacgcccccgagatcaccgtgtctagtatcactagccctatcccagaaaacactcccgaaaccgtcgttatggttttcaggattagagatagggatagtggtgacaatggcaaaatggtgtgcagtatcccagaggatataccctttgtgttgaagtcttccgttaacaattactatactctggagaccgagcgacctctagatcgcgagtctagagcagaatacaatatcactattaccgttaccgacttaggcacaccccggttgaaaacggagcataacattacggtcctggtgtcggatgtgaacgacaatgcgcccgctttcacacagaccagctacgcattgttcgtgcgggagaacaatagccccgccttacatatcggcagtatctcagctaccgatcgggactccggcactaatgcacaagtcaattacagcctgctgccttcacaggacccccatttacccctcgcatcactggtgtctatcaacgctgacaatgggcatctgtttgcccttcgcagccttgactacgaagctcttcagggatttcagtttagagttggcgccaccgaccatgggagccccgccctcagtagcgaggcactggtacgcgtactggtacttgatgcgaatgataacagcccgttcgtcctctaccccctgcaaaatgggagcgccccatgtactgagcttgtcccgtgggccgccgagcccggctacctggttactaaagtcgtagcggtcgacggggatagcgggcagaatgcttggctaagctatcaactactcaaggccacggagccaggattgttcggagtgtgggcccacaacggtgaggtgaggacagcccggctgctgagcgagcgcgatgccgcaaagcacagactggtggtgttggtaaaagacaacggagaaccacctcggtctgccactgccaccctccatgttctcctggtagacggcttttcacagccatatttgccgctgccggaagccgcccctgcccaggcccaagctgactccctcacagtgtacctcgtggttgccttagcaagtgtatcatctctgttcctgttctctgtactgctgttcgtcgccgtgcgcctgtgtcgcagatctcgggccgcgcccgtgggtcggtgcagcgtcccggagggacccttcccagggcatcttgtggatgtttcaggcaccgggacactaagccagagctatcactatgaagtatgcgtcactggtggtagtaggtctaacaagttcaagtttttgaagccaatcatccccaatttccttccccagagcaccggttcagaggtcgaggagaaccctccctttcaaaataacttagggttctag

SEQ ID NO: 131125 - DNA, 2397 bp, synthetic construct
  misc_feature 1..2397: note = Description of Artificial Sequence: Synthetic coding sequence
  source 1..2397: mol_type = other DNA
atggaagcatccggcaaattgatttgtcggcagaggcaggttctcttttcttttcttctactggggctcagcctcgcgggagctgctgagccccggagctattctgttgtcgaagaaacagaaggatcctcattcgtaaccaatctggcgaaggatttaggactggaacaacgagagttttcacggcggggcgtgagggtggttagccggggtaacaagttgcacttacaactgaaccaagagacagctgatttactgctgaacgaaaaactggaccgagaagacttgtgcgggcataccgaaccttgtgtgctacgattccaggtgctgcttgagagtcctttcgaattctttcaagcagaattacaagtgatagatattaacgatcactcacctgtattcctggacaagcagatgctggtaaaggtgtctgaatcttcaccgcctggtactaccttccccttaaaaaacgccgaggacctggatgtgggccagaataatatagagaactacattatcagtcccaattcctatttccgagtcctgactaggaaacggagtgacggtcgaaagtacccagaattggtcctggacaaagcactggatcgcgaggaggaagccgaactgcggcttacacttaccgccctggacggaggatctcccccccggtccgggacggctcaggtgtacatcgaggttcttgacgtcaacgacaacgccccagagtttgagcagcctttttacagggtgcagatctccgaggactccccggtgggctttcttgttgtgaaagtgtcagctacagacgtggacaccggagtaaacggtgagatctcatactcgctttttcaagcctccgaggaaatcgggaagacttttaagattaaccctttaacaggtgagattgagctcaaaaaacagttagatttcgagaaactccagtcatatgaagtgaacatcgaagctagagacgcagggactttctcaggaaaatgcaccgtgctgattcaagtgattgacgtaaacgaccatgctcctgaggtcacaatgtccgccttcacctctccgatacctgaaaatgcgccggaaacagtggtggccctgtttagcgtgtcagatctggattcaggcgaaaacggcaagatttcttgcagcatacaggaggatcttccgttccttctgaagtctgccgaaaatttttacactcttctgaccgagcggcccctcgacagagagagtcgcgcagagtacaacattacgatcactgtgaccgatctcggaactccaatgttgattacccaattaaacatgacggtactgattgccgacgtgaatgacaacgcaccggcatttactcagacgtcatataccctgtttgtcagggaaaataacagccccgctctccatatcagaagtgtgtccgctactgatcgcgactctggaacaaatgcacaggttacatacagcctgctgcccccgcaagatccgcatctgccattgacctcattggtctctattaacgctgataacgggcatctcttcgcactgagatccctggattatgaggctctccaggggttccagtttcgggtgggagcatccgaccacggtagcccagcactgtcgtccgaggcactagtgagggtcgtcgtccttgacgctaacgacaactctcctttcgtgttgtaccctcttcagaacgggtccgctccatgcaccgagttggtgccccgagcagccgaacccggctacttagtgactaaggtggtagccgtggacggagactcgggtcaaaatgcttggctctcctatcagctcttgaaagccacagagctgggtcttttcggcgtctgggcccacaacggagaggttcgaaccgccagactcctctcggagcgagatgccgccaagcataggctagtggtacttgtgaaggacaacggggagccccctaggtctgctacagcgacccttcatgttctgttggtggacggattttctcagccctacctgccacttcctgaggccgccccaacacaggctcaggccgatctgctgaccgtatatctcgtcgtggccctggcgagcgtgtcttctctgttcctcttcagcgtattgctgttcgtcgctgtacgcctctgtagacggtctagggcagcatccgtaggccggtgcctggtaccggagggccctctgcctggccacctcgtcgacatgtccgggacacgtacactttctcagtcctaccagtacgaagtgtgcctggcaggaggctccgggaccaacgaattcaagtttctgaaaccgattattcctaacttcccaccccaatgccctggaaaggaaatccaggggaactctacatttccgaacaactttgggtttaatattcagtag

SEQ ID NO: 131126 - DNA, 2235 bp, synthetic construct
  misc_feature 1..2235: note = Description of Artificial Sequence: Synthetic coding sequence
  source 1..2235: mol_type = other DNA
atggaggcatccggcaaactaatctgccgccagcggcaggtcctattctccttcctgctcctgggacttagtttggccggcgcagctgaaccaaggagttatagcgtggtggaggaaaccgaaggctcatcttttgtcacaaacttggcaaaggacctcggcttggaacaaagagagttctcccggagaggggttcgcgtcgtctcacgcggcaataagcttcacttgcagttgaatcaggaaactgcggacttgctcctgaatgagaagctggacagggaagacctttgtgggcatactgagccatgtgtgctgagattccaggtcttactggaaagccccttcgaatttttccaagccgaattacaggtgattgatatcaatgatcattccccagttttcctggacaagcagatgctggtcaaagtgtccgagtcctctccgcccggtacaactttcccactcaaaaatgccgaggatttggatgtgggccagaataatattgagaactatatcattagtcccaactcatatttccgtgtactgacgaggaagagatctgatggacgcaagtacccagaacttgtgctagataaagccctcgatcgcgaagaggaagcagagctgcgactcacactaacagctcttgatggggggtcgccaccacgctcaggtaccgcccaggtctatatcgaggtgcttgacgtcaatgacaatgccccagaattcgagcagcctttctacagggttcagatctcagaggactctccagttggttttttggtggtgaaggtgagcgccacagatgtagacaccggagtgaacggtgagatctcctattccttgtttcaggccagcgaggagatcggaaagacctttaagattaacccactcaccggcgaaattgagcttaaaaaacagctggatttcgagaagctccagtcctacgaggtcaacatagaagccagagatgctggcacattctctggcaagtgtactgtcttgattcaggtgatcgacgttaacgaccatgcccccgaagtaactatgagcgccttcactagccccattcccgagaatgcccctgagacagttgtggctctgttctctgttagtgacctagattcaggggaaaatggcaaaatctcttgttcaatccaagaggacctccctttcctcttaaaaagtgcagagaatttttataccctgctgacagagcgacctttggatcgtgaatcccgggcggagtacaatattactatcacagtcacagatctgggcacacccatgctgatcacccagctgaatatgactgtgctgattgctgacgtgaatgataatgctcccgcttttacacagacctcctacactctgtttgtacgggaaaataactcaccagcccttcatataaggagtgtctccgccaccgaccgggacagcggtactaacgcccaggtcacatattccctgttgccgcctagggtggttgtcctggatgcaaatgataacagcccttttgtcctgtaccccttgcagaatggttcagcgccttgcacagagctagtcccaagagccgctgaaccgggctacctggtgacaaaagtggtggccgtcgatggcgacagcggacagaacgcctggttaagctatcagttgttaaaggctactgagctgggcctttttggcgtgtgggcacacaatggagaagtcaggaccgctagactgctgtcagaacgagatgctgctaagcaccgcctagtggtactcgttaaggataacggagaaccccctcggtccgcaacagcaaccctgcatgtattgctggtcgatggtttctcccagccatacctccctctaccagaagctgcaccgacacaggctcaggcggacctgctcacagtgtaccttgtggtagcactcgcatctgtatcctcactttttctcttttccgtgcttctctttgtcgctgtcagactgtgtaggcgttccagagccgctagtgtggggcggtgcttggtacccgaagggccccttcccggccatctggtggacatgagtgggacaagaaccctgtctcagtcttaccagtacgaggtctgtctcgccggggggagcggtactaacgaattcaaatttctgaaacccatcatccccaattttccgccccagtgtcccggaaaggagatccaaggcaactcgacgttcccaaacaattttggattcaatattcagtag

SEQ ID NO: 131127 - DNA, 2409 bp, synthetic construct
  misc_feature 1..2409: note = Description of Artificial Sequence: Synthetic coding sequence
  source 1..2409: mol_type = other DNA
atggaggcatccggcaagttaatttgccgccagagacaggtgcttttctcctttctcctgctcggcctgagcctcgcgggagctgcagaaccgcggtcatactctgttgtcgaggaaactgagggaagctcctttgttacaaacctggctaaagacctgggtctcgaacagcgagaattttcacggcggggagttcgggtcgtgagcagaggaaataaactgcatctgcaactgaaccaggagactgctgatctcctccttaacgagaaacttgatcgcgaagacctctgcggacataccgagccttgcgtattgcgatttcaggttcttctcgagtccccattcgaattctttcaggcagagctccaagtaattgacatcaatgaccactcccccgtgttcctggacaaacagatgctggttaaggtttctgagtcatcgccccctggtacaacattcccattaaagaatgctgaggatctggacgtcgggcagaacaacattgagaactacattataagtcccaacagttatttccgtgttctgacaagaaagcgaagcgatggacggaaatacccggagctcgtactcgacaaagccctcgatcgggaggaggaggccgaactgcgactgactctgaccgctctggacggcgggtctccacctcgctcagggactgctcaggtttacatcgaggttcttgatgtgaacgacaacgcgcccgaattcgagcagcccttttatagggtccagatatccgaggattcacccgtgggcttcctggtggtgaaagtatctgctaccgatgtggatacaggggtcaacggtgagatttcctattccctgttccaggcttctgaggaaataggcaagactttcaaaataaaccctctaacaggcgaaatagaactgaaaaagcagttggatttcgagaaactgcagtcttatgaggtgaacattgaagcgcgtgatgcaggcacattttctgggaaatgtactgtgctgatccaagtgatcgacgtaaatgatcacgctcctgaggtcactatgtcggcttttacctctcctatcccggaaaacgccccggaaactgtagttgctctgttctcagtgagcgatctggactctggcgagaacgggaagatatcttgctctatccaagaagacctcccatttcttttgaagtcggctgaaaatttctatactctccttacggagagaccgttggatagggagtcccgggctgagtataatatcacgatcacagtcacggacctaggcactcccatgttaataacccagctgaatatgactgtgctgattgcagacgtgaacgacaacgcccccgccttcacacaaacgagctatactctgttcgtgagggagaacaactccccagctctgcatattcgctctgtgtctgctacagaccgtgactccgggacaaacgctcaggtgacctattcgctgctgccaccccaggacccccatctgcctctaacttctcttgtgtctatcaatgcagacaacgggcacttattcgccctgaggtccctggactacgaggcactacaaggattccagttccgcgtcggcgcctcggatcacggcagccccgccctctcatctgaagctcttgtcagggtggttgtgctggatgccaacgataacagcccttttgtactctacccacttcagaacggctccgccccttgtactgagctggtgccacgtgccgctgagccaggctacctggtgactaaggttgtagcagtcgacggagacagtgggcagaacgcatggttgtcctatcagctcctgaaggcaaccgagctcggtctgttcggcgtgtgggctcataatggagaggttagaacagcaagattgctgtctgaacgcgacgctgccaagcacaggctggtcgttctggtgaaggacaatggcgaacccccccggtccgccacggcgactttgcatgtcctgctagtcgatgggttttctcagccatatctaccactacctgaagccgcccctactcaagctcaggccgacctcttgactgtgtatctggttgttgccctggctagcgtctccagtctcttcctgtttagtgtcctgctgttcgtcgctgtgaggctgtgccggcgctctcgcgctgccagcgtcggaagatgtttggtgccagaaggacctttacccggacatctcgtagacatgtccggtactcgaactctgtcccagagctatcagtatgaggtgtgtctggccggtggatcaggaaccaatgagttcaagtttctgaaaccaatcatacccaattttcccccacagtgtcctgggaaggaaatacagggtaactcaaccttccccaacctttgtgtctgcaacatagtgcggatttatagctag

SEQ ID NO: 131128 - DNA, 2397 bp, synthetic construct
  misc_feature 1..2397: note = Description of Artificial Sequence: Synthetic coding sequence
  source 1..2397: mol_type = other DNA
atggagatacgtggcgccctcgatcttcggaagagacaggtcttaatctttctggtattactgggactcagccgcgctggtaccgagagtgcccactactctgttgcagaagaaacggaaatcggctcctttgtcgccaacttggctcgcgatctaggactgggcgtggaggagctttctagccgcgaagcacgtgtcgtttccgatgataacaaaaagtatctgcatctggatctcctcacaggaaatctactactgaatgagaagcttgatagggatgagctctgcgggtctaccgaaccatgtgtactgcactttcaggtagtactggaaaaccctctgcaattttttcgtttcgaactgtgcgtcaaagacatcaacgatcattcacctacattcctggataaggaaatcctgattaagataagtgagggaaccacagtcggcgctaccttcctgatggagtctgcccaggatctggatgtaggctccaacagtttacagaactatacgatctcgcccaactcacatttctacataaaaatcccggatagttctgaccggaagatctaccctgaactggttctggatagagccctggactacgaacaggaggcagagctgagactcacgctaaccgctgttgacgggggctcaccgcccaagtcgggaacgacacttgtattgatcaaggtcttagacatcaatgacaacgcgcctgaattcccccaatcactgtacgaggtgcaagtgcccgaggacagacctctgggatcttggattgcaacaatctcagccaaggatttagatgcaggcaattatgggaaaatttcttacacgttttttcatgcttccgaggatattcgcaaaactttcgagattaacccgattagcggcgaggtgaatctgagatcacccctagatttcgaagttatacaatcatacacaatcaacatccaggccacagacggagggggtttgtccggcaaatgcacactgttggtgaaagtaatggacattaacgacaacccgcctgaggttactatttcttccattacaaaaaggatccccgagaatgcttcggaaacactggtggccctgttttctatcctcgaccaggacagcggcgataatggcaggatgatctgtagcatccaggataatctcccattcttcctgaagcctacattcaagaacttcttcaccctggtgtccgaaaaggccctcgatagagaatctcaggccgaatataatattacgataactgttacagatcttgggacaccacgactcaaaaccgaatacaacataactgttctcctgagcgatgtgaacgacaacgccccaaccttcacacagacctcctataccttgttcgtcagagagaacaattcacccgctctgcatattggttcagtgtctgccacagacagagattcggggaccaacgcacaggttaattatagcttgcttcccccacaggatcggcatttgccacttgcttctctagtgtctattaacgcggataacggtcatttgtttgctctacgttccctagattatgaagctctacaggagtttgaattcagagtgggggcgactgataggggctcccccgctctctcaagtgaggctctcgttagggttcttgtgctggatgccaacgacaatagcccgtttgttttgtatcctctgcagaatggatccgctccatgtactgagctggttcctagggccgcagagcccggttatctcgtgaccaaagtagtcgccgtggatggagactccggtcagaatgcctggctcagttaccagctgcttaaagcaactgaacctggccttttcggcgtatgggcccataacggggaagttaggaccgcaagactgttgtcagagcgcgacgctgctaaacacaggctcgtcgtcctggttaaagacaatggagaacccccccggtctgctaccgctactctgcatgtcttacttgtggatggtttcagccagccctacctgccacttcctgaggccgcccctgcacaggcacaggcagactctctcacagtctatttggtagttgctcttgcgagcgtgtcatccctttttctcttttctgtgctgttgtttgtggcggtccggctctgcagacggtccagagcagccagcgtcggacggtgctctgtcccggagggacccttcccaggccacctggtagatgtatctggcacagggaccctaagtcagtcttatcagtacgaggtgtgtttgactgggggatcagggactaatgaattcaagttcctaaagcccattatcccaaattttcaggtgcatgatacaggccggaatatgggcgagatcgagaatttcaggaattcatttgggctgaacattcagtag

SEQ ID NO: 131129 - DNA, 1938 bp, synthetic construct
  misc_feature 1..1938: note = Description of Artificial Sequence: Synthetic coding sequence
  source 1..1938: mol_type = other DNA
atggagtcagcacaggacttggacgttggctctaactcacttcagaactacacaatttccccaaatagtcatttctatattaaaattcctgactcaagtgatagaaagatttatccagagctcgtccttgaccgcgccctggactacgaacaggaagcagagttgcgcctgaccctgacagccgtggacggcgggagccctcccaaatcaggaacaacactcgtcttgataaaagttttggacattaatgacaacgcgccagagttcccgcagtctctgtacgaggtgcaggtgcctgaagacagacccctcgggtcttggatcgctactatcagtgccaaggacctggatgctggtaattacgggaagataagctatacattcttccacgcgtcagaggacataagaaagacctttgagatcaaccctatttccggtgaagtgaatctgcgtagcccactggatttcgaagtcatacagagttacacaatcaatatccaggcgacagatgggggcgggctcagcggcaaatgtaccctgctggtgaaagtgatggacattaatgataatccccccgaagtgacaatctcatcgatcaccaaaaggattcccgaaaatgccagcgagaccctcgtggctctgtttagtatacttgaccaggattccggcgataatggcagaatgatctgttccatacaagacaatctgcctttcttcctcaagcccacttttaagaatttctttactttagttagtgaaaaagcattggatcgagagtcacaagctgagtacaatatcaccattacagttaccgatttgggaacaccccggcttaaaacagagtataatatcaccgtacttctgtctgatgtgaacgacaatgcccctaccttcacacagacaagctatacgttgttcgtccgcgaaaacaactcccctgctctgcacattggatcggtgtcagccaccgatcgcgactcaggtactaacgcacaggtcaattactctcttttgccaccccaggacagacacctgccgcttgctagcctggtcagcattaatgctgataatggtcatctgttcgccctcaggtcgcttgattatgaggcactacaggagttcgagttccgcgttggggcaacagataggggttctccagcgctgtcctccgaggccttggttcgggtgctcgtacttgacgcaaatgacaattcaccctttgtactttatccattgcaaaatggctcagccccttgtaccgaactggtccccagggcagcagaaccagggtatctcgttacaaaagtggtcgcagttgacggggacagcggtcagaacgcatggttgtcctatcagctgctgaaagccactgagcccggcctgtttggcgtctgggcacacaatggggaggttagaaccgctcgtctgctgagtgagagagacgcagctaagcatcgattggtcgtactcgtgaaggacaacggggaacccccaagatcggccacagccacactgcatgtactgctcgtcgacggattctcacagccttatctgcctctgccagaagctgccccagcacaggcacaggccgattccttaactgtgtaccttgtggtcgctttagcctcagtaagcagcctatttctcttctccgtcttgttgtttgttgccgtgaggctttgtcggcggtctagagccgcatccgtgggcagatgctctgtacccgagggccccttccccggtcaccttgttgacgtgtctggcaccggaaccttgtcccagtcgtatcagtacgaagtgtgtttgaccggtgggtccgggaccaatgagttcaaatttttgaagccgatcatcccgaattttcaggttcacgataccggaaggaatatgggggagattgagaacttccgcaacagttttggactgaacattcagtag

SEQ ID NO: 131130 - DNA, 2382 bp, synthetic construct
  misc_feature 1..2382: note = Description of Artificial Sequence: Synthetic coding sequence
  source 1..2382: mol_type = other DNA
atggaggcccgtgttgagcgggccgtccagaagcgtcaagtgttgttcttatgtgtgttccttggcatgtcctgggccggcgctgaaccactgcgctattttgttgctgaggagacagagcggggcacatttctgaccaatctcgccaaggacctggggctgggcgtcggcgagctgcgggccagggggacgcgcatcgtcagcgaccagaacatgcagattctgttactgtcttcgcttaccggggacctcttgctaaacgaaaaactcgatcgtgaagagctttgtggcccccgcgagccctgcgtgttgccctttcagcttctccttgagaaacctttccagattttccgcgccgagctctgggttcgagatatcaacgaccacgctccagtattcctggacagggagatatcacttaaaatactggagtcaaccactcccggggctgcctttcttcttgagtctgcacaagatagcgatgtgggcactaatagtctttccaattacacaatctctcccaacgcctatttccatatcaacgtacatgattcaggggaagggaacatctacccagagctggtactgaaccaggtcctagaccgagaggaaatcccggaattctcactgaccttaacagctctagacggagggtctccgccccggtcaggaacagctctggtgcggatcctggtgctggacgtaaacgataacgcaccggatttcgtacgctccttgtacaaggtgcaggttcctgagaactctccagttggaagcatggtggtgtctgtttccgcgagagatctggacacggggagcaacggtgagatcgcctatgccttcagctacgcaactgagagaatcttgaagacctttcagattaatcctacatctggcagcttgcatttaaaagctcaacttgattatgaagccatccagacctataccctgaccatccaggctaaagacggaggcggccttagcgggaagtgcactgtggtggtagatgtgacagacattaatgacaatcggcctgaactgctactaagtagcttgactagtccgattgcggagaactctccagaaactgtcgtggctgtatttcggattagagatagagacagtggtaataacggtaagaccgtctgttcaatccaggacgatgtgccctttatcctcaagccctccgtggagaacttttatactctggtcaccgagaagcctttagaccgtgaaaggaacaccgagtataatataactattaccgttacggaccttgggacgccacggcttaaaaccgagcacaacatcacagttctcgtgtctgatgtaaatgataatgcgcctgcttttacccagacttcctacactctcttcgtgcgggaaaataactcgcctgcattgcccattggcagtgtatcggccactgatcgggattctggaacgaatgcccaggtcatctactccctgctaccatcacaggatccacacctgccacttgcctccttagtcagtatcaacgccgataatggacacctgttcgccctccgctccttagattacgaagcactgcaagccttcgagttcagggtgggcgccaccgatcgcggctctcccgccttaagtagcgaagcacttgtaagggtgctagtgctggatgctaacgacaatagtccatttgtgctctacccactccagaatagctctgctccctgcacagagcctttacctcgggctgctgagcctggatatttggtgaccaaggttgttgctgttgacggggactccgggcaaaatgcatggttatcataccagctcttgaaggccacggagcccggcctgttcggtgtatgggctcataatggtgaagtgcgcacagcacgtctcctttccgagcgagacgccgcgaagcagcggcttgttgtgttggtgaaggacaatggcgagccccccagaagtgcaactgctacactccacgtcctactggtcgatgggttttctcagccatacctgaggcttccggaggccgcccccgatcaggcgaactctctcaccgtatatctcgtggttgctctcgccagcgtttccagcttgttcctgctctcagtgctactgttcgtcgcagtcagactgtgtcgcaggagcagagctgcaccagtggggaggtgctctgtgcccgagggccctttcccccggcaccttgtggatctgagcggaacgggcaccctgagccagagttaccagtatgaggtgtgtttaacaggcggctcaggaaccaacgagtttaagttcctaaaaccaattatccccaatctgctgccgcagtcaaccggaagggaggtcgaagaaaataggccgtttcagaataatttaggattctag

SEQ ID NO: 131131 - DNA, 2331 bp, synthetic construct
  misc_feature 1..2331: note = Description of Artificial Sequence: Synthetic coding sequence
  source 1..2331: mol_type = other DNA
atggagattggttggatgcataacaggagacagcgccaggttctagttttctttgtcctactctccttaagcggagccggagcggaattggggtcatacagcgtcgttgaagagaccgaacgaggctcgtttgtcgccaatctcggcaaggacctgggcctgggcctaactgaaatgagtacccgaaaagcccggattattagccaggggaataagcaacacctacaacttaaagctcagactggcgatcttctgataaacgagaaactggaccgcgaggaactctgtggaccaaccgagccctgtattctgcacttccaagtcctcatggaaaaccctctggaaatcttccaggctgaactgagggtcattgatatcaatgaccattcaccaatgtttaccgagaaggagatgatactcaagattcctgaaaatagtccactggggacggagttccccctgaatcacgcgctggacctggacgttggtagcaataacgtgcagaattataagatcagcccatccagccatttccgtgtgctcatccacgagtttcgggacgggaggaagtatccggagctggttctggataaagagttagatagggaagaagagccccaactccggctgaccctcacagcgttggatggtggctcacccccacgctcaggtactgcccaagtcaggattgaggtggttgatatcaacgataacgcccccgagttcgaacaacctatatacaaagtgcagatcccagagaactctccgctcggcagcctggtggccacagtgagcgctcgcgatttggacgggggcgctaacggcaagatcagttacaccctcttccagccatctgaagacatcagcaagaccctcgaggttaatcctatgacaggagaggttagactccggaagcaagttgattttgaaatggtgaccagctatgaggttcgcattaaggcaacagacggcggtgggctgagtggcaagtgcacgctcctgctgcaggtcgtggatgtcaatgataacccaccgcaggtgacgatgtccgccctgaccagccccattccagagaactcccccgaaatagtggtggctgtgttctcggtgtccgatcccgacagcggaaataatggaaaaacaatcagcagcatccaggaagatctgccctttcttcttaagccatccgtcaaaaatttctacaccctggttaccgaaagggcactcgatagggaggctcgtgctgagtacaatatcacactgaccgtgaccgatatgggcaccccacggctgaagactgaacataacatcaccgtgcagattagcgacgtgaacgataatgcccccacatttacccagaccagctatacgctgtttgtacgtgaaaacaattcccccgcccttcatattggctctgtgagtgccactgaccgtgattctggtaccaacgcccaggtaacttattccctcctcccacctcaggacccacacctgcctcttgcatctctcgtcagcataaacgctgacaatggccacctctttgctctgagatctctcgactatgaagcacttcgagaattcgagtttagagtgtctgcaacagatcgcggaagtccagctctctcctccgaagccttggttcgggtgttggtcttggacgccaatgataacagcccgttcgtgttgtacccacttcagaacggaagtgccccgtgtaccgagctggtgccaagagctgctgagccaggctacctagttaccaaggtcgtcgccgtcgatggagattctggtcagaacgcgtggctgtcttatcagctcctgaaagctacggagcctggattgtttggggtttgggcccacaatggggaggtacgaaccgcccgcttgctgtcagagagggacgccgcgaagcagaggcttgtggttctggtgaaagataacggtgaaccccccagatcagcaactgccaccctgcatgtgttgctcgtagacgggttttcccagccattcctgcccctgccggaagcagcccctgggcagacacaggcaaactcgctgacagtgtatctcgtggtagcccttgcatctgtctcctcactcttcctgttttctgttcttctgtttgtggccgtgcgtttatgccggagaagcagggctgcctcggtcggcaggtgtagcatgccagaaggacctttcccaggaagacttgtggatgtcagcggtaccggcactctcagccagagctatcagtacgaagtgtgcctgaccggggggtccgagacgtcagagtttaaattcctgaagccaatcatacctaacttctccccctag

SEQ ID NO: 131132 - DNA, 2397 bp, synthetic construct
  misc_feature 1..2397: note = Description of Artificial Sequence: Synthetic coding sequence
  source 1..2397: mol_type = other DNA
atggaagccggtgaggggaaggaaagggtgcccaagcaacgccaggtgttaatattttttgttcttctgggaatcgctcaggcttcatgtcagcctcgccactacagcgtagccgaagaaactgaaagcggctcttttgtcgccaacttattaaaggacctgggcctggaaatcggtgaactcgcagtgcgtggcgcgagggtggtaagcaaagggaaaaagatgcacctccagttcgaccgtcagacaggtgacttgcttcttaacgagaagctggatagagaggagttgtgcggcccaaccgaaccatgtgtgctgcccttccaagtgcttctcgaaaaccccctgcaatttttccaggctgagctacggatcagagatgttaacgatcattcgccggttttcttggacaaagagatcctgctcaaaattcccgaaagtattacacctggtactacgttcttaatcgaacgcgcccaggatctcgatgttggaaccaatagtttacagaactacacaatcagtcccaattttcatttccaccttaaccttcaggacagccttgatggcattattttgccacagctggtgctgaaccgggccctggacagggaagagcagcctgagattcgcctcaccctgaccgctctggacggtggatcgcccccacggagtggtacagctctagtaagaatagaagtagttgatattaacgacaacgtgcccgagttcgcaaaattgctgtacgaggttcagattccagaggacagtccggtaggctcccaagtagctatcgtcagcgcccgagacctggatatcggcacaaacggggaaatttcatacgcgtttagtcaggcatcagaagacatccgcaaaacgttcagactgtctgctaagtccggcgagttgttgcttagacagaaattggatttcgagtccatccagacatacaccgttaacattcaggcgaccgacggagggggcctatctggtacatgcgtggttttcgtacaggtgatggaccttaatgataatccccctgagctgaccatgtcaacacttatcaaccagatacctgaaaatctgcaggacaccctaatcgcggttttttctgtatccgaccccgatagcggcgacaacgggcggatggtgtgtagcatccaagacgatctccctttttttctaaaaccaagcgtcgaaaacttttatacacttgtgatctctaccgccctggacagggagacaaggtcagagtacaatattacaattacagttacagactttggtacacctcgactcaagactgagcacaacattacagttctagtctctgatgtcaatgataatgccccagcattcacccagacaagctacacattgtttgtgagggagaacaatagtcccgccctccacattgggtctgtttctgccaccgaccgtgatagtggtacaaatgctcaggtaacatatagcctgttgcccccccaagatccacacctgccactcgcaagtttagtaagcattaacgccgataatggtcatctgtttgctctccagtcactggactatgaagccttacaggcctttgagttcagagtgggcgccgccgacagagggtcccctgccctgagtagcgaggcactggtgagggtcctcgttctggacgccaacgacaactcaccgttcgtgctgtatcctctgcagaatggatcagccccatgtaccgagcttgtgccgcgggcagccgagccaggctacctcgtgaccaaagtggttgccgtcgacggcgactctggtcagaacgcgtggttgtcctaccagctgctgaaggccacagagccagggctcttcggagtgtgggcacacaacggagaagtgaggaccgctcggctcttacgcgagcgagacgctgccaaacagcgcctggtggtcctggtgaaggacaacggagaaccaccgaggagtgctacagctacgctccatgtgttactagtggatggattcagccagccttatcttctcctgcccgaggctgctcccgcccaggctcaagcagatttgctgacagtctaccttgttgtggccctcgcatcagtcagtagtctgttcctgttttctgtcctgttattcgtggcggtcagactttgcagacggagtcgggcggccagcgtgggacgttgcagcgtgccggaggggccgttccctggccagatggtggatgtgtccgggaccggcacattgagccagtcctatcaatacgaggtatgtctcacagggggatctggcaccaacgagtttaagttcctgaaacctatcataccaaacttcgtggcccagggggctgagagagtgtctgaggcaaacccctcatttagaaagagtttcgagtttacttag

SEQ ID NO: 131133 - DNA, 648 bp, synthetic construct
  misc_feature 1..648: note = Description of Artificial Sequence: Synthetic coding sequence
  source 1..648: mol_type = other DNA
atgaacctggtgggtagttatgcgcaccaccaccatcaccaccacccacaccctgcgcacccaatgctgcacgaaccctttctgtttggccccgcttctagatgtcaccaggaacggccgtactttcagtcatggctgctgtctccagccgacgcagctcccgacttccccgcaggcggccccccgccggcagcagcagccgcagccacggcgtatggcccagacgctcgacctggccaatcacccggtaggctggaagcattggggggacgtcttgggcggcgcaagggttcaggccctaaaaaagagaggcgccgcactgagtcgatcaattctgcctttgccgagctacgagagtgcatcccgaacgtcccagccgacacgaaattgtcaaagatcaaaacccttcgcctcgccacctcatacatcgcgtatctaatggacgtactcgctaaggacgcacaaagcggcgaccccgaggcattcaaggctgaattaaaaaaggctgatggagggagggagtccaaacggaaaagggaactgcagcaacacgaaggctttccacctgctctcggcccagtggagaagcggataaaaggcagaactgggtggccacagcaagtgtgggcgttggaactgaaccagtag

SEQ ID NO: 131134 - DNA, 2388 bp, synthetic construct
  misc_feature 1..2388: note = Description of Artificial Sequence: Synthetic coding sequence
  source 1..2388: mol_type = other DNA
atgaaaaaattgggccggatacaccccaaccggcaggtgctggcattcatcttaatggtctttctttctcaggttcggcttgagcctatcaggtactctgtgctcgaagagacagaatccggatctttcgtcgctcacctggcaaaggacctcggtctcgggatcggggagctggcgagtcggtccgcccgggtgctctccgacgacgacaagcagaggctgcagctagaccggcagaccggagatttgctcctgcgtgagaaacttgaccgcgaggagctgtgcggtcctattgagccctgtgttcttcactttcaagtttttctcgagatgcccgtgcagtttttccagggggagctgctcattcaagatatcaacgatcattcccctatcttcccagagagagaagtgctcctcaagatccttgagaattctcagccaggaacgcttttcccactgctaattgcagaggatctggatgtcggctctaacggactgcagaaatatacgattagtccaaatagtcactttcatatcctaacacgaaatcactctgaaggcaagaagtatccagaccttgtccaggataaaccactggatcgggaggagcagcctgagttcagtctgacactcgtcgcactcgacggcggttcaccccctaggtctgggactgtgatggtgaggatcctaataatggacataaacgataacgctcccgaattcgtgcacacgccatacggtgtacaggtgttggagaattctcccttagacagccctatcgtgagggtgttggcccgcgatattgacgcaggaaactttggctcagtcagttacgggctcttccaggcatctgacgagatcaagcagactttttccattaacgaggttaccggggagatacttcttaagaagaaattagacttcgagaaaatcaagagttatcacgtggaaattgaggccaccgatggtggcggcctgtccgggaaagggactgttgttatcgaagtagtggacgtcaacgataacccgccggagctgatcatcagctcgctgaccagttccatacctgagaacgcccccgaaaccgtggtgtccatttttaggatccgtgacagggactctggagagaacggaaagatgatttgctccatccccgataaccttcccttcatacttaagcctactctgaagaatttctatactctagtcacggaacgacctctggaccgggagaccagtgccgaatataatattaccatagctgtaacagatctggggacgccacggttgaagacacagcagaatataacagtgcaggtgtctgacgtgaacgacaatgcgcctgcattcacacagacctcttacactctctttgtgcgcgaaaataatagccctgccctgcacatcggctccgtgagcgccaccgaccgcgactctggaaccaatgcccaggttacatatagccttctgcctccccaggatccgcacttgcctctcgcctcacttgtgagcatcaacgccgataacggccatttgtttgccctgcgaagcctcgactacgaggctctacaggcctttgagttcagagtgggtgcctcagatagaggatcaccggcactgagctcagaggcacttgtcagggttctagtcctggatactaacgataacagtcccttcgttctttacccactgcagaacggcagcgcgccctgtactgagcttgtgccgagagccgcagagccaggctatttggttacaaaggtggtcgcagtggacggggatagtgggcagaacgcttggttgtcctaccagcttctgaaggccaccgagccgggactgtttggagtgtgggcgcacaacggcgaggtgcgtacggcgcgtctgctgtcggagcgggatgctgctaagcaccgacttgttgtgctggtgaaagataacggagaaccccccagatctgccaccgctaccctccatgtgctgctggtggatggcttttcccagccctacttgcccctccccgaagctgcacccgctcaggctcaggccgactctcttactgtgtatctggtggtggcgctggccagcgtgtcctcgctttttctgttctctgtgctgctgttcgtggctgtgcgcttatgccgaaggtctcgggcagcttccgttggcaggtgctcagtgccagaaggaccctttcctggtcatctggtagacgtgtcagggacaggcaccctctctcaatcatatcagtatgaggtttgtttgacaggcgacagcggcacaggtgaatttaaattcctcaagccgattttcccaaacctgcttgttcaggataccggacgcgaagtcaaagaaaaccctaaattccggaatagcctggtgttttcatag

SEQ ID NO: 131135 - DNA, 2391 bp, synthetic construct
  misc_feature 1..2391: note = Description of Artificial Sequence: Synthetic coding sequence
  source 1..2391: mol_type = other DNA
atggaagctggtggggaacgcttcttgaggcagcgacaagtcctcctcctattcgtgttcctcggagggtccctcgctggatctgagagcagaaggtattcagtcgccgaggagaaagagaaaggtttcctgatcgccaatctggcgaaagacttgggactgagggtcgaagagttagctgcccgcggtgcccaagtcgtgagtaaaggtaacaaacaacatttccagctgtctcaccagaccggtgatctgctgctgaacgaaaaactggaccgggaggaactgtgtggccctaccgagccatgcatcctgcatttccagatactgttgcagaacccacttcaatttgttaccaatgagctccggattattgacgttaacgatcatagccccgtgtttttcgaaaatgagatgcatctcaaaatattggaatcaaccctgcccggaacagtcattcccctcggtaatgccgaggaccttgacgtcggcaggaattctcttcaaaactataccattactccaaactctcacttccacgtccttacaaggagccggcgggatgggagaaagtacccagaattagtactggacaaagccctggacagagaggaacagccagagttgagcctaactttgaccgccctcgacggaggtagccctcctaggtctgggactgcccagatcaacattcaggtgctggatatcaatgacaatgcccccgaattcgcgcaaccactgtatgaagtagccgtcctggagaacaccccagtgaacagcgtgatagtgacagtgtccgcctccgatctggatactggcagtttcggaacaatctcttatgcctttttccatgcttccgaagagattcgcaaaacatttcagttaaatcctattaccggtgacatgcaacttgtgaagtacctgaatttcgaggccatcaacagctacgaagtggacatcgaggccaaggatgggggaggccttagtggtaagtccaccgtcattgtccaggtggtggacgtcaatgataatccccctgagctgaccctgtccagtgtcaattcccccatcccagaaaactccggcgaaacagtgctcgccgtcttctcagtctccgacctagatagcggggataacggaagggttatgtgcagtatcgaaaacaatcttccattctttctgaagccctcagtggagaacttttacactttggtgtccgagggtgccttagatagagagaccagaagcgagtataatatcacaatcaccattaccgatctcggtaccccgcgtctgaaaactaagtataatataacagtgctggttagcgacgtgaatgataatgcacccgcttttacgcaaatctcttacacactatttgtacgggaaaataatagccctgccctccacatcggctctgtgagcgcaactgaccgggatagtggcaccaacgctcaagttacttatagcttgcttcccccacaggaccctcacctgccattgtcgagcttagtcagcattaacgcggataatgggcacctgtttgcactgagatctctggattacgaagcgctccaagcctttgagttccgagtgggggctacagaccgaggtagccccgcactttcatccgaagctctcgtacgcgtgctcgttcttgatgctaacgacaattctccattcgttctgtaccccctgcagaacgggagcgcgccctgcacagaattggtaccgcgggctgcggagccaggatatctcgtaacaaaagttgtggcagtggacggggattctggtcagaacgcgtggttatcataccaactgttaaaggctactgagccaggtcttttcggggtgtgggcgcacaacggagaagtcagaacggcccgcttactgagcgaacgtgacgcagccaagcatcgattggtagtgctggtcaaggacaacggagagcctccgcgctcagcgaccgcgacattacatgtgctcctcgtggacgggtttagtcagccctatctgccactcccggaggccgcccctgcccaggcccaggctgacctgcttacagtatatttagttgtggccctggcaagtgtgagctccttgtttctcttctccgtcctgctgttcgtggcagtgcggctgtgccgccggtctagggctgctagtgtgggccggtgcagcgtgcccgagggcccttttcccggccagatggtcgatgtgagtggaacaggaactctgagccagagttatcagtacgaagtctgcctaaccggaggaagcggaactaacgagtttaagttcctgaaaccaattatccccaatttcgtcgctcagggggcagaaagggtgagcgaggctaacccgtccttcaggaagtccttcgagtttagctag

SEQ ID NO: 131136 - DNA, 1107 bp, synthetic construct
  misc_feature 1..1107: note = Description of Artificial Sequence: Synthetic coding sequence
  source 1..1107: mol_type = other DNA
gggggagctccccctcggtccggcacaactactataaggatagtggtgctggataacaatgataatgcaccagaatttctgcaaagcttctacgaagtgcaagtgccagagaacagtccgctcaactccttggtcgtggtggtatcagctcgagatctagacgccggagcttatggctcagttgcatacgccctctttcagggggatgaagtgactcagcctttcgtgatcgacgaaaagactgccgaaattcgcttgaaaagagcactagactttgaggccaccccctattacaacgtagagatagtggcaaccgatggaggtgggttatcaggcaaatgtaccgtggccatagaggtggtcgatgtgaatgacaacgctcccgagctgacgatgagcaccctgtcgtctcccacgcccgagaatgcaccagaaactgttgtagccgtcttcagcgtgagcgaccccgattccggcgataatggacggatgatttgctctatccagaatgatcttccctttctgctcaagcccactctgaaaaacttctacacactggtgactcagcggacactggatagagaaagccaggccgaatataatatcaccattacagttaccgatatggggacacctaggctcaaaacagagcataatatcacagtgttggtgtccgacgtgaacgacaacgccccggccttcacacagacctcgtacactctcttcgtgagggaaaacaacagcccggctcttcatattgggagcgtgtcggccactgatagagatagcggcacgaacgctcaagtgacttactcactgctgcctccgcagaatccgcatctgcgcctagcgagcctcgtctcaattaatgcggataacggtcacctgttcgctctccggagtctggactacgaggctctccaggccttcgaattccgcgtcggcgcaacggaccggggctcccccgcactgagttctgaagccctcgttagggttttgtgctggactcccacgacgacgcgtccatcttgctgcatccgttgccgcactgcccgaaggttagcccctagctggtgccctgggagaccatcccgggcgacgtggtag

SEQ ID NO: 131137 - DNA, 2388 bp, synthetic construct
  misc_feature 1..2388: note = Description of Artificial Sequence: Synthetic coding sequence
  source 1..2388: mol_type = other DNA
atggaaaccgctcttgctaaaactccccagaaacgccaggtgatgtttttggctatcttgcttctcttatgggaggccggcagcgaggctgttcggtactctattcctgaggaaacggaaagcggatactcagtagcgaatctggcgaaagacctggggttgggagtaggcgagttagcaacaaggggggcaaggatgcactacaagggtaataaggaacttctccaattggatattaagactgggaacttactactgtatgagaagttggatcgcgaggtaatgtgcggcgctacggagccatgtatattgcatttccagctgttattggagaatccagtccaattcttccagaccgatctgcaactcacagacatcaacgaccacgcacccgagttccctgagaaggagatgctcttgaagatccctgaaagcacccaaccagggaccgtctttccactcaaaatcgcccaggactttgatattggcagcaataccgttcaaaattacaccataagcccgaacagccacttccatgtggcgacccacaaccgcggagacggccgtaaataccctgagcttgtcctagataaggccttggatcgcgaggaacgccctgaattaagcctgacactgacagctctggacggcggagcgcctccccgtagcgggactaccactatccgtatcgtcgtgctggacaacaacgataacgcacctgagttcctgcaaagcttctacgaagtgcaggtccctgagaactccccgctgaactccctggtggtagtggtcagcgcaagagaccttgatgctggcgcatacggtagcgttgcatacgcactatttcaaggcgacgaagtgacgcagccttttgtgattgatgagaagacagcggagattcggcttaagagagcgctcgactttgaggctaccccttactataacgtcgaaatcgtggcaacggacggcggcggtctgagcggcaaatgcaccgtggcgattgaggtggtggacgtgaacgacaacgcaccagaactcactatgtctacactgagctctcccaccccagagaatgccccagaaacggtcgtggcagtgttttctgtctccgatccagactctggggacaatggaaggatgatctgcagtattcagaacgacctaccctttctgcttaagccaacactcaagaacttttatacacttgtcactcagcgtactttagaccgagagagccaggccgagtacaacattaccatcacagtcaccgacatggggactccaagactgaaaaccgaacataatattaccgtcttggttagcgacgtcaatgacaatgcccccgcgttcacgcaaacatcttatactttgtttgttagagaaaacaacagtccagccctgcacattggtagtgtcagtgctactgacagggactcaggcactaatgctcaggttacgtattccctgttacctccacagaatccccacctgcggctcgctagcctggtgtctatcaacgcagataacggtcacttgttcgcccttagatctcttgattacgaggctctccaggcattcgaatttcgcgttggtgctactgatcggggaagcccagccctttcctccgaggccctggtgagagtgttggtgctcgacgcaaatgacaatagcccatttgttctctatcctttacagaatggaagcgccccttgcacggaattagtcccgagagcggccgaacccggctatttggtcaccaaggtagtggcagtggacggggatagcgggcagaatgcttggctgtcataccagcttttgaaagccacggaacctggcctgtttagtatgtgggctcacaacggcgaagtccgcaccgctaggctcctgagcgaacgggacgccgctaagcaccggctggtcgttttggtcaaggacaatggcgaacctcccaggagcgccaccgccaccttacacgttctcctagttgacgggttctcccagccttacctgccactgcccgaggccgccccggcccaggctcaggctgattcactgaccgtgtatttggtcgtggctttggcaagtgtgtcgagcctgtttctgttctctgtcctgcttttcgtagccgtgcgactgtgccgaagatctcgagcagcctccgttggccgttgcagcgtaccagagggtcccttccccggtcatttagtagatgtttccggcacaggcacactgtctcagtcttaccattacgaggtgtgcctcacaggcgacagtggcgctggggagttcaagttcttgaaaccaatcattcccaatctcctcccccagggggccggtgaagaaatcgggaagacggcagcgtttaggaattcatttggattgaattag

SEQ ID NO: 131138 - DNA, 1107 bp, synthetic construct
  misc_feature 1..1107: note = Description of Artificial Sequence: Synthetic coding sequence
  source 1..1107: mol_type = other DNA
ggtggcagtccgccgcgctccggtacgtctgaaatccagatccaagtgctggatatcaacgacaacgtgccagaattcgcgcaagagctctacgaagcacaggttccagagaataaccccctgggatccctggtaatcactgtttcagccagagacttagatgcaggctcatttggtaaagtgagttacgctttgttccaggtcgacgatgtcaatcagcccttcgaaatcaacgctatcaccggcgaaattcgcttgcggaaggcactcgatttcgaggagattcaatcttatgacgtggatgtggaagccacggacggggggggcctgagtggcaaatgcagtcttgtcgtgagggtgctagacgtcaacgacaacgctcccgaacttacaatgagctttttcatatcacttattcctgaaaacctgccggagattaccgttgccgttttctcagtcagcgatgccgacagcgggcacaaccagcaggtgatctgctcaattgaaaacaaccttccatttcttttacgccccagcgtggaaaatttctatacgctggtcaccgagggcgccctggatcgggagtctagagctgagtacaacattactatcacggtgacggatctggggacacccaggctcaaaacccagcagtctatcaccgttcaggtgagtgatgttaatgacaacgtgccagcgtttacccagacctcttacacactgtttgtccgcgaaaacaactcccccgctctccacattggatccgttagcgctaccgacagggattcaggtatcaatgcccaagtcacatacagcttacttcctccccaagatccccaccttcccctaagcagcctagtgagtatcaacgcggataacgggcacttattcgccttgagatctctagattacgaggcgctgcaatcattcgaatttcgggttggagccacagacaggggcagcccagctctttcctctgaggcacttgtcagactcctgtgctggactccaaccaccactcggcccagctgttgtactaggtgcaggactgctcccagaccagccccaagctggtgcccagggaggccttctcgagctacctggtag

SEQ ID NO: 131139 - DNA, 1977 bp, synthetic construct
  misc_feature 1..1977: note = Description of Artificial Sequence: Synthetic coding sequence
  source 1..1977: mol_type = other DNA
atgctactgaaaatttccgagatcacaatgccgggtaaaatatttccgctcaaaatggcccacgatctggacacgggcagcaatggcctgcagagatataccataagctcaaacccccatttccatgtcctcacccggaatcgcagtgaaggaaggaaattccccgaacttgtcctggacaaacctttagatcgggaagaacagccccagctgcgcctcacgttgatagctctggacggcggctcaccaccgagatcaggcacctccgagattcagatacaggtactggacatcaacgacaatgtgcccgaattcgctcaggagctgtatgaggcccaagtgcccgagaacaaccctttgggtagcctggtcattacagtaagtgcaagggacctggatgcagggagctttggcaaagtgtcgtacgctctgttccaagtcgatgacgtgaatcagccattcgagatcaacgccatcacaggggaaattagattgcgcaaggccttggattttgaggagatccagtcttacgatgttgatgtcgaggccactgacggcggtggcctgagcgggaaatgctcccttgtggtgcgggtcctggatgtgaacgacaacgctcctgagctgaccatgagctttttcatcagcctcattcccgaaaaccttcccgagattaccgttgcggtcttctcagtgagcgacgctgattccggccataatcaacaggtcatctgttcaatcgagaataatctcccattcctgctgaggccctcggtagaaaatttctacaccttagtcacggagggggccctcgacagggagtctagagctgaatacaatatcactattaccgtgacggatctgggcaccccccgcttaaagacccagcaatccatcacggtgcaggtttctgacgtgaacgacaacgtcccagccttcactcagactagctacaccctgtttgtcagggagaataactctccggccttgcatatcggatctgtgagcgcgaccgatagagattctggcataaacgcacaggtgacctatagccttttaccaccacaggacccacatctccctctgtcttccttggtttcaataaacgcagacaacggccatctttttgcgctccgaagcctggattacgaggctctgcagtcttttgaattcagagtgggggcaacagacaggggatccccggctctttcctccgaagcgctggtgcgcctgttggtgttggatgccaatgacaactctccctttgtgctgtaccccctacaaaacggcagcgccccttgcaccgagttggtgcccagggcagccgagcccggatatctcgtgactaaggttgtggctgtagacggggatagtggacagaacgcctggctaagttaccagctccttaaagcaacagagctgggcctgttcggagtctgggctcacaacggcgaggtcagaaccgcgaggttgctgagtgaaagagacgcagcaaaacatcggttggtcgtcctggtcaaagataacggggaacctcctagatccgccacagccacactgcatgtactgctagtggacggattcagccagccttacttacctcttcctgaggcggctcccgcacaggcacaagccgattccctcacggtctatctagtggtggctctggcctcggtctcctcactgtttctgttcagcgtgctattatttgtggcagtgcggctatgcagaaggtcaagggctgccagtgtgggaagatatagcgttccagagggaccatttcctgggcaccttgtggatgtatccggaaccggaacactgtcccagtcctatcagtacaaggtgtgcttgaccggaggttcagagaccaacgagtttaaatttctcaaacctataatgccaaattttcctccccagggtacagagcgcgagatggaggagaccccaaccagtaggaattcgttcccgttctcttag

SEQ ID NO: 131140 - DNA, 2385 bp, synthetic construct
  misc_feature 1..2385: note = Description of Artificial Sequence: Synthetic coding sequence
  source 1..2385: mol_type = other DNA
atgatgcaaacaaaggtccagaataagaagagacaggtcgcgttttttatcttgctcatgctttggggggaggtcggaagtgagtcaattcagtactcggttctcgaggaaacagagtcagggaccttcgtggcaaatctcaccaaagatttgggcctgagagtgggagaactggccagcagaggtgcacgggtggtgtttaagggaaatcggcagcatttacaatttgatcctcaaacccacgacctgctgctcaacgaaaaactggatcgggaagagttgtgcgggagtaccgagccttgtgttcttccttttcaagtcctgcttgagaaccctttacagttttttcaggcaagtctgcgtgtgcgggatatcaatgaccatgcccccgaattccctgccagggagatgcttctaaagatttcagaaatcacaatgccaggtaaaattttccccctgaaaatggcccacgacttagatacaggatccaatgggcttcaacggtacacaatttcaagcaatcctcacttccacgtcttaacgaggaatcgcagcgagggcagaaaattcccagaactcgttctggacaagccactcgaccgagaggaacagccacagttgaggctaacccttatcgcccttgatggcggatctcctccgcgatctggtacttccgagattcaaattcaggtcctggatataaacgataatgtcccggaatttgcccaggagttgtatgaagcccaggttcccgaaaacaaccccttgggcagcctcgttatcacggtgtctgcgcgagatctggatgccggatcattcggcaaggtttcttatgccctgttccaggtggacgacgtgaatcagccattcgagatcaacgccatcactggtgagatccgccttagaaaggccttggacttcgaggagattcagtcctatgacgtggacgttgaagccacagatggcggagggctgtccgggaagtgctcacttgttgtgagagtgctggacgtgaacgataatgcccccgaactgactatgtccttttttatctctctcatccctgaaaacctgcctgaaattactgtcgcagtctttagtgtctccgacgccgactccgggcacaatcaacaggtgatatgttccattgaaaataacctcccttttctcctccgtccatcggtcgagaacttctatactctggtaaccgagggcgcgctggaccgagaatctcgcgcggagtacaacatcacgatcacagtgacggacctgggcacgcccaggctgaagacacagcagtctattacagtgcaggtttctgatgtcaatgataacgtgccggcctttacacaaacttcgtatacattgttcgtaagagagaataactctcccgcccttcacatcgggtcagtgtctgccaccgaccgggactcaggcatcaacgctcaagtcacatacagcttactgccaccgcaagatccacatctgccgctaagtagcctagtgtctatcaacgctgataacgggcatctgtttgcattgagatccctggattatgaggccctccaatcttttgaattcagggtgggagctaccgacagagggagtccggcactgtcatcggaggccttagtgagattattggtgcttgatgccaatgacaattcccccttcgtcctgtaccccctccaaaacggaagcgctccctgcacggaactagtgccacgcgcagctgaacctgggtaccttgttacaaaggtggtggctgtggatggggatagcggccagaatgcctggctgtcttaccagttacttaaggccacagagctcggcctgtttggagtgtgggcccacaatggagaggtacggacagctcggctcctctccgaacgcgacgccgctaaacaccggcttgttgtgttagtgaaagacaacggagaacctccgaggtccgccactgctaccctccacgtgctgctggtggacgggttcagtcagccataccttccgcttccagaggctgcacctgcccaggcccaggcagattccttgactgtgtaccttgtagtggcattggcaagcgtctcgtccctgttcctattctccgtgttactgttcgtggcagtgcgcctgtgccggcgctctcgcgccgcctctgtggggcgttattcggtgcctgagggcccatttcctggtcacctcgtggatgtgtcagggactggaaccttgtctcagtcctatcagtacaaagtgtgtctgaccggtggcagcgaaaccaacgaattcaaatttctaaagccaataatgcctaactttccccctcaggggaccgagagggaaatggaagagacaccaacttccaggaactcatttccattctcttag

SEQ ID NO: 131141 - DNA, 1107 bp, synthetic construct
  misc_feature 1..1107: note = Description of Artificial Sequence: Synthetic coding sequence
  source 1..1107: mol_type = other DNA
gggtctccccccagaagcggtaccgcactcgtacgaatattggtgctggatgtgaatgataacgctccggactttgtgaggtcactctataaggtgcaggtccccgaaaattctccggtcggttcgatggttgttagtgtgtcggcacgcgatctagataccggatccaatggggaaattgcatatgctttttcttatgccacagagcggatactcaaaaccttccagattaaccctacctctggatctctgcacctgaaagcccagctcgattatgaggctatccagacctatacacttacaattcaggcgaaagacggaggcggtttgtccggcaaatgtacagtggtagtggacgtgacggatatcaacgataatagacctgagctgctcctcagttcgctgacaagcccaatagcagagaactcaccagagacggtagtggccgtgttcagaatcagggacagggattcgggaaataacggaaagacagtttgtagcattcaggatgatgtgccattcatcctgaagccttcagtcgaaaatttttacacactagtcacggaaaaacctctggatcgcgaaagaaatactgaatataacataactatcaccgtgaccgacctaggaacccctaggctgaagacggagcataacattacagtgctggtctccgatgttaacgataatgccccagcctttacccaaacatcttacaccctcttcgtcagagagaataacagtcctgccctacccataggatccgtctctgcgaccgatagagatagcggcaccaatgcacaagtaatctatagtctcttaccgtctcaagatccacatttacctctcgcttcccttgtgagtattaacgctgataatgggcatctttttgcactgagaagcctggactatgaggctctgcaagctttcgagtttcgcgtcggcgcgaccgataggggtagtccagcattaagctcagaggctctggtgcgcgtgttgtgttggacacctactacaactcgcccctcatgctgcacacggtgccgtacagccccaagaccagccccatcccgctgccctggccgtccctcccgggccacctggtag

SEQ ID NO: 131142 - DNA, 2406 bp, synthetic construct
  misc_feature 1..2406: note = Description of Artificial Sequence: Synthetic coding sequence
  source 1..2406: mol_type = other DNA
atggaggcttcagggaaactgatatgtcggcagagacaggtgcttttctcatttctcctcctcggcctgtcattggccggggcagccgaacctcgctcttacagcgtagtcgaggagacggaaggaagttcttttgtaacaaacctggccaaggatctgggtctggaacagagagagtttagccgacggggtgtccgggtggtatctagagggaacaagctccacctgcaactcaaccaggaaacggccgatctcctgcttaacgagaagttggacagagaagatctgtgcggccatacagaaccatgtgtgttgaggttccaggtgctgctcgagtctccttttgagttttttcaggctgaacttcaagtgatcgacatcaacgatcatagtcctgtgtttttagataagcagatgctggtgaaggtgtccgagagcagcccacccgggactgctttccctctcaagaatgccgaagatctggatatcggccagaataatattgaaaattatattatctcgcctaatagctatttccgagtcctgaccagaaagcgcagtgacggccgaaagtacccagaattagtcttggataaagcattggatcgggaggaggaggcggagcttcggcttaccctaactgccctggacggaggaagcccgccacgatctggcaccgcacaggtgtacatcgaggtggtggatgtcaatgacaacgcacccgaattcgagcaacctttctaccgtgttcagatcagcgaggactcccctatatctttcttggtggtgaaagtgtccgctactgatgtcgacacaggtgtgaacggagaaatttcctattcactttttcaagcttccgacgagatcagtaagacattcaaagttgattttctgaccggcgaaatccgcctaaagaagcaattggattttgaaaaatttcaatcttacgaggttaacatcgaggcccgggatgcaggtgggttcagcgggaaatgcaccgtgttaattcaggtgatcgacgtcaacgaccatgctccagaggtaactatgagcgcttttaccagtcccatccctgagaacgcacccgagactgtggtggctctctttagcgtcagtgatctggattccggagaaaacggcaagatatcctgctccatccaggaggaccttccttttctcctcaagtcctccgtaggaaacttttacacactgctgactgaaacacccctcgatcgtgagtcccgggcagaatacaacgtcaccattaccgttacggacctgggcactcccagactgactactcacctgaatatgactgtattagtgagtgatgttaatgacaacgctcctgcattcacccagactagttacacactttttgtacgggagaacaatagtcccgccctgcatattgggagtgtgagtgctactgaccgcgatagcggtaccaatgcccaagtcacgtacagtctcctccctccccaggaccctcatctgcctctcgcctctcttgtatcaattaataccgataatgggcatctgtttgcattgcggtcccttgactacgaggcactgcaggcatttgagttcagggttggggcttccgatcgaggctcaccagcattgagcagcgaggcgttagttagggtgttggtgctcgacgctaacgacaattccccctttgtactgtaccctctccagaacggtagcgccccctgcactgaacttgttcctcgagcagccgaacctgggtacctcgtcaccaaggttgtggccgtcgacggcgactcgggccaaaatgcttggctgagctatcaactgttaaaggcaacagaaccgggactattcggcgtgtgggcgcataatggggaagttagaacggcacggctcttaagcgaacgcgatgccgccaaacagcggctggtggtactggtgaaggataatggagagcctccttgttccgccactgccacacttcacctgttgttagtggacggcttcagccagccgtaccttcctttgcctgaggcagccccagcccaaggacaggccgactcactcacagtttatctcgtcgtcgctttggcatcagtatcctccttgttcttgttcagtgtgttgctattcgttgccgtgctcctctgtcgcagatctcgtgcagccagcgtgggtagatgcagtgttccagagggtcctttccctggccatctcgtcgacgtgcgaggtacgggatccctgtcacagaactaccagtacgaagtatgcttagcagggggctcggggaccaatgagttccaattccttaagcctgtactgcccaacattcaggggcactccttcggccccgagatggagcagaactctaactttcggaatgggtttgggttctccctccaactgaagtag

SEQ ID NO: 131143 - DNA, 2472 bp, synthetic construct
  misc_feature 1..2472: note = Description of Artificial Sequence: Synthetic coding sequence
  source 1..2472: mol_type = other DNA
atgaaaattcagaaaaagctgacaggatgctctagactgatgctcctgtgcctctctctcgaactccttctcgaggccggagctggcaacattcattactccgtgccagaggaaaccgacaaaggctcctttgtcgggaatatcgcgaaggatcttggcctgcagccccaggaactcgcagatggcggggtacgaatcgtctccaggggacgtatgccattgtttgccctgaatccaaggtcgggctccctgatcaccgctagacgcatcgatagggaggagctttgcgctcagtctatgccctgtctcgtgtctttcaacattttagtggaggataaaatgaagctcttccccgtcgaagtggaaattatcgatataaacgacaacacccctcagtttcagctggaagagctggagtttaaaatgaatgagatcacaacgcccgggacgcgcgtatccctcccttttggccaagacctggatgtgggcatgaacagtctgcagtcatatcagttaagttctaatccccatttcagtctcgacgtacagcagggggcggacggcccacaacatcctgagatggtgcttcagtcccccctagacagagaggaggaggccgtgcatcatctcatactcacagccagtgacgggggagagcctgtcaggagtgggaccctgcggatctatattcaagttgtagacgccaatgataaccccccagctttcacgcaggcacagtatcatatcaatgtgcccgaaaacgtccctttgggtacccaactcctcatggtcaacgccacagatccagacgaaggcgcaaatggcgaagtgacgtatagcttccacaacgtggatcatagagtggcccagatatttaggcttgacagttacacaggagaaatcagtaacaaagagccgctggattttgaggaatacaaaatgtatagtatggaggttcaagctcaggacggagctgggctgatggctaaggtgaaggtgttaattaaagtgttggacgtcaacgataatgcgcccgaagttaccattacatcagtcacaacagccgttccagagaacttcccaccagggactatcattgctctaatcagtgtgcatgatcaagacagtggggacaatgggtatactacatgttttattcccggcaacctgcctttcaaactggagaagcttgtcgacaattactatcgcctggtgactgagcgaaccctggaccgcgagttgatcagcggatacaatataaccatcaccgcgatcgatcaagggactcccgccctgagtacagagacacatattagcctgctggtgacggatattaatgataacagtccggtctttcaccaggattcctatagcgcttatatcccagagaacaacccgcggggtgctagtattttctctgtgagagcccatgatctggattcaaatgagaacgcccagatcacatacagccttattgaggacactattcagggcgctcccttgtccgcctacttgtccattaacagcgataccggcgtgctctacgctctgcgatcgttcgactacgagcagtttcgcgatatgcagttaaaggttatggcccgggatagcggcgatcctcccttgagctccaacgtgtctctcagtttgttcctcctggaccaaaatgataatgcccccgaaatcctctaccccgcgctgccgactgacggctctacaggagtcgagttggccccactttccgctgagccagggtacctggtcacgaaagttgtggccgtagacagggacagtggccagaatgcttggctctcttaccggctcctgaaggcttccgagcctggattgtttagcgtcggcctccatactggggaagtccggaccgcaagggctctgctcgacagagacgcactgaaacagagtctggtggttgctgtacaggaccacggacagccacccctgagcgcaaccgtgactctgactgtcgcggtcgcagatcggatctcagatattttggcagatctgggctcccttgagccgtccgctaaacctaatgactctgacctgacactgtaccttgttgttgctgccgcagccgtgtcttgtgttttcctggccttcgttatagtgttgttggctcacagactaagaaggtggcacaagagccggctcttacaggcatccggcgggggactcgcctccatgccgggatcacacttcgtgggagtggacggtgtgcgagctttcttgcagacatacagccacgaagtatcactgacagcagattccagaaagtcccatcttatctttccacagcccaactatgctgacaccctgatcagtcaggaatcatgtgagaaaaagggattcttaagtgccccgcagagcctcctggaggataaaaaagagccgttttcacaggttaacttctgtgatgagtgtatttcttacctcgagaagaataattcctag

SEQ ID NO: 131144 - DNA, 2796 bp, synthetic construct
  misc_feature 1..2796: note = Description of Artificial Sequence: Synthetic coding sequence
  source 1..2796: mol_type = other DNA
atgaaaattcagaagaagctgaccggatgtagtagactcatgctcctgtgcctttcactggagctcctcttagaagccggcgcggggaacattcactacagcgtgccggaggagactgataaggggtcatttgttggaaatattgcgaaagacctcggactgcaaccccaggaactggcagacggcggcgtgcggattgtttctcggggaagaatgccactgttcgctctgaatccgagaagcggctccctgatcacagcccgcaggatcgatcgagaagaattgtgtgctcagagcatgccgtgtctggtttcctttaatattctagtagaggacaagatgaagttgttcccagtcgaagtggagattatcgacattaatgacaataccccacagtttcagctggaggaactggaattcaagatgaatgaaatcactacgcccggaacccgcgtgtccctgccatttggccaggatctcgacgtaggaatgaattcactgcaatcttatcagctcagctctaacccgcattttagtctcgatgtccagcaaggtgctgatggcccgcagcaccctgaaatggtgcttcagagtccgctggaccgggaagaggaagctgtacaccacttgattctcaccgccagcgatggaggggagcccgtgcgttccggcaccctccggatctacatccaggtggtggacgctaatgacaatcctcctgcctttacacaggcccagtatcacatcaacgtccccgaaaacgtgccgctggggacacagttactgatggtcaacgccaccgacccagacgagggcgccaatggcgaggttacctatagcttccataacgtcgaccatagagtggctcaaatctttcgactggattcctacacgggcgagatctcaaataaagagcccctagatttcgaagagtacaaaatgtatagtatggaggtgcaggctcaggacggtgccggtctgatggcaaaagtcaaggttctcataaaggtgctggacgtgaatgataatgctccagaagtcaccatcacttcagttactacagccgtccccgagaacttccctccgggcaccattatcgccctcatctctgtgcatgatcaggatagtggagataacggctataccacatgttttatccctggcaacctcccattcaaactagagaaattggtcgacaactactacaggcttgtcacagagcgcacccttgaccgcgagttgatctcgggttacaatatcacgatcaccgcgatcgaccaaggaacgccagcgcttagcacagaaacccacatttctttgctggttacagatattaacgacaatagccccgtattccaccaggatagttactccgcatacattcccgagaataatccaagaggggcctctattttctcggtgagggctcatgatctggactctaacgaaaacgcacagatcacgtatagcctgatcgaagacactatccagggggcacctctgtccgcttacctgtctattaactcggataccggggttttgtacgctctgcgctcattcgattacgagcaatttcgtgacatgcagctgaaggtcatggcgagagacagcggcgatcctccactcagttccaatgtaagtctcagcctgttcctgctggaccagaacgataacgcccccgagattctgtatccagccctaccgaccgatggctccacaggcgtggaactcgcccctctaagcgctgagcctggctacttggttacaaaggttgtggctgtggatagagactccggtcagaacgcctggctgtcttaccgcctgttgaaggcctccgagccaggtttgttctctgtaggtttacatactggcgaagtaagaactgcaagggccctacttgatcgggacgcactcaagcagagcctcgtggtggcagttcaggaccacggacagccaccgctctctgccaccgttacactgactgtggccgtggctgatcgcatcagcgatatcctcgcagatcttggcagcttagagccctcagcaaaacctaatgacagcgacctaacgctctatctcgtcgtagcggccgcggccgttagttgcgtatttttggcattcgtcatagtgctgctggcacaccgcttgagaagatggcacaaaagcaggcttttacaagccagcggtgggggcctcgcttcaatgcctggatcacacttcgtcggagtggatggcgtgagggcattcttacagacttattctcacgaggtgtccttaaccgccgacagtcgcaagagccatctgatttttcctcagcccaactatgccgacaccttgatttctcaggaatcatgcgagaaaaaagggtttttatccgccccccaaagtctactggaagacaaaaaggagccgttctcacagcaggccccccccaacaccgattggagattttcccaagcccagcgcccgggcacttcaggtagtcaaaatggcgacgatacgggaacatggccaaacaaccagtttgacaccgaaatgttgcaggctatgattctggcctccgccagcgaggccgccgatggctcttcgaccctcggcggcggggcggggacgatgggtctgtccgctcgctatggaccgcagtttacccttcaacatgttccggattatcgacagaacgtttacatccctggcagtaatgctacactaacaaatgccgcagggaaaagagatggaaaggcgccggctggagggaatggtaataaaaagaaatctggcaaaaaagagaaaaagtag

SEQ ID NO: 131145 - DNA, 2811 bp, synthetic construct
  misc_feature 1..2811: note = Description of Artificial Sequence: Synthetic coding sequence
  source 1..2811: mol_type = other DNA
atggccgcccagcgaaaccgcagcaaggaaagcaaggattgttcgggcctggtgttactgtgcttgttcttcggaataccatgggaagccggagcccgacagatttcttattcaattcccgaggaactggaaaagggaagttttgtgggaaacataagcaaagatctgggcttggcaccccgggagttggccgagcgcggcgtgagaattgtatctcgcggacgaacccagctgttctccctgaacccaaggtctggctccctgataaccgcagggcgtatcgatcgggaagaactgtgcgcacagtcggcccgctgcgtggtgtcgtttaatatcctggtggaggatcgcgttaaactcttcggcatcgagatcgaggtgactgacatcaatgataacgcccccaagtttcaggctgagaaccttgacgtgaaaatcaatgagaacgtagctgccggaatgcgcttccctctcccagaggccattgacccggatgtaggggtcaattcattgcaaagttatcagttatctccgaacaagcacttcagtcttcgcgtgcagagccgggcgaacggggtaaagtaccctgagctcgttctggagcattccctcgatcgggaagaggaggccattcaccatctggtgcttaccgcctctgatggcggagatccgctgcgcagtggtactgtgcttgtgagcgtcactgtgttcgatgcgaatgataatgccccggtgttcaccctccctgaatatcgggtaagcgttccagagaacttaccagtgggcactcagctgctgactgttactgcaacagatagggacgagggcgccaatggggaggtaacatactcatttagaaagctgcccgacacacaactgctgaagttccagctgaataagtacacaggggaaattaaaatttctgaaaacttagactacgaagaaactggcttctacgagatagagatccaagctgaggacggcggagcttacctggctactgcgaaagttctaattacggtggaggatgtcaacgataattccccagagctgacgattaccagtctcttctctcctgtcacggaagactctcctttgggaaccgtggtcgccctgttaaatgtccatgacttggattctgagcagaacgggcaggtaacttgctctatcctggcctatctcccattcaaacttgagaaatccattgatagctactacaggctggttatccaccgcgctctggatagggaacaggtctcctcatacaatattacagtcaccgcaacagatgggggcagcccgcccctctctactgaagcccactttatgttgcaggtggcagacattaatgacaacccccctaccttttctcaggtctcctattttacatacatccccgaaaataatgccaggggagcgtctattttttctgtgaccgctctggatccagactctaaggagaatgcacagattatctattcgctagcagaggacacaattcagggggttccgctatcaagttacatcagcatcaacagcgatacaggcgtgttatatgccctacgctctttcgattacgagcagttccacgaactgcagatgcaagtaactgcctcagattccggcgacccccccctctcctctaatgtgtccctctctcttttcgtcctcgatcaaaacgacaacgctcctgagatcttgtaccctgcacttccgactgatggcagcacaggtgttgaactggccccgagaagcgcagagccagggtacctggtcacaaaagtggtggccgtggacagggatagtggacaaaatgcttggcttagttatagattactcaaggcatccgagcccgggctctttgccgtgggcgagcacaccggcgaggtcagaacagctagagccttacttgaccgagacgccctgaagcaatctctcgttgtggccgttcaagaccatggccagcctcccttgtctgctaccgtgacactgaccgtcgcagttgcagattcaattccccaagtcctggccgatctcggaagctttgagtcaccagccaactcagagacatctgatctaaccctatacctggtggtggcggttgctgcagtgtcgtgtgtgttcctggctttcgtcatcgttctcttggctcacaggctgagaaggtggcataagagccggcttttgcaagcctccggaggcggacttacaggtgtgtcagggagccactttgtgggcgttgacggcgtaagagcgtttctgcagacctattcccatgaggtgagcttaaccgccgattccagaaagagtcacctgatttttccccagcctaactatgccgataccttgatcagccaggagtcttgcgagaaaaatgatcctctgtcgttactggatgactctaaattcccaatcgaggatacaccactcgtaccccaggcgcccccaaacaccgattggaggttctcccaagcccagcggcccggtacctccggaagtcagaatggtgacgacacagggacttggcccaacaaccagtttgatacggaaatgctgcaggccatgattctggctagtgcctctgaggccgcggatggttcttccactctcggcggtggcgcagggaccatggggctctccgccagatacggcccccagtttactctgcagcatgttcctgactacagacagaatgtttatatacctgggagcaacgccactttgacaaacgcggcaggaaagagggacggaaaggctcccgccggtggcaacggtaataagaagaaaagcgggaaaaaggagaaaaaatag

SEQ ID NO: 131146 - DNA, 2808 bp, synthetic construct
  misc_feature 1..2808: note = Description of Artificial Sequence: Synthetic coding sequence
  source 1..2808: mol_type = other DNA
atggcaaatcgtctgcagcggggcgatcggagtaggcttctcctcctgttatgcatcttcctgggaaccctacgggggtttcgtgctcggcagatacggtactctgtgcccgaagagaccgagaagggcagcttcgttggtaatatcagcaaggacctcggactggaaccccgcgaactggccaaaaggggggttaggatagttagccggggcaagacgcaactgtttgctgtgaacccaagaagcggaagcctgatcactgctggcaggattgatcgcgaagaactctgtgagacagtttcatcatgttttcttaacatggagttgcttgtcgaagataccctgaaaatatatggtgtggaagtggaaataatagacatcaatgataacgcccccagcttccaggaagacgaagttgaaattaaggtgagcgaacatgccataccgggtgcccggttcgccctacccaacgcgagagatcctgacgtcggtgtgaacagtctgcaatcctaccagctgagccccaacaactatttcagtctgcagctgcgcggaagaacagatggcgccaagaatccagagttggtccttgaagggagtctggatcgagaaaaggaagcggctcacctcctgctgctgactgccctggacggaggagatccgatccggaagggcgccgttcccatccgggtagttgtacttgatgtcaacgaccatattcctatgttcacccagtcagtgtaccgcgtttccgtacctgagaacatcagctccggcacccgcgtgctcatggtgaacgcaactgacccggacgaagggatcaatggtgaggtgatgtactcctttaggaatatggagagcaaagctagcgaaatcttccagctcgactcacagaccggtgaggttcaggtgcgaggatcacttgacttcgagaaatacaggttttacgagatggagatccagggacaggacggtgggggcctgttcacaacaacgacaatgctaatcactgttgtggatgtcaacgacaacgcgcccgagatcactatcaccagttctatcaattctattttagagaatagccccccgggaaccgtgatagccctgctcaacgtgcaggaccaagactccggcgagaacgggcaagtctcatgttttattccaaatcacctgccgttcaagttggagaagacttacggcaactactacaaattgatcacttctcgggttcttgatcgggagttggtgcagtcgtacaatattacgctcacagccacagatcaggggagcccccctctgtcagctgagacccacgtgtggttgaatgtggcggatgacaacgacaatccgccggtgtttccccattcctcctattcagcatatatccctgagaataacccaaggggggctagcattttttcagtgacggctctagacccagactctaagcaaaatgcattggtaacatattctctcaccgatgacacagttcagggggttcctctttcatcctacgtgtcaataaactccaacactggtgtgttgtacgcactacaatccttcgactatgaacaatttagagacctggagttgcgcgtgatcgcccgggatagtggcgaccctcctctgagcagcaatgtgagtctgtcactcttcgtgcttgatcagaatgataacgcccctgagattctctatcctgccctccccaccgatggtagtaccggcgtcgagcttgccccccggtctgcggagccaggctatttagtgactaaggtggtcgcggtggacaaagacagcggacagaacgcatggttgtcctacaggctactcaaggcctccgagccgggcctatttgccgtgggagagcacacaggagaggtaagaactgcaagggccctattggaccgagatgctctgaaacagtccctggtggtggccgtgcaagaccacggtcaacccccgttgtcggcaacggtgactctcaccgtggcagttgcagattctattcccgaggtgctcgcagacttgggatccctcgagtctcttgctaactcggagacatccgacctgtcactgtacctagtggtcgccgtcgctgctgtctcttgtatctttctcgtctttgtaatcgtgcttcttgctctcagactgtggcgctggcacaagtcgcgtctgctacaggccagcgaagggggcctcgcggggatgcctaccagtcattttgtgggcgtggacggcgtgcaggcattcctgcagacttattcacacgaggtaagtctgattgcagattcgcagaagtctcatcttatttttccgcagcccaactacggagatacgctcattagccaggaaagttgcgagaagtcggaaccactcctgatagccgaggactcagccattatccttggaaaatgcgaccccacaagcaatcagcaggcacccccaaacacagactggcggttctcccaggcccagagaccggggacctctggaagccagaacggagatgatactggcacttggcccaacaaccaatttgatacggaaatgctgcaggccatgatccttgcctccgcctccgaggcggctgacgggagtagcaccctaggtggcggcgccgggacaatgggcctgagcgcaagatatgggcctcagttcaccctgcagcacgttcccgactacaggcagaatgtctatatccccgggagcaatgctacactaaccaacgcagccggaaagcgggacggcaaggcgccggccggggggaacggcaacaaaaagaagtctggcaagaaggaaaaaaagtag

SEQ ID NO: 131147 - DNA, 2253 bp, synthetic construct
  misc_feature 1..2253: note = Description of Artificial Sequence: Synthetic coding sequence
  source 1..2253: mol_type = other DNA
atggccaataggttgcagcgaggagatagatcaaggctgctcctgctcctgtgcatatttctggggaccctgcgggggttcagagctcgacaaataagatactccgtgcctgaagaaaccgagaagggctcttttgtggggaatatctctaaggatcttggcctggagccccgagaacttgctaagagaggcgtgcgcattgtgtctcgtggaaagacacagttgtttgcggttaacccccggtcagggtcacttattaccgctggacgcatcgaccgcgaagagttatgtgaaacagtgtccagctgttttctaaacatggagctcctagttgaagatacactgaagatttatggggtggaagtggagattattgatattaatgacaatgccccatctttccaggaggatgaggtcgaaattaaagtgtccgaacacgccattcccggagcccggttcgcactgcccaatgcccgtgatcctgacgtgggggtcaatagcttacagagctaccagctgtctcctaacaactatttctccctgcagctcaggggacgtacagacggggccaagaaccctgaacttgtgcttgaagggagcctggacagggagaaggaagccgcgcacctgctgttgcttactgccttggatggcggtgatcctattcgcaaaggagcggtacctatcagggtcgtggtgctggatgtgaacgaccacatacctatgttcacccagagcgtgtatagggtgagcgtgccagagaacataagctctggaacaagggtcctcatggtgaacgcaactgatcccgacgaaggcataaacggcgaggttatgtactccttccgcaatatggaaagtaaagcctctgaaattttccagctggattcccagacaggggaagtccaagtcaggggtagcctcgacttcgagaagtatagattctacgaaatggaaatccaggggcaggacgggggcggtctctttacaaccaccaccatgcttatcacagttgtggacgtgaacgacaatgcgccagaaatcactattacgtcctcaatcaactcaattttggagaacagccccccgggaactgttatcgcactcctgaatgtgcaggatcaggacagtggagaaaacgggcaggtgagctgtttcatccccaatcacctcccttttaagctcgagaaaacgtacgggaattactataagcttattacttcccgggttctcgatcgcgaattggttcagagttataacattactctgacggctactgaccagggatcccccccattgagtgctgaaacccacgtatggcttaatgtggcagacgataatgataacccgcccgtattcccgcacagcagttacagtgcctatattcccgagaataaccctcgtggtgccagcatcttttcagtgaccgctctcgatcccgactccaagcagaatgccctagttacctactctctgacagatgataccgtacaaggagttcctctttcttcctatgtgagtatcaacagtaacactggagtcctgtatgcattgcagtcctttgactatgagcagtttcgcgatctggaattgcgcgttatcgccagggattcaggggaccctccccttagcagcaatgtgagtctgagtctgtttgtgctggatcagaacgataatgctcctgagatactctaccccgctctgcccacggatggttcaacgggagtcgagcttgcaccccggtcagccgagccagggtacttagtgactaaggttgttgccgtggataaggatagcggacaaaatgcgtggttatcataccggctacttaaagcatcagagcccgggctgttcgccgtgggggaacacaccggggaacaggcacctcccaatactgattggcggttttcccaagcccagagacctggaacctcagggtcccagaacggggacgataccgggacttggcctaacaaccagttcgataccgagatgcttcaggcaatgatacttgccagcgcctctgaagcagctgacgggagctctactttgggaggaggcgcgggtacgatggggctgtctgcccgatacggccctcaattcaccttgcagcatgtgccagactatcggcagaatgtctacattcctggtagcaacgcgactctgacaaacgcggctggcaaacgggacggtaaagcccccgccggcgggaatggtaacaaaaagaagtctggcaaaaaggagaagaagtag

SEQ ID NO: 131148 - DNA, 2799 bp, synthetic construct
  misc_feature 1..2799: note = Description of Artificial Sequence: Synthetic coding sequence
  source 1..2799: mol_type = other DNA
atgatccccgcccgcctgcatcgggattataagggcctggtccttcttggtatcctgctgggcaccctatgggagacaggatgcactcagattcgctacagtgttccagaggagcttgagaaaggcagtagagtcggagacatctcacgcgatctcgggctagagcctcgagaactcgcagaacgaggggtgcgaattatcccccgtggccgtactcagctctttgctctcaaccctagatccggctccttggtgaccgctggcagaatcgacagggaagaactatgcatgggagccatcaaatgtcagctgaacctagacatcctgatggaagataaagtgaagatttatggggtggaggtggaggtaagggatatcaatgataacgccccttacttcagagagtctgagcttgagataaaaatctctgagaacgccgcgactgagatgagatttcccctccctcatgcctgggacccagatataggcaaaaactcactgcagtcttacgaactctcaccaaacacccatttctctctcatcgttcagaacggcgccgacggttcaaagtaccctgaactcgtgcttaagagagccctggaccgagaggaaaaagccgcccaccacctggtgctgaccgcaagtgatggtggcgatccagtgagaaccggaaccgcccgaattagggtgatggttctcgatgcaaatgataatgccccagctttcgcgcagccagagtatcgtgctagcgtgccggagaacttggccctggggacccagctcctggttgttaatgctacagatcctgacgagggcgtaaacgcagaggtaagatatagctttcgatatgtggacgacaaagccgcacaggtgttcaagcttgactgtaacagcggaacaatcagcaccatcggggaactggatcatgaggagtcagggttctatcaaatggaggtgcaagccatggacaacgcaggatattcagcccgggctaaagtgcttattactgtgttagacgttaacgacaacgcaccagaggtcgtgctgacaagtctggcttcctctgtgcctgagaattctccacgaggaactttgatcgctcttctcaacgtcaatgaccaggatagcgaagaaaatggtcaggttatttgcttcatacagggcaatctcccctttaaactcgagaaatcttacggcaactattactcgcttgttacagacatcgtgctggatcgcgaacaggtaccatcttataacattaccgtgacagctactgacaggggtaccccacccttgtccactgaaacccacattagcctgaacgtcgccgataccaacgataatcctccggtgttcccacaggcatcctacagtgcatacattccggaaaataatccaaggggagtcagcctggttagcgtaacggcccacgaccccgattgcgaagaaaatgctcagattacgtattctctagcagaaaacactattcagggcgcgagcctaagcagttacgtctccatcaattctgacaccggagtactgtacgctctgagctcctttgattatgagcagtttagggacctacaggtgaaagtgatggcacgcgacaatggtcaccctcccttatcttcaaatgtgagcctgtccctctttgtcctagaccagaacgacaacgccccagagatattatatcctgcactcccaaccgatggttcaaccggcgtggaactggcgcccaggtccgcggagccaggctaccttgtcaccaaggtggtggccgttgacagagattcaggccagaatgcttggctgtcgtaccggctgctaaaagcctccgaaccaggcctgttttctgttggcctccacacaggagaagtgagaacagctcgcgccctgcttgatcgggatgccctgaagcaatcgttagtggtggcagtgcaggaccacggccagcccccacttagcgctacagtcacgctgacagtggccgttgccgacagtatcccgcaggtcctagcagatctgggctccttggagtcacctgctaatagtgagacaagcgatttaaccctctacctcgtggtcgctgtcgctgccgtgagctgtgtgttcctagccttcgtgatcctgctgctggcactgcgacttaggaggtggcataagtctagacttctgcaggcctcgggcggcggactgacgggcgcccctgctagtcacttcgttggcgttgacggcgtgcaggccttcctgcaaacctactcccacgaagtgtcacttaccactgatagccgcaaatcgcatcttattttcccacagccaaactatgcagacatgctcgtgtcacaggagagtttcgaaaagagcgaacctctgctgctgtctggtgacagtgtcttcagcaaggattcacatggactgatcgaacaggcccctccgaacaccgactggaggttctcacaggctcaacgaccaggaacctcaggcagtcagaacggagatgacactggtacgtggccaaataaccagtttgacaccgaaatgctgcaggctatgattcttgcatctgccagtgaagcagccgacggctcttccaccctgggtggaggcgcagggacaatgggactaagcgccagatatggaccacaattcactctccaacatgtgcctgattaccgccaaaacgtatacattcccggttccaacgccaccttgaccaacgctgctggaaagcgcgatggaaaggcccctgccggcggtaacggtaataagaagaaaagcggcaagaaagagaagaaatag

SEQ ID NO: 131149 - DNA, 2799 bp, synthetic construct
  misc_feature 1..2799: note = Description of Artificial Sequence: Synthetic coding sequence
  source 1..2799: mol_type = other DNA
atggctgccctgcagaagctgccacactgccggaagctggttctactgtgttttctgctggctacactttgggaggcacgcgccggccaaatccgctattccgtgcgcgaagaaatcgataggggcagctttgtaggcaatatcgcgaaggacttgggacttgaaccgctcgctctggcggaacaaggggtgcgaatagtgagtagaggtaggagtcaactcttcgcactgaacccaaggagtggctcactggtcacggcaaacagaattgatagggaggagttgtgtgcccaaagtgcgccttgcttactgaacttcaatattctcctggaagacaaactgaccatctatagcgtggaggtcgaaattactgacataaacgacaatgccccaagatttggcgtcgaggagctggagctgaagatctcagaaaccacgacacccggattccggattccactgaaaaacgcccatgacgcagatgtcggggagaacgcgctgcagaagtatgcgctaaacccaaacgaccacttcagcctggacgtacgcaggggagcggatggcaataaatatccagagctggtccttgaacgcagtttggaccgagaagaggaggctgtgcatcaccttgtcttggtggcttctgatggcggcgaccccgtcctatcgggaacgtcaaggatctgcgtaaaggttttggatgccaacgataatgccccggtattcacgcagcccgagtaccgaataagtatacccgaaaatacactggtgggcactaggatcctcactgtcacggctaccgacgctgacgagggatactacgcccaagttgtgtacttcctagaaaagagtcccggcgagacaagcgaggtctttgaattaaagtctacctccggcgagttgacgatcattaaggatctggattacgaggatgccaccttccacgagattgatattgaggctcaggatggccccgggctcctgaccagagccaaggtgatcgtgacagtattggatgtaaacgataatgccccagagttttatatgacaagcgcaacttcctccgtctctgaagatagcctgccagggaccattatcggattgtttaatgtgcatgatcgagatagtggccaaaacgcttttactacctgtagtctgcccgaggacttaccattcaaactggagaagtccgtagataactattaccgtctcgtgaccacgcgcgccctagacagagaacagttcagtttttacaatatcaccttgacagccaaggatggcggcaatccttccctttctacggatgctcatatactgcttcaagtcgccgatattaacgataatgccccagccttttcaagaacctcatactcaacctatatcccagagaataaccctagaggagcctccgtgttctccgtgacagcccacgaccctgattcaaatgacaatgcgcacgtgacttactcatttgcagaagacacggtccagggagccccattgagcagttatatttcaattaattcagatactggcgtgctctatgccctgcgatcattcgactacgagcagctgcgtgaccttcaggtctgggtgatagcccgggacagcggcaatccccctttgagcagcaacgtgagtctgtcacttttcgtcctggatcaaaatgacaacgcacctgaaatcctataccccgccttccccaccgacgggagtactggcgtcgaactagcccctagaagtgcggagccgggctatctggttacaaaagtggtcgccgtagatcgcgattctggtcagaacgcctggctcagctatcatttgttaaaggcctctgagcctggacttttcagtgttggactgcacaccggcgaggtgcgcactgcacgtgcccttttggatcgagacgcccttaaacagagcctggtggtggcaatccaggaccatggacagccgcccctcagcgccaccgtaacgctgacggtcgctgtagctgaccgaatccccgatattctggccgatctgggctccctggaaccgtctgctataccaaatgattccgatctgacactctacctcgtcgttgccgtcgcagccgtttcctgtgtgttcctggcattcgtgattgtactcctggcccatcggctccggagatggcacaagtccaggctgctgcaagctagcggagggagcctaacaggcatgcaatccagtcacttcgttggcgtggatggcgtcagggcttttctgcagacttatagtcacgaggtttctctcacggcggattcacggaagtctcatctgattttcccacagcccaattatgccgatacattaatctcacaggagtcttgtgagaaaaaagatttcctctctgccccccagtcgcttctggaggaagagagagaggaaacctttagccagcaggctccaccgaatacggactggcggtttagccaggcccaacgaccgggtacatccggatctcagaatggagatgacaccggcacatggcccaataatcaattcgacacggagatgctgcaggcgatgatcctcgcaagtgcttctgaggcagcggacgggtcaagtaccctcgggggcggtgctggcacgatgggtctatcagctcgttacggcccacaattcacactgcagcacgtgcccgattaccgacaaaatgtgtatatacccggctccaatgcaacactgaccaacgctgctggcaaacgcgacggaaaggcaccggccggtggaaatggaaataaaaaaaagtctggcaaaaaagagaagaagtag

SEQ ID NO: 131150 - DNA, 2799 bp, synthetic construct
  misc_feature 1..2799: note = Description of Artificial Sequence: Synthetic coding sequence
  source 1..2799: mol_type = other DNA
atgaccaactgtctgtcattccgcaatggaagaggactggcattgctttgcgctctgttagggactttgtgcgagactggttctgggcagattagatattccgtatctgaggaactggacaaaggttcatttgtcggtaatatagcaaatgacctcggtctggaacctagggaactagccgaacgtggcgtcagaatagtgagccgcggtagaactcagttgttctcactgaatcctcaatctggatccctcgtgacagctgaaaggattgaccgagaagaactgtgcgcacaaatacccctctgtcttgtcaagattaacatccttgttgaggataaactgaagatttttgaggttgagatagagatcaaggacattaatgataacgcgccgaactttcctacggaggagctggagatcaaaatcggagagctaacagttcccggaacacggtttcctataaaaactgcattcgaccccgatgtcggcatcaactccctacagaattataaactgagccctaatgattattttagtctcgccgtgaatagtgtgagcgagggtgcaaaatacccagagcttgtcctcgagcgggctcttgatagagaaaaaaaagagatccaccagctcgttctagtggcgagcgacgggggagatcccgtccacagtgggaacctccatattcaggtgatcgtattggatgccaacgataatccaccgatgttcacccagccagaatacagggtgagcgtgtgggagaatgtgcccgtgggtacacggttattaactgtcaatgcgacagatcccgacgaagggttcaatgcgcaggtgtcgtacatactagacaagatgcccgggaaaattgctgaaatctttcacttgaacagcgtatcaggggaggtgagtattctaaagtcgctggattacgaggacgctatgttctacgagattaaaatcgaagcccaagatgggcccgggctactcagtcgggccaaaatcctggtgacggtccttgacgttaacgacaacgcacccgagatcacaattaccagcctgacatcttccgtgccggaagagggcaccgtcggaagggaaatcgctctgattgacgtccatgacagggacagcggacaaaatgggcaagtggaggtttttgtcctaggcaatctgccttttaagctcgaaaaaagtatcgatcagtactaccggctggtcacagctacatcgttggatcgcgagcagataagtgagtacaacatctccctgcgagcttccgacggtggcagccctccactttcaaccgaaacacacattactctgcacgtgatagatattaatgataatccaccaacttttccgcacctgtcctatagcgcgtacattcccgagaacaacccccgcggggcctctatctttagcgtgaccgcacaagatccagatagcaataacaacgctagaatcacgtacgccttgactgaggataccctccagggagctcccttgtccagttttgtctcaattaacagcaatactggagttttatatgcactgcgatctttcgactacgaacagtttcgcgaccttaaattgctggtgactgcgtcagattctgggaatcctcccttgtcgtctaacgtatcactgaatctctttgttttagatcaaaacgacaatgcacccgagattctatatcctgcccttcctacggacgggagcaccggggtcgagctcgctcctagaagcgccgagcccggatacctggtgaccaaggtggtagcagtcgaccgcgactccgggcagaatgcatggttgtcgtatcgtctgttaaaggccagcgagcccggactgttcagcgtgggcctccacacaggcgaagttcgaaccgcccgggcactgctcgacagggacgcactgaagcagagccttgttgttgctgtgcaagatcacggacagcctcctctcagcgccacagtgactttgaccgtcgccgtagcagatcgcataccggatattctagctgacctgggatcccttgaacctagtgccaagcctaacgattcagatcttacgctataccttgttgttgcggtggccgctgtatcttgcgtgttcttggcttttgtcatcgttctcctggcactgaggttacggcggtggcataaaagtcggctcctgcaagcaagcgggggcggattggcttctacaccaggaagtcattttgttggtgccgatggggtgcgggcgtttctgcagacttatagtcatgaggttagcctgactgcggatagtaggaaatcgcacttgatattcccgcagcctaattatgccgatactctaatttcccaggagtcctgtgagaagagcgagcctctcttgataacccaggatctcctggagatgaaaggcgattcgaaccttttacagcaagcacctcctaatacagattggcggttttcccaagctcaacggccagggacttcaggctcccagaatggagacgatactggaacttggccaaacaatcagttcgatacagagatgctgcaggccatgatcttggccagcgccagtgaggccgccgatggcagctcaacattgggcgggggggctggtacgatggggctgtcagctaggtatggcccacaattcaccctgcagcacgttcctgattaccggcagaacgtctacatccccggcagcaacgcaacattgactaacgcagctggcaagcgggacgggaaggccccggctggcggtaacggaaacaaaaagaaatctggtaagaaggaaaagaagtag

SEQ ID NO: 131151 - DNA, 2796 bp, synthetic construct
  misc_feature 1..2796: note = Description of Artificial Sequence: Synthetic coding sequence
  source 1..2796: mol_type = other DNA
atggcttccccccccagggggtggggctgtggggaactgttgctcccttttatgctgctgggcaccctgtgcgagccaggctctggacagatccggtattccatgccagaggagctggacaaaggtagcttcgttgggaacattgccaaagacttgggcctggagccccaagagctcgcggaacgcggggttaggatcgtatcccgcggacgtacacagctcttcgctcttaacccccgatccggatccctggtaaccgcaggtcggatcgatcgtgaagagctttgcgctcaatcacccctttgcgtcgtgaattttaacattctcgtggaaaataagatgaagatctacggagtagaagtagaaattatagacattaacgataacttcccccggtttagagacgaggagttgaaggttaaggtgaacgagaacgctgctgccggcactcgcctggtactccctttcgctagggatgcagacgtcggtgtgaattctctgcgatcctatcagctcagctccaatctacacttctcgttggacgtggtctctggcactgacggccagaagtatcccgagctcgttcttgagcagccccttgacagggaaaaagagactgtccatgacctgctcctgacagccctggatgggggcgatccagtgttaagcggcacgactcacatcagggttacagtgctcgacgcaaacgataacgcacctctgtttaccccctcggagtactctgtgtccgtccccgaaaacatacccgtcgggacccgcctgctgatgttgaccgctaccgaccccgacgaagggatcaacggaaaacttacttattcctttcgtaatgaagaggaaaaaatcagcgagaccttccagctcgactctaatctgggggagatctccaccttacagagcttggattacgaggagtcacggttctatctgatggaggttgtggcccaggatggtggggcactcgtcgctagcgccaaagttgtagttactgttcaagacgttaacgacaacgccccagaagtcattttaacttctctgacctccagcatctccgaggattgtttacctggaactgtgatcgccctgttttccgttcatgacggcgactccggcgagaatggcgagattgcttgctccattccccggaatcttcccttcaagctggagaaatcagttgataactattatcacctgttgaccacacgcgacctggaccgggaggagaccagcgattataatatcactttgaccgttatggatcacggtaccccacccctgtctaccgagtcacatatcccactaaaggtagccgacgtgaacgataacccgcccaacttccctcaggcttcttacagcacctcagtaaccgagaacaacccacgcggggtatcgatttttagcgtgacagcccacgaccccgactccggcgataacgctcgggtcacgtactcactcgctgaggacactttccagggggccccattgagctcgtatgtgagtatcaattcggataccggtgtgttatacgccctgagaagcttcgactatgagcaacttagagatctgcagttatgggttacagccagtgattcaggaaatcctcctttgtcctctaatgtgtctttaagtttgtttgtattggatcagaatgacaatactcccgagatcttgtaccccgctctgcctaccgacggcagcaccggcgttgaacttgctcccagatctgctgagccaggctatctagtgaccaaagtcgtggctgtcgataaggatagtggacagaacgcctggttaagctacaggctcctgaaggcttctgagccaggcctgttcgcagtcgggctacacacaggagaagtgaggaccgctagggcgctcctggatcgagatgccctaaaacagagcctggtggtcgctgtggaggatcacggccaaccacccctgagcgccaccttcactgtgactgttgctgtggctgataggatcccagatatactggccgatcttggatccattaagaccccgattgaccctgaagacttggatctcactctgtatctggtcgtggccgtggcagccgtgtcttgcgtatttttagcctttgtgattgttttactcgtgctgcggcttcgccgttggcacaagagcaggctcctgcaggctgaagggtcccggctagccggcgtcccggcctctcatttcgtgggcgtcgacggagtgcgggccttcctccaaacatatagtcacgaagtgagccttaccgccgacagccgcaagtcccacctcatttttccgcaacccaattacgcagatacattactctccgaagagtcttgcgagaagagcgaaccactcttgatgtcagacaaagtagatgcgaataaggaggagcgccgggttcagcaggcccctcctaataccgattggcgcttctcccaagcacagcgcccagggactagcggttcccaaaatggcgacgataccggcacatggccgaataatcagtttgacactgaaatgctgcaagcgatgatcctggcctccgcttccgaggcagcagacggcagtagcacactgggtggcggggccggtacgatgggactgtcagctaggtacggccctcagtttaccctgcagcatgtgccagactacaggcagaatgtttacattccggggtctaatgctaccctcaccaatgccgccggcaagagggatggaaaagcacccgctggcgggaatggcaacaagaagaagtctggaaagaaagagaaaaagtag

SEQ ID NO: 131152 - DNA, 2799 bp, synthetic construct
  misc_feature 1..2799: note = Description of Artificial Sequence: Synthetic coding sequence
  source 1..2799: mol_type = other DNA
atggcacctcctcagaggcaccctcagcgttctgaacaagtcctgctactcacactgttaggaactctctggggggccgctgcagctcagatacgctacagcatccccgaagaattggagaaaggatccttcgtaggcaatatcgtgaaagacctgggcttagagccccaggaactggcagaacatggtgtgcgcatagtgagcagaggtcggatgcaactttttagtctgaatccacgcaatggaagtctggtgaccgcaggtcggatagaccgggaggagctgtgtgcacaatcaccgcggtgcctcgtcagctttaacattctggtcgaggataaacttaatctctaccctgtagaggttgaaatcgtggatataaatgataatacacctagattcctcaaagaggagctggaagtcaaaatcctcgaaaacgccgcaccctcaagccgctttcccctaatggaggtgtatgatcctgacgtagggatgaactcactgcaggggttcaaactgtccggaaactcccactttagtgtggacgtgcagtccgaagcacacggacccaaataccctgagctcgtactggaggggactctcgatagggaaggagaggcagtgtacagattagtactcaccgccatggatggtggggatcccgtccgctcaagcgtggcccagatacttgtgactgtgctggacgtaaacgacaacacccccatgtttacccagcctgtgtacagggtatcagtaccagagaatctgccagttggcacgccggtactagccgtgactgcaaccgaccaagatgaaggggttcacggggaagttacatactctttcgtgaagattacggaaaagattagccaaatcttttgcctgaatgtcctgaccggtgagatctcaacatccgccaatctggactatgaagattccagcttttacgagcttggggttgaggctagggacggaccggggctgagagatagagccaaggtgctgattacaattctggacgtcaacgacaacgtgccagaggtggtagtcacgtccggctcaagaaccatagcggagtcggccccccctggcacagtgattgctctatttcaggtatttgaccgtgattcaggattgaacggactggtcacatgctccatcccacgatccctgccgttcgaacttgagaagagcgtcggcaactactaccggctggttactaacgccgctttggatcgggaggaggtgttcctatataacatcactgtcacagccaccgataagggcacaccgccactgagcacagagactatcatctctctgaatgtggcagacactaacgacaatccacctacgttcccccactcatcatattccgtttacgtgttagaaaacaacccgagaggggcctccattttctcagtgaatgctctagacccagacgttgatcagaacgctcaggtgtcgtactcccttgcagaggataccctccaaggtgctccactgtcttcctacgtttcaattaactctgacacgggaatcctgtacgccttgcgatcatttgattatgaacagttgcgggatttgcaactgtgggtcaccgcaagcgacagtggcgacccgcccctttccagcaatgtgtcgctctctctttttgtgttggatcagaacgacaatgcccctgaaatcctgtacccagccctgccaaccgatggatccaccggtgtggagttggcccccagatcagctgaacccggttaccttgtcacaaaagttgttgctgtggaccgggacagcggccagaatgcctggctttcttaccggcttctgaaagcttcggaaccaggtttgttctctgtggggttgcacacaggcgaggtcaggactgcaagagccctcctcgaccgggatgctctcaagcagtctcttgtggtggccgtccaagaccatggtcaaccccccctgagtgccaccgtaacactcaccgttgccgtcgctgatcgaattcccgatatcctggcagacctcgggagtctggaaccaagtgccaagcccaacgacagtgaccttacactgtatctggttgtcgctgtcgccgcagtgtcctgtgtttttcttgcctttgtcatagtcctgttagcacttcgactccagcgttggcataagtctagattgctgcaggccagcggaggcgggctcgcgtctatgcctgggtcccacttcgtcggtgtcgaaggggttcgcgcctttctgcagacttactcccacgaagtctcactcacagcggactctcggaaatcccacctcatctttccccagcccaattacgcggacacattgattaatcaggagtcctatgaaaagagcgagccattgcttatcacccaggacctcctggagaccaagggagagcctcgccagttgcagcaggcacctccaaacaccgattggcggttcagccaagctcagcggcctggcacctccggatcacagaacggcgacgacacaggcacctggcctaataaccaatttgacacagagatgctccaggctatgattttggcttccgccagcgaggcggccgacggaagctccacactgggtggcggcgcaggaacaatgggacttagcgctaggtacgggccacaatttacgctgcagcatgtgccggattacagacaaaatgtgtacattccgggctctaatgctaccctgaccaacgctgcaggaaagcgcgacggcaaggcgccggccggtggcaatggtaataagaaaaagagtggcaaaaaagaaaaaaagtag

SEQ ID NO: 131153 - DNA, 2799 bp, synthetic construct
  misc_feature 1..2799: note = Description of Artificial Sequence: Synthetic coding sequence
  source 1..2799: mol_type = other DNA
atggcagcccagccccgaggcggagactatcgcggttttttcctcctgtctatcttgctcggaactccgtgggaggcctgggccgggagaatactgtatagcgtcagtgaggaaacagacaagggctcttttgtcggagacatcgccaaggacctggggctggagccaagggagctggccgagaggggggtccggatcatctctcgcgggagaacacagttattcgcattaaatcaacggagcggctctctggtgaccgctggtcgaatagaccgagaagagatttgcgctcagagtgctaggtgtctcgtgaattttaatatactgatggaagacaagatgaatttgtatccaattgatgtcgagattatcgacattaacgacaatgtgccccggttcctcactgaagagatcaacgtaaagataatggaaaatactgcccccggagtacggtttcccttgagtgaggccggggacccagacgttgggaccaatagcctgcaaagttaccagctctccccaaaccgacacttttcactggctgtacagtccggagacgacgagacgaagtaccccgagctggtgctcgaaagagtactcgatcgcgaggaagagcgcgttcatcacttggtgctgaccgctagcgatggaggggacccaccacgttcatcaaccgcccacattcaggttacagtggtggatgtaaatgaccacacaccggtgttttcactgcctcagtatcaggtcaccgtcccagaaaacgtgccagtgggcacccgtctgttgaccgttcacgcaatcgacctggatgagggcgttaacggggaggtaacatactcattcagaaagatcacccctaaattgccaaaaatgttccatctgaactcgctgaccggcgagatcagcaccctggagggcctggactatgaagagacagccttttacgagatggaggtgcaggctcaagacggcccaggcagtctgaccaaagctaaagtcctgattacggtgttggatgttaacgataacgcccctgaggtgaccatgacgtcactatcctcctccattcccgaggacacaccactcggcacagtgatagctctgttctatttgcaggaccgtgactcggggaagaatggcgaggtgacctgcacgatcccggagaatctgccatttaaactcgaaaagtcaatcgataattattataggcttgtgactacaaagaacctcgaccgcgagaccctcagcctgtataatatcacactcaaggccaccgacggcggaacccctcccttgagccgggagactcacatcttcatgcaggtcgccgatacgaacgataacccaccaacatttcctcattcatcctacagtgtgtacatcgccgagaacaatcctaggggagcaagcatcttccttgttaccgctcaggaccacgattcagaagacaatgctcaaattacctattccctagctgaggataccatccagggagcaccagttagtagctacgttagtatcaactcagacaccggggtgctgtacgctctacagtcttttgactatgagcagcttagggagctgcagctcagggtgactgcccatgactctggtgatccccccctaagctccaacatgtccttatcactgttcgttctggaccagaacgacaacccccccgaaattctgtatccggccctgcctactgacgggtccaccggaatggaactcgctcctcgtagcgccgagcccggctatttggtaaccaaagtggtggccgtggacaaagattccggccaaaatgcatggcttagctacttgctgctaaaggccagtgaaccaggactattcgcagtgggcttgtacacgggggaagttcggaccgctagagcgcttctggacagagacgccctgaagcagagccttgttgtggccgttcaggaccacgggcagcctcccctgtctgccaccgtcactctgactgtggccgtagccgattcgattcccgaagtgctcgcggatctcggctccctcgagcctagtgatggaccttacaactatgacctgaccctctacctggtcgttgctgttgctacagtttcctgtgttttcctggctttcgtcttagtgctcctcgcactgcgtctcagacgatggcacaagtctcgtctgctgcaggcctccgagggaggcttggccaacgtccccaccagccactttgtgggtatggacggagttcaggcgttccttcagacatacagccacgaggtgagcctaactgctgattctagaaaatcacaccttatctttcctcagcctaattacgtggacatgctcatttcacaagagtcatgcgagaaaaacgacagcttgttgacgagtgtggacttccaggagtgcaaggagaatctgccgtccattcagcaagccccgcccaatacggattggagattctcccaggcacagaggcccggcacgagcggatcacaaaacggcgatgacactggcacctggcccaacaaccaattcgacaccgaaatgctccaggctatgatcctagcatccgccagtgaagccgctgacggcagctctaccctgggaggaggagcaggtacgatgggcttatctgcaaggtacggaccccaatttaccctgcaacacgtccctgattacagacagaatgtctacattcccggatccaacgcaactctaacaaatgcggccggaaagagagacgggaaggcaccagctggaggtaatggcaacaagaaaaagagcgggaagaaagagaagaaatag

SEQ ID NO: 131154 - DNA, 2799 bp, synthetic construct
  misc_feature 1..2799: note = Description of Artificial Sequence: Synthetic coding sequence
  source 1..2799: mol_type = other DNA
atggctgccccccagagcaggccccggaggggcgagcttattctcctgtgcgcgctgctgggtacactctgggagatcgggcgcggccagatcaggtatagcgtcccagaagaaacagacaagggatcattcgtgggtaatatcagcaaagacctcggcctagatccaagaaaattagccaaacacggggtcaggatcgtgagtcggggaagaacccagctcttcgcgctcaaccccagatctgggtccttaatcaccgccggccggattgacagagaggaactgtgcgcacagtcccctaggtgtctgattaacatcaatactctcgtcgaggataagggtaagttgtttggggtcgagattgaaattatcgacattaacgataacaacccaaaattccaagttgaggacctcgaagtgaagattaacgaaatagccgttcccggagcccgctatccactgcccgaagctgtagaccccgatgttggagttaactcattgcagagttatcaactgagtccaaaccaccacttctcactcgacgtacagacgggagacaacggggctatcaatcccgagttagtgctagagagagccctggaccgagaagaagaagcagcccaccatctggtgttaacagctagcgatggggggaagccacccagaagtagcactgtgcgaattcatgtgactgtgttggatacaaacgataatgctcctgtgtttccccacccaatctatcgggtgaaagttctcgaaaatatgcccccagggactcgactgctgacagtaaccgcctctgacccggatgaagggattaatggcaaggtggcatacaaatttaggaaaatcaacgagaaacagacccctctgttccaacttaatgagaacaccggcgagatttctatcgcgaaaagcctggactatgaagaatgtagtttctatgaaatggagatccaggcagaggatgttggagccctgctcgggcggaccaagctgctgataagtgtcgaggatgtaaatgacaatcgcccggaggtcattataactagcttgttctctcctgtgcttgaaaactctctgccagggacggtgatcgcgttcctgtctgttcatgatcaggattctggtaaaaacggccaggttgtgtgttacactagagataacctgccctttaagctggaaaagtctatcgggaactattatagacttgttacccgtaagtacctggatcgcgagaatgtgtccatctataacataaccgtaatggccagcgacctaggaaccccaccgctttccaccgaaacacagatcgccctgcacgtcgcagacattaacgacaatccccctaccttcccacacgcctcctattccgcctacatcctggagaataacctcagaggtgctagcatattttcactcacagcacatgaccccgattcacaggaaaacgcgcaggtaacatacagcgttacggaggacacactgcaaggtgccccgttatcctcatacatcagtatcaattctgacaccggggttttgtacgcactgcagagcttcgattatgaacagatccgggacttgcagctcctggtgactgcttctgattctggggatccgccccttagttctaatatgagtttgagcctctttgtgctggaccagaatgataacgctccagagatcctctatccagccctacccacggatggtagtaccggcgtggaactggcaccaaggagcgccgaaagaggctaccttgtgaccaaagttgttgctgttgatcgagattctggacagaatgcttggctctcctaccgtctgctaaaagcgagcgaaccgggtctcttttcagtcgggctgcatactggagaagtacgcactgccagggccctgcttgatagggacgctttaaaacagagcttggttgtagcggtgcaagaccatgggcaaccgccactttcagctacagtaacacttactgtggcagtggcagattctatccccgaggtacttaccgaactagggtccctgaaaccctccgtagaccccaatgactcatctttgaccctgtatctggtggttgccgtggcagccattagctgcgtatttttggccttcgtcgctgtcctgttgggcctgaggctgcgcaggtggcacaagagtagacttttacaggattccggtggccgactagtcggggtacccgccagccacttcgttggcgtggaagaggtgcaggcctttctgcagacgtattcccaagaagtgtccctcacagcagatagccgaaagtcccatctcatttttcctcagcctaattacgcagatatgttgatatcccaggaagggtgtgaaaagaacgacagtctgctcacttcagtggatttccacgagtacaaaaacgaggctgaccatggacaacaggctcctcccaatacagattggagattcagtcaggcacagcggcctgggacctccggatcccagaacggagacgacactggcacctggcccaataaccaatttgacacagagatgttgcaggcaatgatcctggcctcagcatccgaggcggcggatggcagttcaacattgggagggggtgcaggtaccatgggcctgtctgcacgctatggccctcagtttacactccaacatgtccccgattatcgacagaacgtgtatatcccaggctcaaatgccacactgacaaacgcagcgggcaagagggatgggaaggctccagctggaggtaatgggaataaaaagaagtctggtaaaaaggaaaaaaagtag

SEQ ID NO: 131155 - DNA, 2784 bp, synthetic construct
  misc_feature 1..2784: note = Description of Artificial Sequence: Synthetic coding sequence
  source 1..2784: mol_type = other DNA
atgcaaagagcacgcgaggccgagatgatgaagtcccaggttttattcccatttctgttgtctcttttctgtggcgccatctcccaacagattcgctataccatccccgaagagcttgctaatggttctcgggtgggcaagctagccaaagaccttggattgtccgttagggaactcccaacacgtaagttacgcgtgtccgctgaggactattttaacgtcagcctggaaagcggggacctactggtcaatggccgaatagatcgtgaaaagatttgcggtcgaaagctggagtgtgctcttgagttcgagacagtcgctgagaacccgatgaatgtcttccatgttgttgtggtcattcaagacatcaacgacaacgcccctcggtttgtggccaagggaattgacctggaaatttgcgaaagtgccctgcccggtgttaagtttagcttggattctgcccaggacgcggacgttgaggggaacagtcttaaactgtatacaattaatcctaatcagtacttctcgctgagtaccaaagaaagccctgacggttccaaatatcccgtgctgctgctggagaaacccctcgatcgagagcaccaatctagtcatcgacttattctgactgctatggacggcggagatcctcccctgtcaggaacaacccacatatggattcgagtcaccgacgctaacgataacgctcctgtgttcagccaggaggtgtatagggtgagtctccaggagaacgtcccatgggggacctctgtgcttagagtaatggcaactgatcaggacgaaggaattaatgctgaaattacatacgcctttttgaactccccgatatctacatctctattcaatttaaatccgaacactggcgatataactaccaatggcacgctggattttgaagaaacaagccggtatgtcctgtcagtggaggctaaagacggcggggtgcacaccgcacattgtaacgttcagatagagatagtggacgagaacgataacgctccggaggtgacatttatgtcattttctaatcagattccagaggattctgatcttggcactgttatcgcattaatcaaagtgagagataaagacagcggccagaatggaatggtgacatgttacacacaggaagaggtgccctttaaactcgaatctaccagcaaaaactactataagctcgtgatagccggcgccttaaaccgggagcagaccgccgactacaacgtaacaattattgcgactgataaggggaaacccgccttgtcgtctaggacctcaattacactgcacatctctgatattaacgacaatgccccggtttttcaccaagcgtcctacgtggtgcacgtaagcgagaacaatcctcccggcgcctctattgcccaagtctcagcttcggaccccgatctgggccctaacggtagagtgtcctacagcattcttgcctcagacttagagccacgggagctgctgtcctacgtgagcgtgtcgccacaatctggcgtcgtcttcgctcagagggctttcgaccacgagcaactccgggcctttgagttaactctgcaggcgcgcgaccagggtagccctgctctctcagctaatgtctctctacgcgtactggtgggcgatctgaatgataatgctcctagggtactctatcccgcgctcggcccggatggatccgccctgtttgacatggttccgcgtgcggcagaaccgggctaccttgttaccaaggtagtggccgttgacgcggactccggacacaatgcctggctgagttatcacgttttgcaggcttccgagcccgggttgttttcactaggtttgaggacaggcgaagtcagaacggcaagggcccttggagacagagatgccgctcgtcagcggcttctggtggccgtacgtgacgggggccagcctccacttagcgccactgctaccttgcatctaatcttcgcggacagccttcaggaggtcctccctgacctgtccgaccggccggagccgtccgacccccagacagagttgcaattttatctggtcgttgccctcgctcttatttctgtgctgttcttgctggcagttattctcgcgatagctctgaggctgaggcgaagttcctcactggatacggaggggtgtttccagacaggcctctgttctaaatcaggtccgggcgttccaccaaatcactccgaggggaccctgccttattcctacaacctgtgtattgcaagccattccgccaagactgagtttaatagcctgaacctgacacccgaaatggctcctccccaagacctgctgtgtgacgacccctctatggtcgtttgcgcctccaacgaagaccacaagatcgcatatgacccttctctcagcagccaccaggctccacctaacactgattggaggttctcacaagcccagcggcctgggacctcgggcagccagaatggcgacgataccggcacttggcctaacaatcaatttgacaccgagatgctgcaagctatgattcttgcctctgcgagcgaggctgcagacggcagcagtaccttaggcggaggagccggcacaatgggcctcagcgctagatatggaccccagtttaccttgcagcacgttcctgactaccggcagaacgtatacatacccggtagcaacgccacactgacaaatgctgccggcaagagggacggcaaggcacctgccggagggaacggcaataagaagaagagcgggaagaaagagaaaaaatag

SEQ ID NO: 131156 - DNA, 2796 bp, synthetic construct
  misc_feature 1..2796: note = Description of Artificial Sequence: Synthetic coding sequence
  source 1..2796: mol_type = other DNA
atgaaagcttcctccgggcggtgtgggctggtgaggtggctgcaggttctgttaccctttttgctctcactgttcccaggagcactcccagtgcagataaggtactcaatccccgaggagttggcgaaaaacagcgtggtcggcaacctcgccaaggatctgggactgtctgtgcgcgacctcccagcgcgcaagctgcgcgtctcagccgaaaaggagtatttcaccgttaaccctgagtctggagacttgctggtgtcagatagaatcgacagggaacagatctgcgggaagcagccattgtgcgttttggatttcgataccgttgccgagaatcctctgaatattttctatattgcagtgattgttcaggatattaacgacaatacccccctgttcaagcagaccaagatcaatctaaagataggcgaaagtaccaagccaggaacaacttttccactcgaccccgcacttgacagtgacgtcggccccaattctttgcaacgataccacctgaatgataatgagtactttgaccttgccgagaaacagacaccagacggaagaaagtacccggagctgattctcaaacatagccttgatagagaagagcactctctccatcagctggtcctaaccgccgtagacggtggggacccaccgcagagcggaactacacagatacgcatcaaggtgactgacgctaatgataaccccccagtgttttcacaagatgtgtatagggtcacgctgcgtgaagatgtgccgccaggcttcttcgtgctacaggttacggctactgatagagacgaaggcataaatgctgaaattacgtactctttccacaatgttgacgaacaggtcaaacactttttcaatctgaacgagaaaacaggcgagattacaaccaaggacgacctggacttcgagatagccagcagctataccctcagcattgaggcgaaggatcccggggatctcgccgctcactgttcaatccaggtggaaatccttgacgataacgattgcgcccccgaagtgatcgtgacatctgtgtccacacctctgcccgaagatagtccccccggaaccgttatagctctgatcaagaccagggatcgtgattcaggtgagaacggcgaagtgtactgccaggtgctggggaacgcaaagttcattctgaaatcctccagtaagaactattacaaactggttacagacggagccctggaccgcgaggagattcccgaatataacctcacgatcaccgcgaccgacggagggaaacccccgctgagtagctctattatcgtgacgctgcatatctctgacgtcaacgataacgcccccgtatttcagcagacatcctacatggtgcatgtagccgaaaacaacccaccgggcgcttccatagcccagatttccgcatcagatcctgacctcgggccctccggacaggtatcttactctattgtcgccagtgacttgaaaccgcgagagattctgtcatacgtgtccgtttcagcccagtcaggcgtggtattcgctcagcgagcgttcgaccacgaacaactccgggcctttgaattaactctgcaagcccgcgatcaggggagtccagctcttagtgcaaacgtgtccttgcgcgtgctcgtgggggacctcaatgataatgcgcccagagttttataccctgcattagggcctgacggcagcgctctctttgacatggtcccccgcgccgccgaaccggggtacctggtgaccaaggtggttgccgtggacgccgactcgggccacaatgcatggctttcctaccacgtcctgcaggccagtgagccgggtttgttctcacttggcttgcgtaccggcgaagtcaggacggcgagggccctgggagaccgggatgccgcccgtcaaaggttgctcgtggcagtgcgagatggtggccaaccccctcttagcgccaccgccactttacatcttatttttgccgactctctccaagaggtcctgcctgatttatctgatagaagagagccgagtgatccccaggccaagcttcaattttatctggtcgttgctctcgccttgatttcggtgctgttcttcctcgctgttatcctggcaatatctttaaggctcagactttctagcagatccgacgcctgggattgcttccaacctggccttagttccaagccaggtcctggagtcttgccaaactatagcgaaggaactcttccctacagctataatctgtgcgtggctagccaaagtgctaagactgaatttaacttcctgaacattaccccggagctggtgccggctcaggacctggtgtgtgacaacgcctcttgggagcagaacacaaaccacggtgcggcaggagtgccattcgcaagtgatactattctcaagcaggccccgcctaatacagattggaggttttcccaagctcagcgacctgggacctcaggctcacagaatggcgatgacaccggaacatggcctaacaatcaatttgatactgagatgctccaggccatgatcctggcaagcgcctcagaagcggctgacggcagttcaacactgggaggtggtgcgggaaccatggggttgtcagcacggtacgggccccagttcacactacagcacgtgccagattacagacagaatgtgtacattccaggttccaatgcgactctgacgaacgctgctggtaagagggacggtaaggctcctgcaggcggcaacggtaataagaagaagtctggaaaaaaagagaaaaaatag

SEQ ID NO: 131157 - DNA, 2772 bp, synthetic construct
  misc_feature 1..2772: note = Description of Artificial Sequence: Synthetic coding sequence
  source 1..2772: mol_type = other DNA
atggggagtggagcgggggagctcggcagggccgagcgcctacctgttctgttcctgtttctgttgagcctcttttgcccagccctgtgcgagcagataaggtataggattcccgaggaaatgcccaagggcagcgtagttggcaatttggccacagatctgggcttctccgtgcaggaacttcccaccaggaagcttagggttagctccgagaagccatatttcacagtctccgccgaatctggtgagctgctcgtctcgagtaggcttgatagggaggagatctgtggcaaaaagccagcatgcgccttggagttcgaagcggtcgcagaaaacccactgaatttctaccacgtgaacgtagaaatcgaagacataaatgaccacacaccaaaattcactcagaactccttcgaactccagattagtgaaagcgctcaaccagggacccgctttatcctggggtccgctcacgacgctgatatcgggtcaaatacactgcagaactatcagctatccccatcagatcatttctccttaatcaataaggaaaagtcagatggaagtaaatatccggaaatggttctgaaaacccccctagacagggagaagcaaaagtcctatcatctcacccttactgctcttgatttcggtgccccccctttgagcagcacagcccaaatccacgtccttgtaaccgatgcaaacgataatgcccctgtgttttcccaggatgtgtatagagtttcactcagcgaaaacgtttatccaggtactaccgttctgcaagttactgcaacggaccaggacgagggagtgaatgcagagatcacattcagcttcagcgaggcttctcagatcactcagtttgacctgaactcaaataccggggagatcaccgtgctcaacactctggatttcgaggaagtgaaggagtattccatcgtcctggaggccagagacggcgggggaatgatcgcacagtgtacggtggaggtggaggtcattgatgagaatgataatgctcccgaagtcatcttccagtcattgcccaatctgatcatggaagacgccgagttaggtacgcacattgcgctcctgaaagtgcgggataaagacagccgacataacggcgaagtcacctgtaagctggagggcgatgtccccttcaagattcttactagttcgcgcaacacgtacaagctcgtcacagacgctgtgcttgacagagagcagaaccccgaatataacatcaccgtaaccgccaccgatcgaggcaagccaccactgtcctcctctagcagcataacattacatatcggagatgtaaatgacaatgcgcccgtgttctcacagtcctcctatattgtccacgtcgcagagaataaccctccaggcgcttccatctcacaagtcagggccagcgaccccgatctcggcccaaatgggcaggtgagttattgcataatggcatcggatctcgagcagcgagaactgtcaagttacgtgagcattagtgctgaatctggcgtagtcttcgcacagcgcgcttttgatcacgagcaactgcgcgcttttgagttgacactccaggcccgcgaccagggatcacccgccctgagtgctaatgtctcacttcgggtccttgttgacgaccgaaacgataacgcgcctcgagtcctctatcccgcgctaggccctgatggatccgcactgttcgacatggttccccacgccgcggagccagggtacctggtgacaaaggttgtcgctgttgacgcagatagtggccataacgcatggcttagctaccatgtgttacaggcgtctgagcccggcctcttctccctgggactgaggactggagaggttagaacagcccgcgcgctgggagatcgggatgccgtgcgccagcgcttactggtggccgtgagagacggtggccagccacctctttccgctacagccaccctgcatctggttttcgcagattccttgcaggaagtcttaccagacattacagaccgtcctgacccctccgatttgcaggcggaactgcagttttatctagtggtggccctggccctcatcagtgtcctgtttctcgttgccatgatacttgctattgcgcttaggctacggaggtccagctcccctgcctcatggtcttgtttccagcctggcctgtgtgtaaagagtgagagtgtggtgccccccaattactccgaaggcacccttccttactcctacaatctgtgcgtcgcccatacaggcaagaccgagtttaacttcttgaaatgtagcgaacagctgtcctctggtcaggacattctttgtggtgacagctcaggagcgctgtttcctctttgtaattcatctgagttgaccagtcaccagcaggccccgcctaatactgactggcggttctcacaagcccagaggccgggaacgagcggctcacagaatggtgacgatacaggaacatggcctaataatcagttcgacactgagatgctccaggccatgatcctggccagcgcttcagaggctgcagacgggtccagtacactgggcgggggagctggtaccatgggtttgagcgcccgatatggtcctcagtttaccctgcagcacgtgcctgattacaggcaaaatgtatacattccaggatctaacgccacactaacaaacgccgcgggtaagcgggatgggaaagcccctgcggggggaaacggaaataagaagaagtctggcaagaaggagaaaaagtag

SEQ ID NO: 131158 - DNA, 2793 bp, synthetic construct
  misc_feature 1..2793: note = Description of Artificial Sequence: Synthetic coding sequence
  source 1..2793: mol_type = other DNA
atgggaggcagttgtgcccaacgccgccgggcggggccacgccaagttctgttcccccttctcctgcctctgttctatccgaccctctctgaacccattcggtacagcatacccgaagagctggcaaaaggaagcgtagttggtaacttggctaaggatctagggctctccgtgctcgacgtgagcgctagaaaattgagagtgagtgctgagaagctccacttctctgtcgacgccgaaagtggtgacctcttggttaaaaatcgaattgatcgtgagcaaatctgcaaagaacgccgtcggtgtgagctgcaactggaagcagtagtcgaaaatccattgaatattttccatgtgattgtggttatcgaggacgttaatgaccacgctccacagtttgacaagaaggagatacacttggagatctttgaatccgcatccgccggaacaagactcagtctagatcccgctaccgacccagacatcaatattaattccatcaaagattataaaatcaactcaaatccctatttttcgctgatggtccgggtgaactccgatggaggaaaatatcctgaactgtctctggagaagctcctagatagagaggagcagaggtcccactctctgatactgaccgctttggacggcggcgatccaccacggtcagcaacagcccacatagagatcagcgtgaaggacactaacgataatcctccagtgttctctcgagatgagtaccggatctctctaagtgaaaacttgccaccaggaagcccggtcctccaggtgactgctacagaccaggatgagggtgtgaacgctgagattaactactacttccgttctaccgcccagtctactaagcacatgttttcactggatgaaaaaaccggaatgatcaaaaacaatcagtcctttgacttcgaagacgtagagcgatatacgatggaagtggaggccaaggacggtgggggtctcagcactcagtgcaaagtgataatagagattctcgacgaaaacgataactcacctgagataataattacctcactgtctgaccaaattttggagaatagcccaccaggcatggtagtcgctctgttcaagacccgggacctcgacttcggcggaaacggggaagtcaggtgtaatatcgagaccgacattccgttcaaaatctattcatcttccaacaattattacaagctggttactgatggcgccctggaccgggagcagactcctgagtacaatgtgaccatcgttgccaccgaccggggcaagccccccctgtcatccagccggtcaattactctgtatgttgctgacataaacgataatgcccctgtgttcgatcagaccagctatgtggttcacgtggccgaaaacaatccgcctggcgcatctatcgcacaggtgagtgcgtccgatcctgatttgggcctgaacggccacattagctactccatcgtggccagcgatctggagcccctggccgtgagtagctacgtatccgtgagcgctcagtcaggggtagtcttcgctcagcgggcattcgaccacgagcagttacgcgcctttgccctaacactgcaagcacgggaccacgggtcacccaccttgagcgcgaatgtgagtctccgcgtcctggtgggagatagaaatgataacgccccaagagtgctgtacccagctttaggacctgacggatcagccttttttgatatggtgccccggtccgccgaacctgggtatctggtaacgaaggtggtggccgtcgatgcagattccggtcataacgcgtggctgtcttaccacgtcctccaggcctcggagcccggtttatttagcctgggacttcgaacaggagaggtgcgtaccgctcgggcactgggcgatagggatgctgcccgccagagactgctagttgcagtgcgggacggtggccagcccccgctgtctgccacagccacactccatcttgtatttgccgacaacctacaggagatattacccgacctaagcgatcgtccagttctgtcagatccacaagcggaactgcagttttatttggtggtcgcactggcactgatcagcgtgctgttcctgttagccgtcattctcgccatcgcgctcagattgcggcgctcgctgagccccgccacttgggattgcttccaccccggattgtgcgtgaaaagcggcccagtggtcccaccaaactacagcgaaggcaccctgccttatagctacaacctgtgcattgcccacactggcacaaaagagttcaacttccttaaatgctctgtgcctctgcacagtaacgaggatatggtgtgctcagtcagtccaggggccctgataccgcctcacggtggtgaggatcttacctcacacccagaaaccctgacatcccaggcacctccaaataccgactggcgattcagccaagcccagagaccaggcacctctggaagccaaaatggcgatgatactggaacctggcccaataaccagtttgacacggagatgctacaggccatgatacttgcaagcgcatcggaagcggccgatggctccagtacattagggggcggggccggtacaatggggttgagcgcaaggtatggccctcagtttactctccagcacgtgccggattataggcagaatgtgtatattcctggcagtaacgccaccctgaccaacgccgccgggaagcgagacggaaaagctcccgccggcggcaatggaaataagaaaaagagtggcaagaaggaaaaaaagtag

SEQ ID NO: 131159 - DNA, 2790 bp, synthetic construct
  misc_feature 1..2790: note = Description of Artificial Sequence: Synthetic coding sequence
  source 1..2790: mol_type = other DNA
atgggaggcagttgtgcccagaggagacgggctggtcctaggcaggtcttatttccgctgctgctgccgctgttctaccctacgctttgcgaacccataaggtacagcatacctgaggaattggctaaaggtagcgtggtggggaacctcgccaaagatctgggcttgagcgtactggacgtgtctgcaagggagttgcgagtgagcgccgaaaagcttcatttcagcgtggacgcacagtctggggatctgctcgtcaaagataggattgaccgtgagcaaatttgtaaggaacggagaagatgtgagctccaacttgaggccgtggtggaaaacccattaaacatctttcacgttatcgtcgttatcgaggatgttaatgatcacgctcctcagtttcggaaggacgaaataaatttagaaatttctgaatcagtgtccctgggaatgggaaccattctggagagtgcggaagatcccgatatcagcatgaactcactctcaaaataccagctttcgcccaatgagtactttagtctggtggaaaaggacaatcctgacggaggaaaatacccggaactggttctgcagaagacgctggatagagagacccaatcggcccatcatctcgtactgacagcattagacgggggggaccccccgcgcagtggaaccgcccaaatccgtatactggttatcgacgccaatgacaacccccccgtattcagccaggacgtgtatagagtgtccctgcgggaagatgttcctccaggcacctcaattcttcgggtgaaggccaccgaccaggatgaggggattaattcagagattacttacagttttttcggcgtggccgataaggctcagcacgtattctcgctggactatacaaccggcaatatccttacccagcagcccctggattttgaagaagtggaaagatacacgatcaatatcgaagcaaaggatagagggagtctgagtacccgctgcaaggtcatagtcgaagtcgtggatgaaaatgacaattcgcccgagattattattacttccctgtcagatcaaatcatggaagactccccccctggtgttgtcgtcgccctcttcaagacccgggatcaggattctggggagaatggcgaagtaaggtgttcgttgtcccgtggagtgccattcaaaatccatagcagttcaaataactattacaagctggttaccgacgaagccctcgaccgggagcaaactcctgagtataatgtaacaatcgcagctaccgaccgaggcaaacctccattatcttccagcaaaactatcaccctgcacatcacagatgtaaatgataatgcaccagtattcggccagtctgcttacctggttcacgtcccagagaataaccagccaggtgcctctatcgctcaggtgtcagcaagcgacccagactttggcctcaatggtagggtgtcgtacagcctaattgccagtgatttggaatcacgcaccctgagctcttacgtgtcggtctcagcccagtcaggggttgtgttcgctcaacgtgcgtttgaccatgagcaactcaggacgttcgagttgaccctgcaagcacgggaccagggaagtcccgctctgtcagccaatgtcagtctgcgggtcctcgtgggagatcggaatgataatgctccccgagtgctgtatccagccttaggaccagatggcagcgctctcttcgacaccgtcccacgcgctgcgcagcctgggtacctcgttactaaggtcgttgccgtcgatgccgatagcgggcacaacgcctggttgtcctaccatgtggtccaggctagtgaacccggtctgttcagtctcggcttgagaacgggagaggtgcgtatggtccgtgccctcggcgacaaagatagcgtgcgtcagcgcctcctggtggccgtacgagacggtggccaaccacccttaagcgcaaccgcgaccttgcatctggtgttcgctgactcattacaagaagtgctgcctgacttcagcgatcaccctactccgtcagactcccaggctgaaatgcaattttatcttgttgtggctctcgccttgatctccgttctctttctgctggctgtgatcctcgccatcgcgctcagactgcgccaatcattcagccctacagcaggtgattgcttcgaatccgtgctgtgctccaaatctggcccagttggacctcccaattacagtgaaggcacactcccgtacgcatacaacttttgcgtccctggcgaccagatgaacccagaatttaattttttcacaagcgtggaccactgccccgcaacgcaggataatctgaacaaagatagtatgctgctcgcctccattcttacgccctcggtggaggctgataaaaaaatacttaagcaacaggcacccccaaatactgattggaggtttagccaggcacagcgccccggcacatccggctcccagaatggcgatgacacaggaacctggcccaacaaccagttcgacacagagatgctgcaggcaatgatattggcaagcgcctctgaggcagcagatggtagttctacccttgggggcggggccgggaccatgggcctctctgcccgatatggtccacaatttaccctgcagcatgttcccgattaccgccagaatgtgtacatcccaggtagcaatgcaacccttactaacgccgcaggcaagcgtgatgggaaggccccagcaggaggtaacggaaataaaaagaagtccggtaagaaggagaagaaatag

SEQ ID NO: 131160 - DNA, 2805 bp, synthetic construct
  misc_feature 1..2805: note = Description of Artificial Sequence: Synthetic coding sequence
  source 1..2805: mol_type = other DNA
atggtccccgaggcctggaggagcggccttgtatccactggccgggttgtcggggttctccttctgctcggtgcattgaacaaggcctccaccgtaatacactacgaaatccctgaggagcgtgaaaaaggcttcgctgttggcaacgtcgttgcgaatctgggactggatctcggatctctgagcgcccgacgctttagggtagtctcgggagcaagccgtcgcttcttcgaggtgaacagagagacgggggagatgttcgttaatgaccgtctggacagggaagaattgtgtggtaccctgccgagttgcacggttactctcgagctggtcgtggaaaatcctttggaactgttttccgtggaggtggttattcaagatataaatgacaataatcccgcctttccgactcaggagatgaagctggaaatctccgaagcagtcgctccaggtaccagatttccccttgagtcagctcacgacccagacgtgggcagcaattcactgcagacatacgaactgagtcgaaatgaatattttgcactcagagtccagacgagggaggactcgactaaatacgctgaactagtcctggaacgggccctcgatcgggaacgtgaacccagcttacagctggtgctgaccgctctagacgggggaactcccgccctgtcagcctctctgcctatccatataaaggtgctagatgccaatgacaatgctcccgtgttcaatcagagtctgtatcgcgctcgggtccttgaggatgccccgagcggaacccgagtcgtccaggtcttggcaacagacttagatgagggccccaacggggaaatcatctatagcttcgggagtcataatagggcaggggtcaggcagctgtttgctctcgacctcgtaacaggtatgctgacaattaaggggcggttggacttcgaggatactaagctccatgaaatatacattcaagccaaagacaaaggcgccaacccggaaggggctcattgcaaggtgttggtggaggtagtggatgtcaatgataatgcccccgagataaccgtcacatccgtgtactcccctgtgcccgaggacgccccgcttggaaccgtaattgcactactgtccgtcactgacctggacgctggtgagaatgggctggttacttgtgaagtccctcccggactgcccttcagcttgactagcagtctgaagaactactttactctgaagacctctgccgacctggatagggaaacagtgcctgagtacaacctttccataactgcccgcgatgccggtaccccttcactctccgccctgaccattgtacgcgtgcaggtctcagacattaacgataatcctccccagagttcccagtcatcctatgacgtttatattgaagaaaataacttgcccggggcacccatactgaaccttagcgtgtgggatccagacgctcctcagaatgcccgcctgagctttttccttttagagcaaggcgcggagacaggcctggtgggccgttatttcacaattaatcgcgacaatggtatcgtttcttctctggtgcccctggactacgaggacaggcgggagtttgagcttactgcacacatcagtgatggcggcactcccgtactcgcgaccaatatcagcgtgaacatcttcgttacagataggaatgataatgccccgcaagtgctatatcctagacctggtggcagttctgtcgagatgctccccagaggcacatccgcagggcacctggttagtcgtgtagttggttgggatgcggacgcgggtcataatgcttggctgtcatattccctgctcggatcccctaaccagagtttatttgccattggattgcacaccggacagatctccacagcccgccctgtgcaggacactgacagcccaaggcagaccctgaccgttctgataaaggataatggggagccatcacttagtactaccgccaccttgaccgtttcggtgaccgaggactctcccgaggctagagccgagttcccaagcggaagcgcgcccagagagcagaaaaagaatctgacgttctatctactcctgtcgctgattctggtctctgtgggattcgtggttaccgtgtttggggtcattatcttcaaggtgtataagtggaagcaaagcagggatctgtatcgggccccggtgtccagtctctaccggacccccgggccttcccttcacgctgatgccgttcggggtggacttatgagcccccatctatatcaccaggtttacttgacaacagactcaagacgctcagaccccctccttaagaaaccaggcgcagcatcacccctcgcgagtaggcagaatacactgcgtagttgcgaccccgtcttctaccggcaggttctgggcgctgagagcgcccctcctggacagcaggccccacctaacactgattggagattctcccaggctcagcgtccagggacgtccggcagccagaacggcgacgatactgggacctggccaaataaccagttcgacaccgagatgctgcaagccatgatcctggcctcggccagcgaagcagccgatggatctagtaccctcggtgggggcgcgggcaccatgggcctcagtgctcgctatggcccacagttcacattgcaacatgtgcctgattatcggcagaatgtatacattccaggatctaatgcaacacttacaaacgccgctgggaagcgcgatggtaaggcgcccgctggtggtaacggtaacaaaaagaaatctgggaagaaagagaagaagtag

SEQ ID NO: 131161 - DNA, 2817 bp, synthetic construct
  misc_feature 1..2817: note = Description of Artificial Sequence: Synthetic coding sequence
  source 1..2817: mol_type = other DNA
atgctgcgaaaggtccgctcatggacagagatttggaggtgggcaaccctgttgttcttgttttatcatctcggttacgtgtgtggtcagattcggtacccagtcccagaggagtctcaagagggcactttcgtcggaaacgtggctcaggactttctgctggataccgatagccttagtgcgcgccgcctgcaggtggctggcgaagtgaatcagcgacacttcagggtggacctggatagtggtgcgctgcttattaagaaccccattgaccgagaggctctatgcggcctgagcgcgtcttgcatcgtgcctctggaatttgttactgaggggcccctggagatgtatcgcgccgaagtggaaatagtcgacgtgaatgaccacgcgcctagattcccaagacagcagcttgatcttgagatcggagaggcggcgccccccggacaacgcttcccgcttgagaaggcccaggatgcagacgtgggctccaattctatttcctcatatcgtctgtcgtctaacgagcatttcgccttggatgtgaagaaacgctcagatggatcactggtgccagaactgctcctcgagaagccattggatagagaaaagcaatctgattatcggctggtactgacagctgtggatgggggcaaccctccacggagcggcactgccgaattgcgtgtgtctgtcctagatgtcaatgataacgcaccagccttccagcagtctagttatagaatcagtgtcctggagtctgcccccgcagggatggtgttgatccagctgaatgcaagtgacccagacttaggcccctcagggaacgtgactttctatttctcaggacacacacccgatcgggtaagaaaccttttcagccttcaccccactacaggcaaactgacattactgggaccattggactttgaaagtgaaaattattatgagtttgatgtcagagcaagagatggaggcagcccggctatggagcaacactgctctcttagagtcgatcttctcgatgttaatgacaacgcaccgtatattaccgtcacctccgagttgggtacattgcccgagtccgcagagccggggacagttgtggcacttatttctgtgcaggatccggatagtgggtctaatggcgacgtcagtttgagaattcccgaccatctaccttttgccctcaagtctgcatttcggaaccaatttagtctggtgactgctggccccctggacagggaagcgaaatcaagctatgatatcatggtgaccgctagtgatgcaggaaacccacctctgtctactcaccgaaccatcttcctcaacatctctgacgtaaatgacaatcccccctctttctttcagcgcagtcatgaggtcttcgtgccagagaataataggccgggtgatttactctgttctctagctgcgagtgaccctgactccggcttaaacgccctgatctcatatagcctcctggaacctcgtaaccgggacgtttcggccagctctttcataagtctcaacccccagacgggtgcggtgcatgcaacccgatccttcgactacgagcagacccagaccctacagtttgaggtgcaggctagggatcggggtaacccccctttgtctagcacagttacagtcaggctgttcgtactagatctcaacgacaatgccccagcagttttgcggcccagagcccggcccggaagtctgtgccctcaggccctgccaccttccgtaggtgccggtcatcttattacgaaagtaactgccgtggatctggatagcgggtataacgcctgggtgtcctatcagctactcgaggcacccgacccatcactgtttgctgtgagcagatacgctggcgaggtgcgaaccgcagttcctatccctgctgatctccctccccagaagctcgtgatagtggttaaggatagtggttcccctccactgtccacttctgtaactctgttggtgagtctcgaagaagatacacaccccgttgtgcccgacttaagagagagcagcgcgccccgcgaaggggaatcccgcctgacgctatacttggccgtttccttggtcgctatttgtttcgtgtccttcggatcttttgttgccctgctcagcaagtgcctgcgcggagcggcctgcggagtgacgtgctttccagcagggacctgcgcctgtcttacccggtcccgtagaagagaaggcctccctccaagcaatggaattctgagaatccagctaggctccgatgacccaattaagtttgtggacgttggggggcatagtcacggctgcacccccttagctagtgcacctaccagatcggattcctttatgatggtgaagtccccttccgcccctatggctggagagcccgtgcgtccaagctgccccccgtctgacctgctgtacggtctcgagcaagccccccctaacacagactggaggttcagccaagcccagagaccggggaccagcgggagtcagaatggtgatgatacaggaacatggccgaataatcaatttgacacagagatgcttcaggcgatgatactggcctccgcaagcgaagctgccgatggctcctcaacactcggtgggggcgctggtactatgggactctctgctcgctacggaccacaattcaccctacagcacgttcccgactatcgtcagaacgtctatatcccaggctcgaatgcaactttaacgaatgcagctggtaagagagacgggaaggcccctgcagggggaaatgggaataaaaagaagtcagggaaaaaggaaaagaaatag

SEQ ID NO: 131162 - DNA, 2835 bp, synthetic construct
  misc_feature 1..2835: note = Description of Artificial Sequence: Synthetic coding sequence
  source 1..2835: mol_type = other DNA
atggggccgaaaaccttaccccaactggccggaaaatggcaggtgctgtgtatgctttccctatgttgctggggctgggttagtggccagttgcggtactctgtagtggaggaatcagaacctggtactcttgtgggcaacgtggctcaggatctaggcctgaagatgacagacctgctgagtagaaggctgcagctgggctctgaagaaaacggaagatatttctcactctccttaatgtctggagcactggctgtgaatcagaagatagaccgggagtcactgtgtggcgcttccacctcatgtctcctacccgtgcaggttgtcaccgaacacccactcgagctcattcgggtcgaagttgagattcttgatcttaatgataatagcccttctttcgccaccccggagagagaaatgcgaatttccgagtcagcagcgagtggcgctcgcttccccttggattccgcccaggaccccgatgtgggaaccaacacagtctcattctacactttgtctcccaactcccatttctcgctgaacgtcaagactctaaaggacgggaaaccgtttccagaactcgtcctggagcagcagttggacagggaggcacaagccagacaccagttagttctcactgccgtcgatggaggaacgcctgcaagatcagggacgacacttatttctgtaattgttctggacatcaatgataatgctccaacatttcagtcatcggtcctgagagtcggaatacctgagaacgcaccaatcggcacccttttgttgcggctaaacgccaccgatcctgacgaagggaccaatggccagctggactattcttttggagatcataccagcgaagctgttaggaatctttttggcctggacccctccagcggagccatacatgtcctgggcccaatcgacttcgaggagagtcgcttttatgaaatccatgccagggcacgggaccagggccagcctgctatggaggggcattgtgttatacaagtggacgtgggggatgtgaatgacaacgcacccgaggtgctgctagcttccctggctaacccagtgttggaatcgactccggtaggcaccgtggttggcttatttaacgtgagagatagagactctggacgcaatggtgaggtctccttagatatatcacccgatctccccttccagattaagccctctgagaatcactattcgctgctgaccagccagcctctcgatcgggaggccacatcccattatatcatcgagctattagcctctgacgccggatccccttcccttcacaagcacctgaccatcaggctgaatatctccgacgtaaatgataatgcgcctcggtttaaccagcagttgtatacagcgtacattctggagaaccggccacctggctctttgttgtgtactgttgctgccagcgaccccgatactggcgataacgcccgactgacatacagcattgtgggaaatcaagtgcagggtgccccagctagttcttttgtttacgtaaatccagaggatggtcgaatcttcgctcagcgcacattcgactacgagttgctgcagatgttgcagatcgtggtgggtgtgagggattctggctcccctccacttcacgcaaacacatcactacatgtgttcgtgttagacgagaatgataacgctcccgccgtgctgcaccctagacctgactgggagcattcagctccccaaagattgccccgcagcgcaccccccggatccctggtcaccaaagttaccgccgtggacgccgatgcagggcacaatgcgtggttatcgtatagtctgcttccccaatccactgcacctggtcttttcctggtgtccactcacaccggcgaagtcagaacagcaagagccttattggaagacgattctgacacacagcaggtggtagtcttggttcgggacaatggagacccctctctatcaagcaccgctactgtgctcctggttctggaggatgaggatccggaggaaatgccaaaatcctcagactttctcatccatcccccagagagatcggaccttacactgtaccttatagttgccctggctaccgtgtccctcctgagcctggtgactttcacattcttgagtgctaagtgtcttcaggggaacgctgatggtgacggcggcggcggtcaatgttgccgacggcaggactccccatcccccgacttctacaagcagagctcacccaatttgcaagttagctccgacgggaccctcaaatacatggaggtgacactgaggccgacagattctcagtcacattgctaccgtacatgcttttctccagcctcagacgggagtgacttcacatttctccggcctctgagtgtgcagcagccaacagcgttggcactggagccagatgcgattcgatctaggagtaacacccttagagagagaagccagcaggccccccccaatactgattggcgattctctcaggctcagagaccggggacaagcgggtcacagaacggagatgatacaggaacttggcccaacaatcagtttgacaccgagatgctgcaggctatgatactcgccagcgccagtgaggctgccgacggttcgtctacactgggcggtggggccgggacgatgggcctttccgcgcggtacgggcctcagttcacattgcagcatgtgccagattaccgtcaaaacgtgtatattcctggatctaacgccaccctgacgaacgctgccggtaagagggatgggaaggctcccgccggcggaaatggcaacaaaaaaaaatcaggaaagaaggagaagaaatag

SEQ ID NO: 131163 - DNA, 5868 bp, synthetic construct
  misc_feature 1..5868: note = Description of Artificial Sequence: Synthetic coding sequence
  source 1..5868: mol_type = other DNA
atgtttagacagttttatctgtggacatgcctcgcttccggcataattcttggaagtctgttcgagatttgcctgggacagtacgatgacgactgcaaactcgcccgcggcggacctcctgctacgattgtagcaattgatgaggagagtagaaacggaactatcctcgtggataatatgctgattaagggaacagcgggagggcctgaccccacaattgagctcagcttgaaagacaacgttgattattgggtcctcatggaccccgtcaagcaaatgttgtttctgaattccaccggtagggtgcttgaccgagatccaccaatgaacatccactccatcgtggtgcaggtccagtgcatcaacaaaaaggtggggactatcatataccatgaagtcagaattgtggtcagagacaggaatgacaacagccctaccttcaagcatgaaagctattacgctacggtgaacgagttgacgcctgtcggcaccaccatcttcaccggtttctccggggacaacggtgctacggacatcgatgacgggccgaacggacagattgagtacgtcatacagtataacccagatgatcccacatcaaacgatacatttgaaatccctctgatgctgactggcaatattgtgttgcgtaagagactgaattacgaggacaaaactagatacttcgtgataattcaagccaatgacagagcacagaacctaaatgaacggcgaaccacgacaactacactcactgttgatgtgctggacggcgacgacttagggcccatgttcctgccctgcgtgttagtacctaatacgcgggattgtaggccgctcacataccaagcagctattccagaactcaggacccccgaggagctgaacccaatcattgtgactccaccaatccaggcaattgaccaggatagaaacatccaaccaccctccgaccgcccagggatcctttactctattctggttgggactcccgaagactatcctcggtttttccatatgcatcctaggactgcagagcttagcctactggagccagtaaaccgcgacttccatcagaagtttgatctcgtgatcaaagccgagcaggacaacggccaccctttgcccgccttcgctgggctgcacatcgagattctggatgagaataaccagtctccatactttaccatgccaagctaccagggctatattcttgaatctgcccccgtgggagcaactatttctgattccctgaaccttacatcacctctgcggatcgtggccctggataaagatatcgaggacacaaaagacccagagctccacctttttctgaatgattacacgagtgtgttcacagtcactcagacaggcattacacgatatttaacactgctgcagcctgtagacagggaggagcagcaaacttatacattttcaattactgcatttgacggcgtgcaggaaagcgagccagtaattgttaatattcaggtcatggacgctaatgacaacacccccacgtttccagaaatcagttacgatgtttacgtgtacactgatatgcgtcctggcgacagcgtaatacaacttactgccgtcgatgctgacgaaggttccaacggcgagataacatacgagattctcgtgggcgcccaaggcgacttcatcattaacaaaaccacgggcctcatcacaattgcccccggtgtagagatgatagtagggcggacgtacgcgttgactgtgcaggctgccgacaacgcgccacctgccgagagaagaaactccatctgtacagtttacattgaagtcctacctccgaataaccagagcccgccccgattcccacagctgatgtattctctggagatcagtgaagcaatgcgcgtaggcgctgtgctgctgaatctgcaggccacggacagggagggggactctatcacttacgcgattgagaatggggacccccagagagtgtttaacctgtctgagaccactgggattttaacgcttggaaaggccctagaccgagagtcaactgaccggtatatcttgatcattacggcctccgatggtaggcctgatggcacgtccaccgccacggtcaacatcgttgttactgacgtgaatgacaatgctccagtttttgatccatacctgccacgtaacctgtcagtcgttgaggaagaagcaaatgcattcgtgggccaggtgaaagccacggatcccgatgctggaataaatggccaggtccactattctctgggcaactttaacaacctgttcaggatcacctcaaacggatctatttatacagccgtaaaacttaatcgggaggtccgcgattactacgagttggtagttgttgccacggacggagccgtccatccgcggcattcaacccttactctggccattaaggtgctcgatatcgacgacaactcacctgtcttcaccaattctacctacactgtactggtggaggaaaacctccccgcgggcacaaccatcctgcagattgaggctaaagacgtggatctcggcgcgaatgttagttatagaatacggtcgccagaagtcaagcacttttttgcgctgcacccgtttacgggagagctgagtcttttacggtccctggactatgaagcctttccggaccaggaggcctctattactttcctggttgaggcattcgatatctacggcacgatgcctccgggaatcgcaaccgtgacagtaatcgtaaaggatatgaacgactatccgcctgtctttagcaagcgcatttataagggtatggtcgcccccgacgctgttaagggcacaccaattacaactgtttatgccgaggatgcagacccccccggcctgccggcttccagagtaaggtaccgagtggacgacgtgcagttcccttaccctgcctccatttttgaagtcgaagaagattccggacgagtcatcaccagagttaatttgaacgaggagcccacaaccatttttaaactggtggttgttgcctttgatgatggcgagcccgtgatgagttcctctgctactgtgaagatcctggtcttgcaccctggggaaatcccaaggttcactcaggaagagtatcgacctccgcctgtatccgagctggccaccaagggaactatggtaggggtcatcagtgctgcagccataaatcagagcatcgtctatagtatcgtgtctggtaacgaggaagatacattcggcatcaataacatcaccggcgtgatctatgtgaacgggcctctagattacgagacacggacctcatatgtcctcagagtccaagctgatagcctcgaagtggtgctcgccaaccttcgggtaccctcaaaatccaatacggccaaggtgtatatcgagattcaggacgaaaacaatcacccacctgttttccagaagaaattttatatcgggggggttagcgaagacgctagaatgttcacttcagtcctcagggtcaaagcaactgataaagatacagggaattatagcgtgatggcctaccgtcttatcatacccccgattaaggagggcaaagagggttttgtggtggaaacctatacggggttgatcaaaacagcaatgctttttcataacatgaggaggtcgtacttcaagttccaagtcattgccactgatgattatggcaagggactgagtggaaaggcagatgtcctggtttcagtggtgaatcagctggacatgcaggtaatcgtgagcaatgttccccccactctggtggagaaaaaaatagaagatcttacagagatcctggataggtacgtccaggagcagattcctggtgctaaggttgttgtcgagagcattggcgccaggcgccatggggacgccttcagtttggaggattataccaaatgtgacctgaccgtctatgctattgatccccaaaccaatagagccatcgatcggaatgagctgttcaagttcctggatgggaagttgcttgacattaataaggatttccaaccatactacggggagggagggcggattttggagattagaacaccggaggctgtgacctccattaaaaaaagaggcgagtcccttggctacacggagggagccctgctggctctggccttcattattattctatgttgcattcctgctatccttgtagtgcttgttagttaccgccagttcaaagttaggcaagccgagtgtaccaaaacggctagaatccaagccgccctgcctgctgctaagccagctgttccagcaccggccccagtggctgctcccccacccccgccccctcctcctcctggcgcacacctctacgaagaactcggcgattcaagtatcctgttcctcttgtaccatttccaacagtcccgcggcaacaactcagtgtccgaagaccgaaagcaccagcaagtggtaatgccattttctagtaataccatcgaggcccataagtctgctcatgtggacgggtctctgaagtcaaataagttgaagagcgcaagaaagttcacctttctgagcgatgaagacgatctgtccgctcataaccctctatataaagagaacatttcccaagtcagcacaaacagcgatattagtcagcgaacagacttcgtcgaccccttctcacccaagatacaggctaaaagtaagtctcttagaggcccaagagagaagatccagaggctttggtcccagagcgtaagtctaccgagacggttgatgaggaaagtgccaaatagacctgagattatcgacctgcaacagtggcaggggaccaggcaaaaagccgagaacgagaacaccggcatttgcactaacaaacgaggatcgtctaacccactcttgacgacagaggaagccaacctcacagaaaaggaagagattcgccagggagagactctcatgatagagggcactgagcagttgaagtccttgagtagtgactcgtctttttgtttcccccggccccatttctctttctctacactccctacggtatccaggacagtggaattgaaatccgaacccaatgtgatctccagccctgccgagtgttctctcgagctcagccctagtaggccgtgcgttctccattcgtcactgtctcggcgcgagacaccaatctgtatgctgcctattgagaccgagcgcaacatctttgagaattttgcccaccccccaaatatcagtccttcagcttgtcccctccctcctccaccccccatctcacctccaagcccccctccagcccccgctcccctggccccccccccagatattagccccttcagccttttttgtccccctccctctccaccctctataccactccccctgccgcctccgactttttttcctttgtccgtgagcacgtccggcccccccaccccgcccctcctgccaccgtttccaacccccctgccacctcccccaccgagtatcccctgcccacccccgcctagcgcaagcttcctgtctacggaatgtgtgtgtatcaccggagtgaagtgcactacaaatctcatgccggccgagaagatcaagagttcgatgacacagttgtccacaaccacagtgtgtaagaccgatccccagcgcgaaccaaagggcatactgcgccatgtgaagaatttggccgagctggagaaaagcgttgccaatatgtatagtcaaattgagaaaaactatcttcggactaacgttagcgagctgcaaaccatgtgtccttcagaagtgaccaatatggaaatcactagcgagcagaataagggttccctaaataatattgtcgaggggaccgagaaacaatcccactctcagtctacttctctgtag

SEQ ID NO: 131164 - DNA, 5874 bp, synthetic construct
  misc_feature 1..5874: note = Description of Artificial Sequence: Synthetic coding sequence
  source 1..5874: mol_type = other DNA
atgtttcgacagttctatctgtggacctgcctagcgtccgggatcatactgggctctctgtttgaaatatgcttgggacagtatgatgacgactgtaaactggccagggggggcccccccgccaccatagttgcgatcgacgaggagtctcgaaacggcactatcctggtggataatatgctgattaaagggacagccggaggaccagaccctacaatcgaactatcactgaaggataatgtcgactactgggtcctgatggatccggtgaaacagatgttatttctcaactcgacagggcgggtccttgaccgtgatccaccaatgaatattcactcgatcgtggtccaggtacaatgtattaacaagaaggttggaacaatcatatatcacgaagttaggatagtggtaagagaccgaaatgacaacagccccacctttaaacatgagtcttattatgcgaccgtgaacgagctgacccccgtgggcaccaccatttttacaggtttctctggcgacaatggagctactgatatagacgatgggcccaacggccaaatagaatacgtgattcagtacaacccagacgatcccacgtccaacgacacctttgagataccccttatgctgacgggtaacatcgtgctcaggaagagactgaattacgaggacaaaactaggtactttgtcattattcaggccaatgatcgagcacagaatctgaacgaaaggcggactaccacaacgacattgaccgtggacgtccttgacggtgacgatctgggaccaatgttcctcccctgcgtactggtgccaaataccagggattgccgaccacttacgtatcaagccgccattccagagctcagaacgccagaagaactcaatccaatcatcgttactcctccgatacaagctattgaccaggacaggaatatacagccaccaagcgataggccaggcatactgtattcaatcctagtgggcacgccggaggactacccaagattcttccacatgcacccacggaccgcggaattatctctcctggaaccagtgaaccgggatttccatcaaaaattcgacctggtcattaaggctgagcaggataacggccatccactgccagcatttgcaggacttcatattgaaatccttgacgagaataatcaaagtccgtacttcacgatgccatcataccaagggtacatactcgaatcagcccctgtgggggccaccatctccgactcactgaacctcacttcccccctccgaattgtggcactggacaaagacatagaggacacaaaagatcccgaactgcaccttttcttgaatgactacacctccgtgttcaccgtgactcagaccggaattaccaggtatctcactcttttgcaacctgtggatcgcgaggagcagcaaacttacacgttctctataacagcctttgacggggtgcaagaaagcgaacctgtgatcgttaacatacaggtgatggatgcgaatgacaatacccctacttttcccgaaatctcatatgacgtctacgtttacacagatatgcgcccaggagattctgtgatccagctgaccgctgtagatgcagatgagggtagcaacggggagatcacttacgagatattagtgggtgcccagggcgacttcatcattaacaaaaccacaggactaatcaccattgccccgggagttgaaatgatcgtaggccgcacttatgccctgaccgtccaagcagcggataacgctccgccagctgagcgcagaaattctatttgtacggtctacatcgaggtcttgcccccaaacaaccaatcgccacccaggtttccacaacttatgtactccctcgagatttccgaggctatgagagtgggcgccgtgctcctgaacttgcaggctaccgatcgggagggtgattccattacttatgcaatcgagaatggtgacccccagcgggtctttaatctatccgaaaccactggcatcttaaccctcggcaaggcactggacagggagtctaccgaccgctatatattgattattacagcgtcggacgggcgccctgacggcacaagcactgcaacagttaatattgtcgtgactgatgtgaatgataatgccccagtgttcgatccctacctgccacgcaacctgagtgttgtggaggaagaagctaatgcattcgtgggacaggtgaaagcgaccgaccccgacgccgggattaacgggcaagttcattactccctgggaaacttcaacaacctctttcggattacttcaaacggctcaatatatacagctgtaaagctgaaccgagaggtgagggactattatgagctagtagtagtggcgacagacggtgccgtccatcctcggcattctaccctgacgctggccatcaaagtgttggacatagatgataatagtccagtctttactaactcaacatatactgtgctggtagaggagaacctccctgctggcacgaccatactgcagattgaagccaaagatgtagacctgggggctaacgtgagctatcgcatcagaagtccagaggtgaagcacttcttcgccctccaccccttcacgggggaactcagtctgctaagatccctggactacgaagcttttcccgaccaggaggcatctattacctttctggtcgaggctttcgatatatatgggacaatgcctccaggtattgccacagttacggtgattgtcaaggacatgaacgattacccccctgtcttctccaagcggatttacaagggcatggtcgccccagacgccgtgaagggcaccccgataacaaccgtgtacgcggaagacgctgatcctcccggtctgcctgccagccgcgtgcggtaccgtgtcgacgatgttcagttcccctacccagccagtatcttcgaggtggaggaggatagtggcagggttatcacccgcgtcaatctgaacgaggaaccaactaccatatttaaactggtcgttgtcgctttcgatgacggtgagcctgtcatgtcctcaagtgccaccgtgaagatcttagtgctgcatcctggtgaaattccaaggttcactcaggaagaataccgtcctccaccagtgagcgagctagcaaccaagggcacaatggtcggggtgatctctgcagccgcaattaatcaatcgatagtgtactctatagtcagcggtaacgaggaggataccttcgggataaataacattactggagttatttacgtaaatgggcctttagattacgagactagaacatcttacgttctccgtgtgcaggctgacagcctagaggtggttctcgccaatctccgcgtcccctcaaagagtaacactgccaaagtgtacatcgagattcaggatgagaataatcatccacctgtgtttcagaagaagttctatattggcggagtgtcagaagatgctcggatgttcacatccgtgctccgggtcaaagccactgacaaagatactgggaattacagcgtaatggcgtatcgccttataatcccacctatcaaggagggaaaggaggggtttgtggttgagacatacactgggctgatcaaaactgctatgctgttccataacatgcgccggagctatttcaaatttcaggttatcgccactgatgattacgggaaaggcctgagtggtaaagcagacgttctcgtgtccgttgtcaaccagctggacatgcaagtgattgtgtccaatgtcccaccaacattggttgagaaaaagattgaggacctcaccgaaattctggatagatacgtacaggagcagatccctggggccaaagtggtggtcgagagtattggggctcggcgccacggagatgcctttagcttggaggattacaccaagtgcgatctaacagtgtatgccatcgatccgcagaccaaccgcgcgattgatcgcaacgagctgtttaagttcctggacggaaagctcctggatatcaataaggactttcagccgtattacggcgagggaggccggatcctcgaaatccgaactccagaggcagtgacaagcatcaagaagcgcggggaaagtttgggctatactgagggcgccttgctggctttggccttcatcatcattttgtgttgtatccccgcaatccttgtggtgctggtctcctaccggcagttcaaggtgcgccaggcagagtgcacaaagactgcccgaatccaagccgcgttgcctgccgccaaaccggctgtaccagcaccagcacccgtggccgcccccccacctccacccccaccccccccaggcgctcacctgtatgaggaactgggcgatagctcaatgcacaatctctttttgctctatcactttcagcagtcgagaggtaacaactccgtctccgaggatcgcaaacaccagcaagtggtgatgcccttctccagtaataccatcgaagcccacaaaagtgcccatgtagacgggtcacttaaaagcaacaaactgaagagcgccaggaagttcacattcttgtccgacgaagatgatctgtccgcacataaccctctgtataaggaaaacatttcacaggtgtcgaccaacagcgatatatcccagagaaccgattttgtggaccctttttctcccaaaatccaggcaaaaagcaagtccctaaggggcccccgcgagaagatccagcggctgtggtctcagtccgtgtcgctcccgagacggcttatgcggaaggtcccaaacagacctgaaatcattgacctgcagcagtggcagggtacccgtcaaaaggctgaaaatgaaaatacaggaatatgtacaaataaacggggatcctcgaatccattactcactaccgaggaggccaacctgacagagaaggaggaaatccggcagggcgagacactcatgatcgaagggaccgaacagttgaagagcttaagctcggacagctccttttgcttcccccggccccacttttctttcagcaccctgccaactgtgtcgaggaccgttgaactgaaatccgagccgaacgtaatatctagcccagcggaatgtagtctcgagctgtctccgtcaagaccgtgtgttttgcacagtagcctctccagacgggaaactcccatctgtatgcttccaatagagactgaacgaaacatcttcgagaacttcgcacaccctccaaatatatcaccctcagcctgccctctccctccaccccctccgattagcccaccctctcctcctcccgctccagccccccttgccccgcccccagacatctcgccctttagcctgttttgcccacccccatccccacctagcatccctctgcccctcccacccccgacattcttcccactctctgtatccacctccggacccccaaccccaccactcttaccgccctttccaacacccttgcccccccctccgcccagtattccctgtccccctccaccttctgcatcattcctatctacagaatgcgtctgtattactggagttaaatgcaccactaacctgatgcccgcagagaagataaaatcatctatgacccagctgtctacaactactgtctgtaagacagatccccagcgggagccaaaaggtatacttcgccatgtgaagaacttggcagagctcgagaaatctgtggctaatatgtacagccagatcgagaagaactacctccggaccaacgtctccgagctccagactatgtgtccatcagaggttacaaacatggaaattacttctgagcagaacaaaggttctctcaataacatcgtggaaggcaccgagaagcagagtcactcccagagcacttccctgtag

SEQ ID NO: 131165 - DNA, 2886 bp, synthetic construct
  misc_feature 1..2886: note = Description of Artificial Sequence: Synthetic coding sequence
  source 1..2886: mol_type = other DNA
atgtttcgacagttttacctatggacatgcctggcttccggaatcatcctggggtcattgttcgaaatttgtctgggacagtatgatgacgactgcaagttggcacgcggtggtccgcccgccacaatcgttgccatcgacgaagaatcacgcaacggtaccatcctcgtagataacatgctgataaaaggcacggcaggtggccctgaccccactattgaactttcactgaaggacaacgtagattactgggtgctcatggaccccgtaaaacagatgctgttcttaaatagtacaggccgcgtcctggatcgcgatccccctatgaacattcacagcatagtagtacaggtacagtgcattaataagaaggtgggtaccatcatatatcacgaggtccgcatcgtggtgcgagacagaaacgacaactctccaacgtttaaacatgagtcatattatgctacagtgaatgaactcacgcctgtcggtaccacgattttcacggggtttagtggagacaacggagcaaccgatatcgatgatggaccaaacgggcaaatcgagtatgtgatacaatacaatccagacgatcccacaagcaatgataccttcgaaattcctctgatgcttacaggcaatattgtcctgagaaagcgactcaactacgaggacaagactcgctatttcgtgataatccaggcaaacgaccgggcacagaacctgaatgagcgccggaccacgacgactactctcacagttgacgtactagacggcgacgacttgggccccatgttcctgccgtgcgtgcttgtacctaatacccgcgattgtcggcctttgacctaccaggcggcaataccagagttacgaacccccgaggagttaaaccccataatagtgacaccccccatccaagcaatcgatcaggatcgaaatatccagcccccctctgataggcctggcattttatattcaatcttggtagggactcctgaggactaccccaggttctttcacatgcacccccggactgccgaactcagcctccttgaaccggtcaaccgcgattttcaccaaaagtttgacctggtcattaaggccgagcaggataacggtcacccgctgcccgcctttgcaggacttcacatcgaaatcctggacgaaaacaatcagagtccatactttaccatgccgtcctatcaagggtacatcctggagtccgctccggtgggtgctactatatctgactcacttaacctcactagccccttgcgaatcgtcgcactggacaaagacatcgaggacactaaggatcccgaactgcatctgtttttgaacgattacacttccgttttcaccgttacacagacaggaatcacccggtatctgactcttctgcagccggtggacagagaggaacagcagacctacaccttcagcattaccgcctttgacggagttcaagagagcgagcctgtgattgtgaatattcaggtaatggacgctaacgacaacaccccaaccttccctgagatcagttatgacgtttatgtctacactgacatgagacccggcgacagcgtgatacagctcaccgccgtagatgcagacgagggatcaaacggagagataacttatgaaattttagtgggggcccagggcgattttatcattaataagaccactggtctcattaccatcgctccaggggtggaaatgatcgtgggccgcacctacgctctgactgtgcaagctgcagacaacgcaccaccggccgaacggagaaactccatatgtactgtctacatcgaagttcttcctcctaacaatcagagcccgccaaggttccctcagttgatgtatagcctagagatatccgaggccatgcgggtgggggctgtacttttgaacttgcaggccacggacagagaaggcgatagtattacctacgccatcgagaatggggacccacaacgtgtgttcaacttgtcagaaaccaccggcattctcacactgggaaaggccttggatagagagagtaccgatagatatatcctgattattacggcctcagacggccggcctgatggaacttctacagctacagtgaatatcgtagtcactgatgtgaacgataacgcaccagtgttcgatccatatttgcctcgaaacttatctgtggtcgaagaagaagctaatgcattcgtgggccaagtaaaggccaccgacccagacgctgggattaacggccaggtccactatagtctgggcaactttaacaacctgttcagaatcacaagcaacggttctatttatacagcggtcaagttgaatcgggaggtgagagattattacgagctggtcgtcgtcgcgacggacggggccgtgcaccctaggcacagcactctaactctcgccattaaagttctggatatcgacgacaattcccccgtattcactaatagcacttatactgtgctagtagaggaaaatctgccggctgggacaaccattttgcaaattgaggccaaagatgtcgatctaggggcaaacgtctcttaccggattagaagccccgaagtaaagcacttttttgcgcttcaccccttcaccggggaactttcccttctccgcagtctggattatgaagcatttcccgatcaagaggccagcatcacttttctggttgaagcttttgacatatacggcacgatgccccccggcattgctacggtgacagtgattgtcaaggacatgaatgactatcccccagtcttcagtaagcgtatctataaaggtatggtggctcctgacgccgtgaaaggaacccccatcacaaccgtgtatgccgaagacgccgacccacccgtctcacgccgccattag

SEQ ID NO: 131166 - DNA, 2430 bp, synthetic construct
  misc_feature 1..2430: note = Description of Artificial Sequence: Synthetic coding sequence
  source 1..2430: mol_type = other DNA
atgttccgacaattttacctgtggacttgtctagcaagtggcataatcttgggatctctgttcgagatctgcctgggtcagtatgatgatggcaccatcctggttgacaacatgcttattaaaggaaccgcaggtggcccggacccaaccatcgagctgtctctgaaagataacgtcgattattgggtcctgatggatcccgttaagcaaatgctgtttcttaactccaccggaagagttttagatcgggatcccccaatgaatattcatagcatagtcgttcaggtgcagtgtatcaacaaaaaggtcgggaccatcatctaccatgaagtgcgaatcgtcgtccgcgacagaaacgacaattcacccacatttaaacacgagagctactacgcaacagtaaatgagctgacgccggtggggacaacaatttttacaggattcagcggcgacaacggggcaaccgatatcgacgacggccctaatggccagatcgagtatgtcatacaatacaatccagatgaccccacttccaacgatacatttgagatccccctcatgcttacaggcaacattgttttgaggaagcgtctgaactatgaagacaagacccgttatttcgtgattatccaagctaacgatagagctcaaaacctcaacgagaggaggaccactaccacaactctcactgtcgacgtgctggacggggacgacctcggtccaatgttcctcccctgtgtcctcgtgcctaataccagggactgccgcccactgacataccaggcagctatccccgagctgagaactccggaagagctcaatcctatcatagtcacacccccaattcaggcaatcgaccaggatcgcaatattcagccccccagcgacagacctggcatactatacagtattctagtcgggacccctgaggattatccaagattttttcacatgcatcctcgcactgctgaactgtccctgttggagcctgtcaacagggatttccaccagaagttcgatttggtcataaaggcagagcaggacaatgggcacccactccccgccttcgccggcctgcacatcgaaattctggacgagaataaccagtccccgtactttactatgcccagctaccagggctatatcctggaatccgcaccggttggcgccaccattagcgattccttgaacctgaccagcccacttagaattgtagctctggacaaagatatcgaagacacgaaggatcctgaactgcatctcttcctgaatgattatactagtgtgtttactgtgacccagaccgggatcactagatatctgactctgctccagcctgtcgaccgagaagagcagcaaacatatactttttccatcacagcgtttgacggggtgcaggaatctgaacccgtgatcgttaacatccaagttatggatgctaacgataacacacctacatttcctgagattagctatgatgtgtatgtgtacacagacatgcgaccaggtgatagcgttatacagttgacagcggtggacgccgatgagggctcaaatggggaaattacttacgagattctggttggtgcgcagggggatttcattatcaacaagacaactggactgattaccatcgcccctggggtcgaaatgattgtgggccgtacatatgcacttacagtgcaggccgctgacaatgccccacccgctgagcggaggaatagtatttgcacagtttacatcgaggtgttaccaccaaacaaccaaagtccaccaagatttccgcaactgatgtatagtctggaaatctctgaggcaatgcgggtgggcgctgttctattaaacttacaggcaacagatcgagagggtgattctataacatatgcaatcgagaacggagacccgcagagggtgttcaacctaagcgagactacgggaatcctaaccctcggcaaagctctcgaccgggagtctactgataggtacatccttatcatcacagctagcgacgggagaccggacgggacctcaaccgctacagtgaatatcgttgtcaccgatgtcaatgacaacgcccccgtttttgacccttatcttcccaggaatctttcagttgtggaggaagaggcaaacgccttcgtcgggcaggtcaaactgagcaccaccaccgtctgtaagaccgaccctcagagggagcccaagggcattctgagacatgtaaagaatttagctgagctggagaagtctgtagcaaacatgtatagccagattgaaaaaaattacttaaggactaatgtgagcgaattacagacaatgtgcccctctgaggtgacgaatatggagataacaagcgagcagaataaaggctctctgaataatatcgtggaaggtaccgagaagcaatcccactcacagtccacatcactctag

SEQ ID NO: 131167 - DNA, 5055 bp, synthetic construct
  misc_feature 1..5055: note = Description of Artificial Sequence: Synthetic coding sequence
  source 1..5055: mol_type = other DNA
atgtttcggcagttttatctgtggacttgtttggcctctggtatcatcctcggctccctcttcgaaatatgcctgggacagtatgatgatgattgcaagttagcacgaggaggacctccggcaaccatcgtagctattgatgaggagagtaggaatggcaccatccttgtagacaacatgctaatcaagggcacagccggaggtcccgatcccacaatcgagctgtccctgaaggataacgttgactactgggtgctgatggaccccgtaaaacagatgctgttcctcaattctacggggagagttctcgatagggacccaccgatgaacattcattctatcgtcgtccaggttcagtgcattaacaagaaggtggggactattatctatcatgaggttagaatcgtagtccgcgatagaaacgacaattctcccacattcaaacacgagtcatattacgcgaccgtgaatgaactgacgcccgtcggcactacaatctttaccggtttcagcggggataacggagcaacagatattgatgacggccccaatggccagattgagtatgtgattcagtacaaccccgacgatccgacatccaacgataccttcgaaatccccctgatgttgaccggaaacatcgtgctgcgcaagaggctcaattacgaggacaagactagatatttcgtgatcatccaagcaaatgaccgcgcccaaaaccttaacgaacggaggaccactactacgactctgacagtagatgtgctggacggcgatgatctagggcctatgttcttgccctgtgtgctcgtacctaacacacgcgactgccgaccactgacttaccaggctgctatacccgaacttcggacgcccgaggagcttaatcctataattgtgacgcctccaatccaggccatagatcaagacagaaacattcaacccccctcagaccgtccaggcatattgtactctattctggttgggactcctgaggattaccctcgcttttttcacatgcacccccgaactgctgagctgtctttgctggagccagtgaacagagactttcaccagaagtttgatctagttataaaagccgaacaggataatggtcatccgctgccggcctttgctggtctccacatcgaaatcttagatgagaataatcagtccccctatttcacaatgccgtcttaccaaggctatattctagagagcgcccctgtgggggctacaatctctgactcgctgaatttgaccagccccctgagaattgtggccctcgacaaagacattgaggatgtgccgccgagcggtgtgccaacaaaggatccggagctccacctctttttaaatgactacacctcagttttcacagtgacccagaccggcatcacaagatatttgaccttacttcagcctgttgatagggaggagcagcaaacctacacattctcaatcactgccttcgacggagtccaggagagtgaacccgtaatcgttaacattcaggttatggatgccaacgacaatacacctacattccccgagatctcctacgatgtttacgtgtatacagatatgcgcccaggcgacagtgtgattcaattgaccgcagtggacgccgatgagggcagcaacggcgagatcacctacgaaatcctggttggggctcagggagattttataatcaacaaaaccacagggttgatcaccatcgcccccggtgtcgaaatgattgtcggcaggacttacgcactcaccgtccaagccgcggataacgctcctcccgccgagcgccgaaactcaatctgtacagtctacattgaggtgctgccacccaacaatcaatccccccctcgatttccccagcttatgtattctcttgagatttcagaggcaatgcgtgtaggcgctgtgctcctcaatctccaggccaccgaccgagagggcgatagcatcacgtacgcaatcgagaacggggacccacagagggtctttaatctctccgagacaacagggatcttgaccctcggcaaagctctggatcgtgagtccacagacagatacatactgattataacagcttctgacgggagacccgacggaacctcgacagctactgttaacatcgtggtaactgatgtgaacgataatgcccctgtgttcgatccatatctgccccgcaacttatccgttgtcgaggaagaagctaacgcctttgtgggccaggtcaaagcaacagatccggatgccgggatcaatggacaagtacactatagcctgggcaactttaataacctgtttcgaattacgagtaatggctctatatataccgctgtgaagttgaatcgagaagtgcgggactattacgagttggtagtcgttgctaccgacggtgcggtgcacccccggcattcgacccttactctggcgataaaagtcctcgacattgatgacaattcacctgtcttcaccaactctacctacaccgtgctggtggaggaaaatcttcccgcgggcaccacgatcctgcaaatagaggcaaaggacgtagaccttggagccaacgtttcctatcgtatcagatcccccgaagttaaacacttcttcgccctgcaccccttcacgggggaactgagtctgctgagatccctggattacgaagctttcccagaccaggaagcatccatcaccttcctggttgaagcgttcgatatatacggcactatgccccctggcattgccaccgtgacagtgatcgtaaaggacatgaacgattaccccccggtattctctaaacggatctacaaaggaatggtagctcccgacgctgttaaaggcacacctatcacaacggtctatgctgaggacgcagatccccccggcctgccggccagccgggtgcggtatagggtggatgatgtgcaatttccgtacccggcctccatttttgaggtggaagaagatagtggccgggtgattactagagtgaatctcaacgaggaaccaactaccatattcaaactggtagtcgtggccttcgacgacggagaaccagttatgagtagtagcgccaccgtgaagatcttggtgctgcaccctggcgaaattccacgcttcacccaagaagagtataggcctcccccagtaagcgagttggccaccaagggtaccatggtcggggtgatctcagctgcagccatcaatcagagtattgtctacagcattgtcagcggtaacgaagaagacacattcggcatcaacaacatcaccggcgtaatttatgtgaatggccctctcgattacgaaacacggacctcctatgttttgagggtgcaagcggactcgctggaagtcgttctcgcaaacttgagggtgccgtccaagtcgaacaccgcaaaggtctatatcgaaatccaggacgaaaataatcatccccctgtgtttcagaaaaagttctacatcggaggggtgtctgaagatgcaaggatgtttaccagcgttcttagggttaaagcgaccgataaagatactggaaattacagtgtgatggcgtatcggttgattattccacccattaaggaggggaaggaagggtttgtcgttgagacatataccggtctgatcaaaaccgccatgctgtttcataatatgcgacgctcttactttaagttccaagtgatcgccaccgacgattacgggaagggactcagcggcaaggctgacgtgctagtttcggtggtgaaccagctggacatgcaggtcatcgtgagtaatgttccacctactctggtagagaaaaaaattgaggacttgacggagattctggacaggtacgtgcaggagcagatacccggcgctaaagtggtggtggagtcaattggagcccgccgccacggagatgctttctctctggaagattacactaaatgtgacctcactgtctatgccatcgaccctcaaactaaccgcgctatagaccgaaacgagttgtttaaatttttggatggcaagctactggacataaataaggactttcagccctactacggggagggaggaaggatccttgaaattcgcactcccgaagctgtgaccagcataaagaagcggggagagtcattgggttacactgaaggagccttgcttgcccttgcattcataattatactctgctgtatacctgcaatcctcgtagtgttggtttcctacaggcagttcaaggtaagacaagccgagtgtacgaagacagcccggatacaggctgctctgcctgccgcgaaacccgcagtccctgctcctgcgcctgtggccgcaccccccccccctccacccccaccccctggcgctcacctgtatgaagagttaggagattccagcatgcacaagtatgagatgccgcagtatggaagccgtaggagacttctgccacccgcggggcaggaagaatacggtgaggttgtcggagaggctgaagaggaatacgaggaggaagagtgggcacggaagcgaatgattaagctggtcgttgacagggagtatgagacaagcagcactggagaggacagcgctcctgaatgccagcgcaacaggcttcaccatccgagcatccacagtaatattaacggcaacatctatattgcccagaacgggagcgttgtcagaaccagaagagcttgccttaccgacaacctaaaggtggctagtccagtccggctgggtggccctttcaaaaaattggacaagctcgccgtcacacatgaagaaaacgtccctctgaataccctcagcaaagggcctttcagtaccgaaaagatgaatgctagacctacattggtgacattcgccccttgccccgtcggcaccgacaatactgccgtgaagcctctgaggaatcgtctgaagagtactgtggagcaggagtctatgatcgattctaagaatatcaaagaggcccttgagttccacagcgatcacacacaaagtgatgacgaggagctgtggatggggccatggaataacctccatatccctatgacaaagctctag

SEQ ID NO: 131168 - DNA, 5859 bp, synthetic construct
  misc_feature 1..5859: note = Description of Artificial Sequence: Synthetic coding sequence
  source 1..5859: mol_type = other DNA
atgtttcgccaattctacctgtggacatgtctggcttctgggatcattctggggagcctgtttgagatctgcctcggacaatatgatgatgactgcaaactggctcgcggggggccacctgcaactattgttgccatcgatgaggagagccggaacggaaccatcctggttgataatatgttaattaaggggactgccggaggaccagatcctactatcgaactctctctgaaagacaacgtcgactattgggtcctgatggatccagttaaacagatgctcttcctgaacagcactggcagggttttggacagggacccaccaatgaacattcacagtattgtggtgcaggtgcagtgtattaataagaaagtgggaactattatctatcacgaggtgcggattgtggtccgcgaccgcaacgacaatagtcccacctttaagcatgagtcttactacgcgacagtcaatgagctgacgcccgttgggactaccatattcacaggattctctggagacaacggcgccactgacatagacgatggaccaaatggacagatagagtatgttatccagtacaatcctgacgacccaacttcaaacgacactttcgaaattcctctgatgcttaccggtaacattgttctgcggaagagactgaactatgaggacaagacacgatacttcgttataatacaagcgaacgatcgggcccaaaacttgaatgagagacggacaaccacgacaaccttaaccgtggatgtcctggacggtgacgacctgggaccgatgtttctgccttgcgttctggtgcctaatacccgtgactgtcgtcccctcacgtaccaggcggctatccccgagctccgaaccccggaagaactgaaccctatcattgttacaccaccaatccaagctattgaccaagatcgcaacatccagccccccagcgataggcccgggattctttattcgattctggtagggacccctgaagactatccacgctttttccacatgcacccccgcacagcagagctgtcacttctcgaaccggtcaatcgcgattttcaccaaaaattcgatctcgttatcaaagctgaacaagacaatggccacccccttcccgctttcgcaggcctacatattgagatcctggacgagaacaaccaaagcccttacttcaccatgcctagctaccagggctacatcctggaatctgcacctgtgggcgcaacaatctccgactccctgaatctcacaagcccactgagaattgtggccctggacaaggacatcgaggatactaaagatcctgagctccaccttttcctgaatgattacaccagtgtgttcactgttacccagaccggcatcacgagatatctgaccctgttgcaaccggtggaccgagaggagcagcaaacctatacttttagcataactgcatttgacggagtccaggaatcagaaccagtgattgtgaacatccaggtcatggacgctaatgataatactcctacctttcctgagattagttacgacgtttacgtgtacactgatatgaggcccggggatagcgttatccagttgactgctgtagatgctgatgagggctccaatggtgaaataacctacgaaatcctggtgggggcacaaggggacttcatcattaacaaaactactggcctgattacgatcgcaccaggagtggaaatgatcgtcggtaggacttatgccttgacagtgcaggccgccgataacgctccccccgccgagcggcggaactccatttgcacggtctatatcgaggttctgcctcccaacaatcaatcaccaccccggtttccacaactgatgtactcccttgaaataagcgaggccatgagagtgggagcagtgctgctcaacctccaggcgactgatcgggagggggacagcatcacctacgccattgaaaacggggaccctcaacgggtgttcaacctgtccgaaaccaccggcatcctgaccttggggaaagcactggatagggagagtacagaccgctatatcctgatcataacagcttccgacggccggcctgacggcacgtctaccgccacagtaaatatcgtggtaaccgatgtgaatgataatgctcctgtgttcgatccatatctcccccgaaatctgtcagtcgttgaggaggaggcgaatgctttcgtcggccaagttaaggctaccgaccctgacgccggaataaatgggcaggtgcactattccctcgggaactttaacaatttgtttcgaatcacgtccaacggatctatttatactgccgtgaagctgaacagggaagtcagagattattatgagctggtggtcgtggctactgacggggcggtgcacccacgccattcaactttaacattggctataaaggtcttagacatcgatgataacagtcccgtttttactaactctacttacaccgtgctggttgaagagaacttaccagctggaaccactattctgcagattgaggccaaagacgtcgacctgggggctaatgtctcctatagaatccgctcacctgaagtgaaacacttttttgcacttcatccctttaccggagagttaagtcttctgcggagcctcgattacgaagcattcccagatcaggaggcctcaatcactttcctggtagaggcatttgacatctacgggacaatgcccccaggcatcgccacagttacagtcattgtgaaagatatgaacgactatccccctgtgttcagcaaacgcatctacaagggaatggtcgcaccagatgccgtaaagggtactcccattaccactgtgtacgccgaagacgcggaccccccagggttgcctgccagccgcgtaaggtatcgagtcgatgacgtccaattcccatacccagcttctattttcgaggttgaggaggacagtggacgcgtcattacacgcgtcaatcttaacgaggagcctaccaccatcttcaagctcgttgttgtggcctttgatgacggagagccagtcatgtcatcttccgcaactgtgaagattcttgtgttacatcccggcgagatcccacgctttacacaagaagagtacaggcccccccccgtgtctgagctcgcaactaagggcactatggtaggtgtgatcagcgctgccgctatcaatcaaagcatcgtttattcgatcgtgtcaggtaacgaggaagatacattcggaattaataacatcaccggagtgatttacgtgaacggtcccctggactacgagaccagaacaagctacgttttgcgcgtgcaggcagattcgctcgaggttgtgcttgcgaatctacgggtgccatctaaatctaacacggccaaagtgtatatcgaaattcaggacgaaaataaccatcctcccgtgttccagaaaaagttttacattggaggggtcagtgaggacgcccgaatgttcacttccgtgctgcgagttaaggccaccgacaaggacaccggaaactactctgtcatggcatatcgactgatcatccctcccattaaagaggggaaggagggctttgtggtcgagacctataccggattgatcaagacagccatgctgtttcacaatatgcggaggtcatatttcaagttccaggtcatagctaccgacgactacggcaagggactaagtgggaaagccgacgtgcttgtgtctgtagtgaatcaactggacatgcaagtgatcgtctcaaatgtcccacccactcttgttgagaaaaagattgaagaccttaccgagatacttgatcgctatgtgcaggaacagatacctggcgccaaggtggtcgttgagtctattggggctagacgacacggagatgccttctctcttgaggactatacaaagtgtgaccttactgtctatgccatagacccgcagaccaaccgcgctatagacagaaatgaacttttcaagttccttgatgggaagttgctcgatataaataaagatttccagccttattacggtgaggggggcagaatactcgagatacgcacacctgaggcagtgacttctatcaaaaagaggggcgaatctcttggatataccgagggcgctcttctggcattagctttcatcatcatactgtgttgtatccccgccatcctggtggtactggtatcctacaggcagcgccaagcagagtgtacaaaaaccgcaagaatccaggcggcattgcccgctgccaaacccgctgttcccgcaccagcacccgtagccgcaccgccgccccccccccctccgcctccgggagcacatctctacgaggaactgggcgactcctccatcctgtttttactgtatcacttccagcagtcccggggcaataactccgttagtgaagatcggaaacatcagcaggtggtgatgcccttctcctccaacactattgaggcacacaaatccgcacacgtcgacggatctctgaaatctaataaactgaagagcgctcgcaagtttacgttcctgtcagatgaggacgacctgtccgcgcataaccccctttacaaggagaacatctcccaggtttccactaattccgatatcagtcagcggacagacttcgtggaccccttctccccaaagatccaggctaaatctaagtccctgagaggtccgcgagaaaagatccaacgactttggtcacagtctgtgagtttacccaggaggctcatgaggaaagtgccgaaccgccctgaaataatcgacctgcaacaatggcaaggaacccggcagaaagccgaaaacgaaaacaccggcatatgcactaataagaggggttccagcaaccccctgctgaccacagaagaagcaaacctgacggagaaagaggagatcaggcaaggagagaccctgatgattgaaggtaccgaacaactgaagtcactctcctccgactctagcttttgtttccccaggccacacttcagtttcagtacactgcccaccgtgtcaagaaccgtcgagctgaagtccgagccaaatgtcatctcatcacccgccgaatgcagtctggaattatcaccaagtcgtccttgtgttctccattctagtctgtccaggagggaaacccccatctgtatgcttcctattgagactgaacgcaacatctttgagaacttcgcccaccctccaaatatctcgccatccgcctgtcccctgcctccaccacctccaatttcaccacccagccctccaccggctcccgctcctcttgcacctccaccagacatttctcctttctcccttttttgccctcctccctcccctccttcaatacctctcccccttcccccccccacattctttccattatcggtgagcacaagcgggccacctaccccaccccttctcccgccctttcctacccctctgccacctccccccccttccattccttgtcctcctccccctagtgcctccttcctctccaccgaatgtgtatgtatcaccggtgtcaaatgcactaccaacctgatgcctgctgagaaaattaagtcttcaatgacacagctgtccactacgactgtctgcaaaaccgatccacaaagggaacccaagggaattctgcgacacgtgaagaatctggccgagcttgaaaaatcggtggccaacatgtatagccagattgaaaaaaattacttgaggaccaacgtgtccgagcttcaaaccatgtgccctagcgaagtgacgaatatggaaattacatccgagcagaataagggctctctgaacaatattgtcgagggaacagagaagcagtctcattctcaaagcaccagcttgtag

SEQ ID NO: 131169 - DNA, 5748 bp, synthetic construct
  misc_feature 1..5748: note = Description of Artificial Sequence: Synthetic coding sequence
  source 1..5748: mol_type = other DNA
atgttcagacagttttatctgtggacttgcctggccagcgggatcattcttggttccctgtttgagatatgtctagggcagtacgatgatgactgcaaactagctcgcggtggccctcccgccacgattgtcgctatcgatgaagagtcaagaaatggtaccatattggtggataatatgttaatcaaaggcactgcaggcggacctgatcctactatcgagctctcgttgaaagataatgtggattattgggtgctcatggaccccgtcaaacaaatgctgtttctaaacagcacaggaagggttctggatagagaccctcccatgaacatccatagtatcgttgttcaagtacagtgcatcaacaagaaggtgggaacaattatataccacgaagttagaatcgtagttcgcgaccgcaacgacaattccccgaccttcaagcacgagagttactatgccactgtgaatgaactaacacctgtggggacaacaatcttcacaggcttttccggcgacaacggagccactgacatcgatgatgggcccaatggacagattgagtatgttattcagtataatcccgacgatccagacagggcacaaaacctcaatgagcgacgcactaccaccacaactctgacggtggatgtgctcgacggggatgacttaggcccaatgttcctgccttgtgtgctggtccccaacactagggactgtcggccgttaacctaccaggcagcgatcccggagctgagaactcccgaagaacttaaccccatcattgtcacgcccccaatacaagcaattgaccaggatagaaacattcaacctcctagcgaccgcccagggattctgtactctattctggtgggtaccccagaggattacccgcggttttttcacatgcatccacggaccgctgagctgagcctcctagagccagtaaaccgcgatttccaccaaaagttcgatctcgtcatcaaagcagagcaggataacggccaccccttaccagctttcgcaggactgcacatcgaaattctagatgagaacaaccagtcaccatacttcaccatgccctcgtatcagggatacatcctcgagagcgcgcctgtgggcgcaacaatctctgattctctgaatcttacatccccactgagaattgttgccctggacaaagatattgaggatactaaagaccctgagctgcacctgttcttaaatgactatacatcagtcttcaccgtgacccagactgggattacaaggtatctgactttgttgcagcccgtcgatcgcgaggaacagcagacctataccttctccatcacagcattcgacggcgtccaggaaagcgagcctgtgattgtcaacattcaggtcatggacgctaatgataacacccccactttccctgagataagctacgacgtttatgtctacacagatatgcggcctggcgactcagtgattcagttgaccgccgtggacgcagatgaggggagcaacggggagatcacgtatgaaatactggtgggagcccagggagacttcataatcaacaaaacgacaggccttattactatcgctcctggcgttgaaatgatcgtcggaaggacctatgcactcacggtgcaagctgcagataatgcccccccagctgagagaagaaactcaatatgcaccgtgtacatcgaggtattgcctccaaataatcagtctcccccacgattccctcagctgatgtattccttagaaatttccgaggcaatgagggtcggggcagtcctcctgaacctgcaggcaacagatagagaaggagacagcattacctatgcgatagagaatggcgaccctcaaagagtcttcaatctaagcgaaactactggcatccttaccttgggcaaagccctggacagagagagcacagataggtatatactgatcatcacagcatccgatggtcgccccgatgggactagcacagccacggttaatatcgttgttacagatgtgaatgataacgcccctgtgtttgacccctacctgccgcggaatctcagcgttgtggaagaggaggcaaacgctttcgtcggtcaggtgaaagcgacagacccagatgccggaatcaacggacaggtgcattacagtctcggcaattttaataatctgtttcggatcacctccaatggcagcatctacactgccgttaaactgaatagagaagttagagactactatgaacttgtagtggtcgccactgacggcgccgtgcatcctaggcactcaaccctgacattagcgattaaagtacttgatatcgatgataattctccagtcttcactaacagcacctacactgtgctggtggaggaaaatcttcctgccggaactaccattctgcagattgaagccaaagacgttgacctgggcgctaatgtttcgtaccgcatccggtcaccagaggttaagcacttcttcgctctgcatccgttcacaggtgagttaagcctcctgagaagcctggattacgaggcttttcccgaccaggaggctagcatcactttccttgttgaagcttttgacatatacggaacaatgccaccaggcatagctaccgtgacagtaattgtcaaagatatgaacgactacccgcccgtatttagcaaaaggatttacaagggtatggtggctccagatgctgtgaagggaactcccatcaccaccgtttatgcagaggacgccgacccgccaggacttcctgccagcagagtaaggtacagagtggatgacgtccagtttccttaccccgcgtccatcttcgaggtggaagaggattccgggcgtgtgattactcgcgtgaatctaaatgaagaacctaccaccattttcaagctcgtggtggtagcatttgacgatggcgagcccgttatgtccagctccgctacagtcaaaatcctcgtgctgcatccaggggaaattcctcgtttcacacaggaggagtacaggccccctccagtgtccgagctggccacgaaaggcaccatggtcggcgttatctctgctgctgccatcaatcaatccattgtgtacagtatcgtgagcggaaatgaggaagacacctttggcataaataatattactggggtgatttatgtgaatggacccctggattatgagaccaggacttcctacgtgctccgcgtacaagccgattcgctcgaggtagtgctcgccaatctgagagtaccctctaagtctaatactgctaaagtctacattgaaatccaagacgagaataatcatcctccagtgtttcagaaaaagttttacattgggggcgtgtctgaggacgcaaggatgtttacttctgtgctgcgggtgaaagccactgacaaggatacaggcaattacagtgtcatggcataccgtctgattatacctcctatcaaggagggcaaagagggctttgtagtggaaacctacaccggcttaatcaagacagccatgcttttccacaatatgcgaaggtcgtattttaaatttcaggtcatcgctaccgacgattatggaaaggggttgagcgggaaagccgatgtgctcgtgtctgttgtgaaccaactcgatatgcaagttatagtgtcaaatgtcccccccacccttgttgagaaaaagatcgaagatctgacagagatcctggaccgatatgtgcaagaacagatccccggagccaaagtcgtggttgagtccatcggtgctagaagacacggcgacgccttctctctggaagattatacaaaatgcgatcttaccgtgtatgctatcgatcctcagaccaatcgggctatcgaccggaatgaactttttaaattcttggacggtaaattgctcgatatcaacaaagactttcaaccctactacggtgaaggtggacgcatattggagatccggaccccggaagccgtgacaagtatcaaaaaacggggggaaagcctcggatacactgagggagccctgctcgcactggctttcatcatcatcctttgttgcattcccgctatcctcgtggtgctggtgtcttatcgacagcggcaggctgagtgcactaagactgcaagaattcaggcagccctgcctgctgcgaagccagccgttcctgcccccgcacctgtggctgccccgccccctccacctccgcctcccccaggtgcacatttgtacgaagagctgggcgactctagcatcctcttcctcctataccactttcaacagagtaggggtaacaattctgtttcagaggaccgcaagcaccagcaggttgttatgcctttttcatccaatactatagaggctcacaaatccgcacatgtggatggatccctgaagtctaacaagctcaagagtgctcggaaatttacattcctgtccgatgaagacgacctcagcgcccacaaccccctgtataaggagaatatcagccaggtttcgaccaacagcgatatcagtcagcggacagatttcgtcgaccctttttcccccaagatccaagcgaaaagcaagtctcttcggggcccaagagaaaagatccagcggctgtggtctcagtcggtcagtctgcccagacgcctgatgcgaaaagttccaaaccggcccgagattattgacctccagcagtggcaaggtacacgacagaaggcggagaacgagaacacagggatttgtactaataagcggggctctagcaacccactgttaactactgaggaagccaacttgaccgaaaaggaagagattcggcaaggtgagacactgatgattgaaggaaccgaacagttaaagtcactgagcagcgattcgtccttctgtttcccccggccacacttttctttcagcacacttccaactgtgtcccggacagtggagctcaagtcagagcccaatgtgatctcatcaccggccgagtgctcactcgaactgtctcctagtcggccctgcgtgctgcactcctcactcagccgcagggagacacccatctgcatgctgcccatcgaaaccgaacgaaatatctttgaaaatttcgctcacccccctaacatttctccatcagcatgcccgctgccgccaccaccccctatctccccaccaagtccgcccccagcacctgcaccgttggctcctccaccagacatctcaccatttagcttgttttgcccaccacccagtcctccctccattcctctcccgctgcctcctcccacattctttcccctctcagtgagcacaagcggaccacccaccccacccctactcccaccttttcctacaccactcccccccccacccccaagcattccctgcccaccgccgccaagcgcttctttcctgagcaccgagtgtgtttgcattaccggggttaagtgcaccacgaatctgatgcccgccgagaaaataaagagtagcatgacccagctttccacgacaaccgtgtgcaagactgaccctcagagggagcccaaggggattttacgccatgtaaaaaacctggcagagttggagaagtccgttgctaatatgtacagccaaatcgagaagaattacctacgcaccaatgtcagcgagcttcagacaatgtgtccatccgaggtaacaaatatggagatcactagcgaacagaataaagggtctctgaacaacattgtagaaggaaccgagaaacagagtcatagccagagtactagcctgtag

SEQ ID NO: 131170 - DNA, 5799 bp, synthetic construct
  misc_feature 1..5799: note = Description of Artificial Sequence: Synthetic coding sequence
  source 1..5799: mol_type = other DNA
atgtttcggcagttctacttatggacatgccttgcctcaggaatcatcctcgggtcattgttcgagatctgtttggggcaatatgacgatggtacaatactggtagacaatatgcttatcaagggtactgccggtggtccagaccccaccattgaactgtctttgaaagacaatgtggattattgggtacttatggaccccgtaaagcaaatgttgttccttaattccaccgggcgtgtgttggatagagatccccccatgaatatccacagtattgtggtccaggttcagtgcataaacaagaaagtgggcacgattatctaccatgaagtgcgcatcgttgtgagagaccgcaatgacaactctccgacgttcaaacatgagtcatactacgccacagttaatgagctaaccccagtggggaccaccattttcactggcttctccggggataacggggctaccgacattgatgatggccctaatgggcagatcgaatacgtcatccagtataatcccgatgatccgacaagtaatgacacgttcgagatacctctgatgcttacaggcaatattgtccttcgtaaaagattgaattacgaagataaaacacgttacttcgtaattatccaggcaaatgaccgcgcacagaatctcaacgagcgcagaacaaccaccaccaccttaactgtggatgtcctggatggtgacgacctcgggcccatgtttttgccctgcgtgctggtaccaaatacaagagattgccgtccgctgacctatcaagctgctatccccgagctgcgaacccccgaggagctgaatcccatcatcgtcactccccctatacaggcaattgaccaggatcgaaacatccagcctccctctgatcggccaggcatcttgtactccattttggtgggcacccccgaagactaccctcggttcttccatatgcaccccaggaccgctgaattgagcctgttggaacctgttaaccgcgacttccatcagaagttcgatctcgtgatcaaagccgagcaggacaatggccaccccctcccggcctttgctgggctccatattgaaattctggacgaaaataaccagagcccatacttcactatgccaagctaccagggctatatccttgagtccgccccagtaggcgcgactatttccgactccctgaaccttacgtcccctttgagaattgtggctctggacaaggatattgaggacaccaaagacccggaactccacttgtttctgaacgactacactagtgttttcactgtgacacaaacaggaattaccaggtatctgacattgttacagcccgtggatcgcgaggagcagcagacctataccttttctatcactgctttcgacggtgttcaggaatctgagcccgtgatcgtgaatatccaggtaatggatgcgaacgacaatacccctacattccccgagatctcatatgacgtgtatgtgtatacagatatgcggcccggcgatagtgtgattcaacttacggccgtggatgctgacgaaggaagcaatggggaaataacttacgagattctcgtgggggcccagggtgacttcattataaataaaaccactggtctcattacgatcgctccgggggtagaaatgattgtggggcgcacctacgcgttaaccgtccaggccgctgacaatgcaccccccgcagaacgccggaatagtatctgtaccgtctatatcgaagtgctccctccgaacaatcagagccctcccagatttccacaactgatgtatagccttgagataagcgaagcaatgcgggtcggtgcagtgcttttgaaccttcaggccacagatcgggagggggattcgataacttatgctattgagaacggtgatccccagcgtgtgtttaacctgtcggaaactaccggcatacttacgctgggcaaagccttagatcgggagtctaccgacagatatatactcatcatcacggcctccgacgggcggcccgatgggacatcaaccgctacagtgaatatcgtggtgactgacgttaacgacaacgccccagtgtttgatccttatctcccacgcaatctgagcgtagtggaggaggaagctaatgcgtttgtgggtcaggtgaaagccacagaccctgacgccggtatcaacgggcaggttcactactctctcggcaacttcaacaatctcttccgtattacatctaacgggtcaatttataccgccgtcaaactgaaccgcgaagtgagagattactacgagctcgtcgtcgtggctacggatggagccgttcatccccgccactcgaccctgacactggctatcaaggtactcgatatagacgataacagccctgtgtttactaatagtacctacacggtgttggtagaagagaacttgcctgcagggacaaccatcctgcaaattgaggctaaagacgtcgatctcggcgccaatgtatcctatcgaatacgctctccagaagtaaaacatttcttcgctttacacccctttaccggggaattgtctctactacggtccctggactacgaggcatttcctgatcaggaagcgtccatcaccttcctggtggaggctttcgatatctacggaacaatgcccccagggattgccacagtgaccgtgatcgtgaaagacatgaatgactatcctcctgtattctctaagagaatatacaaaggcatggttgcccctgacgccgtgaaaggcacaccaataactactgtttacgccgaggatgcagacccccctggattgcctgcatctagagtccgctatcgggttgacgatgtgcaatttccttatccggcatcgatctttgaggtggaagaagattccggccgagtgattacacgggtcaatctaaatgaagaacccacaacgatctttaaactggtggttgtggcttttgatgatggtgagccagtcatgagcagctctgctacagtgaagattctggtcttgcacccaggtgaaatacctagattcactcaggaagagtataggccccctccagtgagtgaacttgctaccaaagggacgatggtgggggtgatttccgccgcggctattaaccagtcaattgtctattcgatagtgtcaggcaacgaggaggatacttttggaattaacaacatcaccggggtgatctatgtcaacggaccgctcgactacgagacccgcacttcttatgtcctgcgcgtgcaggccgactctctcgaagtggtgcttgccaatttacgtgtcccatcaaagtccaataccgccaaggtgtatattgaaatccaggacgagaataatcacccaccagtgttccagaaaaaattctatattgggggcgtatccgaagatgcacggatgtttacctcagtgctgcgtgttaaggctacagacaaggatacaggcaactactctgtgatggcgtaccgtctgatcatccccccaatcaaggagggcaaggagggattcgtcgtcgaaacttatacgggcctcattaaaacggccatgctctttcataatatgaggaggagctacttcaaattccaggtgatagcaacagacgattacggaaaagggctgtctggcaaagccgatgtgctggttagcgtggttaaccagctggacatgcaggtgattgttagcaatgtccctccgacccttgttgaaaaaaaaatcgaggaccttacagagatcttagaccgctatgttcaggaacagattcccggggcaaaggtcgtcgtggagtccataggcgccagaaggcacggggacgccttctcgctggaagattataccaaatgcgacttgactgtttacgccatcgatccccagacaaaccgtgcgattgaccgcaacgagctctttaaattcctggacggcaaactgctcgacataaacaaggactttcagccctactatggcgaaggcggacgcattctggagatacgcacacccgaagcggtcacttcaattaagaagagaggcgagtcgctggggtacactgagggcgcattgctggcactggccttcatcattatcttgtgttgcattcctgccattctagtggtgctggtgtcatacaggcagaggcaagctgagtgtactaagacagcccggattcaggcggccttaccggcggcgaaacctgccgtgccagccccagccccggtggcagctcctccccccccacccccaccccctccgggcgcacacctgtacgaggagctgggggattctagcatgcacaacttgtttctgctgtaccactttcagcagagtagaggcaataacagcgtcagtgaggatcgcaaacatcagcaagtagtgatgccatttagttctaacacgatcgaggcccacaagtctgcccacgtcgacggcagtctgaagtcgaataagctcaaatctgccaggaaatttacttttctcagtgatgaggatgacctctctgctcacaaccccctgtataaggagaacatttcccaagtctccacgaacagtgacatctctcagcgcaccgatttcgtagacccatttagtcctaagatccaggccaagagcaaaagcttacgcggcccccgggaaaagatacagcgtttgtggtcccagtcagtgtcgcttcctagacgtttgatgcgcaaagtgcctaacagacctgaaattattgaccttcagcagtggcaaggtactaggcagaaggcggagaatgaaaacacggggatttgcaccaataagagaggcagtagtaacccactgcttacaaccgaggaggccaatctgactgaaaaagaagagataaggcagggagagacccttatgattgagggcacagaacaattgaaaagtctgtcttcagattccagcttctgtttccctcgtcctcactttagcttttctactttgcctaccgtctccagaacagtcgagcttaagtccgaaccaaatgtaatctccagccctgcagagtgcagccttgagctgtccccttcccgaccatgtgttctgcactcaagcttatcccgccgggagactccaatatgtatgctaccaattgaaaccgagcgaaacatctttgaaaactttgcccaccctccaaacatatctccctcggcgtgccctcttcctccaccgccccctatttcgccaccctccccgccacccgcacccgcacctcttgcaccaccacctgatataagtccattctcccttttttgtccaccccccagcccaccctcgattcccctgccactccctccacctactttcttccccctctctgtgagcacgtccgggccaccaactccgcccctgcttcccccctttcccactccgcttccaccaccccccccgtccatcccatgtccaccccccccaagtgcgtcgttcctgagcaccgaatgtgtttgcataaccggagtgaaatgtactacaaatctgatgcctgcagagaagattaagtccagcatgacccagctgtctacaaccacggtctgcaaaaccgatcctcagcgtgagcctaaaggaattcttcgacacgtaaagaatctggcagaactggagaaatccgttgctaatatgtattcccagatcgaaaagaactaccttagaacaaacgtatctgaacttcagacaatgtgtcctagtgaggtgactaatatggagattacctcggagcagaataagggaagcctgaacaatatagtggaagggaccgagaagcagtcccactcccagagcacttccctttag

SEQ ID NO: 131171 - DNA, 4620 bp, synthetic construct
  misc_feature 1..4620: note = Description of Artificial Sequence: Synthetic coding sequence
  source 1..4620: mol_type = other DNA
atgtttcggcagttctacctgtggacttgtttggctagcggaataatcctgggatccctgtttgaaatttgtctcgggcagtatgatgacgactgcaagctggcccgtggcggccctccagcaacaatcgtcgccattgacgaagaatcacgaaatggcacgattcttgtagacaatatgctcatcaaaggtacggctggaggaccagaccccacgatagaactctcactcaaggataatgtggactattgggtgcttatggatcctgtaaagcagatgctttttctcaatagtaccgggagggttctcgacagggaccctccgatgaatattcactccattgttgttcaggtgcaatgcataaacaagaaagtggggacgatcatctaccacgaggtccgcatcgtggtgagagataggaatgataatagtcccacctttaagcatgagagttactatgctaccgtgaacgagctgacacccgtcggtaccaccatcttcacaggtttcagcggtgacaacggggctacagacatagatgacgggcctaatggccaaattgaatacgttatccagtacaacccggatgatccaacttccaacgacacttttgagatccccctaatgctcacggggaatatcgtactgcgaaagcgcctcaattatgaagataaaacaagatactttgtgataatccaggcaaacgacagggcacagaacctcaatgaaagacggacaaccacgactacattaaccgtggatgtactggatggcgatgacctcggccccatgttcctgccatgcgtgttggtgcccaatacccgcgattgccgccccctcacttaccaggccgccattcccgaactgaggacaccagaagagctgaatcctatcattgtgacacctcctattcaggccatcgatcaggatcgcaacattcagcctccatctgacagacctggaattctgtatagtatattagtgggaacacctgaagactatccccggttctttcacatgcaccctcggactgccgagctctcattgctggagccagtcaaccgcgattttcaccagaagttcgacctcgtcattaaggcggagcaggataacgggcacccattacctgcttttgccggcctccacattgaaattctggatgagaataaccagtcaccctattttaccatgccaagctaccaggggtatatcctagaatctgcacccgttggcgccaccatctctgattctctcaacttgactagtcccttacggatcgtggctctcgataaggacatcgaagacacaaaggatccagagctgcacctgttcctcaatgactacacatctgtctttaccgttacccagaccgggatcactcggtacctcaccctcctccagccagtggacagagaggagcagcaaacctacacattcagtattacagcctttgatggcgtgcaggagtctgagcctgtcattgtgaacatccaggtaatggatgccaatgataataccccgacatttcccgaaataagttacgatgtgtacgtctacacagacatgaggcccggcgatagcgtaatccaattgaccgctgttgatgccgatgagggaagtaatggggagattacgtacgaaatcttggtgggagcccagggggactttattatcaataagacaactggcctgatcactattgcccccggagtagagatgattgtggggcgaacctacgctcttactgtgcaggccgcggataacgcacccccggcagaacggcgcaattcaatttgcaccgtgtatattgaggtactccctccaaataaccagtccccgcctcgatttccccagctgatgtattccctggaaatttccgaagccatgagggtgggggcggttcttttgaatcttcaggcaacagaccgcgagggcgactcaatcacttacgccatcgagaatggcgacccgcaaagagttttcaacctcagcgagactaccgggatactgacgctgggaaaggctctagatcgcgaaagcactgaccgttatattctcataattacagcttcagacggccggcccgacggcacttccacagctacagtgaatatagttgtcaccgacgtgaacgataacgcccccgtgttcgacccctaccttccaagaaacctctcagtcgtggaggaggaggccaacgcattcgtcggacaagtgaaggcaaccgatccagatgccggaattaatggacaggtgcactacagcctcggtaacttcaacaatttgtttcgcattacttctaacggaagcatctacacagctgttaagctcaatcgcgaggtcagagactattacgaactggtcgttgtggcaactgatggtgcagttcacccccgacacagcactcttaccctggcgattaaggttctggacatagatgacaattcaccggtcttcacaaactccacctatacagtgttagtggaggagaatctgccagctggaaccacaatcctgcagattgaagcaaaggatgtcgatctgggggccaacgtatcttaccggattagaagccctgaggttaagcacttcttcgccttgcatccgttcaccggggagctgtctctgctgcgtagtctggactatgaggcctttccagatcaggaggcctccataacattccttgtggaagcattcgacatatacggcacgatgccacccggaatagcaactgtaactgtaatagtgaaggacatgaatgactatccacccgtattctccaagagaatatataagggcatggttgccccagatgccgtcaaagggacgcctatcaccactgtctacgccgaggatgcagatcctcccgggttacctgcgtctcgggtccgatacagggtggacgatgtgcagttcccttatcctgcctccattttcgaagtcgaagaagactctggtagggtgataacccgggtgaatctgaatgaagagcccactaccattttcaaactggtggtggtggcctttgatgacggagagccagtgatgtctagcagtgccaccgtgaagatccttgtgctccatcccggggaaatccctaggtttacccaggaggagtataggcccccaccggtttccgagcttgctactaaaggtacgatggtgggcgttatctccgctgcagccatcaaccaatccattgtatactctatcgtgagtgggaacgaagaagacacattcggaattaacaacataaccggcgtgatctatgtgaacggccctttagactatgagactcggacctcctacgtgctcagggttcaggccgattcactggaagtggttctggctaacttgagagtgccgagcaagagcaacacagccaaagtatacattgagatccaagatgagaacaaccaccccccagtttttcagaaaaaattttatataggaggcgtttcagaggatgcccgcatgttcacttctgtgttacgggtgaaggcgactgacaaggataccgggaactactccgtaatggcttacagacttattatccctcccattaaagagggcaaggaggggtttgtggtcgaaacttacactgggctcatcaaaactgccatgctcttccataatatgagacgaagttactttaagtttcaggttattgccacagacgactatggcaagggcttatctggaaaggcagacgtgttggtctccgtggtgaatcaattggacatgcaggttatagtttctaatgtgccacctaccctggtggaaaaaaaaatcgaagatctaaccgagatactcgaccgatacgtgcaggagcagatacctggtgctaaagtggtggttgagtcaattggagcaagacgccatggagatgctttcagcctcgaagattacaccaagtgcgacctcactgtgtatgcaatcgacccgcagaccaacagggcaattgaccgtaatgaactgttcaagtttcttgatggtaaactgctagatattaataaagattttcagccttactatggggagggcggacgcattctcgaaattaggaccccagaggcagtcaccagcatcaaaaaaagaggcgagagtctgggctataccgaaggagctttgcttgctttggcctttatcatcatcctgtgctgtatccccgccatacttgtggtactggtcagctataggcagtttaaggtgcgccaggccgagtgcaccaagacagctcgcattcaggccgcccttccagctgcgaaaccagcggttcctgctccagctccagttgccgcacctcctccaccccctccccccccacccggagctcatttgtatgaagaactgggggacagttccatgcataagaattatccctggtccctcgaactcatcctggcacgcaatatggataagattattaccgtaatgagcatggggatgaagtgcctgaatatgggggtggcggtcgattgctaccaccaactggaccgccggaatatggtccggtggctggtgaagctcaggaagaatatgagacgtaagagaaaaagtcagaggaagctgaagaaccagaggctgaaacttgagtctctggtccgcaggaaaaaatag

SEQ ID NO: 131172 - DNA, 2160 bp, synthetic construct
  misc_feature 1..2160: note = Description of Artificial Sequence: Synthetic coding sequence
  source 1..2160: mol_type = other DNA
atgtttagacaattctatctttggacttgtctcgcgtccggcatcattctcggatctttgtttgagatttgccttggccagtatgatgatgactgtaaactcgccaggggcgggcccccagctactattgtggcaatcgacgaggaatcccgtaatgggactatcttagtcgataacatgttgataaaggggacagcaggaggaccagatccgactatcgagcttagcctgaaagataatgtcgattattgggtgcttatggaccctgtgaaacaaatgctgtttttgaactcaactggcagggttctggacagagatcctcctatgaatatccacagcatcgtagtccaggtgcagtgtatcaacaagaaggtgggtaccatcatctatcatgaagtgaggatcgtcgtcagagatagaaatgacaacagtcctacttttaaacatgagtcttactatgccacagttaacgagttgaccccagtcggaaccacgatcttcacaggcttctctggcgataatggcgccacggacattgacgatggtcccaatggacagatcgaatacgtgatccagtataacccggacgatccaactagcaacgacaccttcgaaatacctctgatgctcacgggcaatatagttctccgtaagagattgaattatgaagacaaaactcgctacttcgttattattcaagccaatgatcgcgcccagaatttgaacgagagaaggactacaacaactactctgactgtcgacgtgttggacggcgacgaccttgggcccatgttccttccctgcgttctcgtgcccaacacgcgggattgtagacccctgacttatcaggcggcaatcccagaactgcgcactccagaggagctcaaccccataatcgtcactcccccaatccaggctatcgatcaagatcggaacattcagcctccatcggatcgccccgggatcctctactcaatactcgttggaacccctgaggattacccaaggttcttccatatgcaccctcggacagctgagctaagcctcctagagcctgtcaaccgcgacttccaccaaaagtttgatctggttattaaagcagaacaggacaatggtcaccccttgcccgcctttgcgggactgcacatcgagatcctcgacgagaataatcagtctccatacttcacgatgccctcctatcaaggatacatactggagtctgcgcccgtcggagcaaccatctccgattcactgaacctgactagcccactaagaattgtggcgctcgataaggacatcgaagatgaagaacccaagaagattaagaagcctaaagtagaaatccgcgaaccatccgaggaggaagaagtcgttgtcaccatagaaaagccacccgccgctgaacccacatacacgacctggaagcgagcgcgaatcttccccatgatcttcaaaaaagtgagggggctggctgacaagaggggaattgtggacctggagggcgaggagtggcaacgacgcctggaggaagaggataaggactatcttaaattgactctggatcaagaggaagcaaccgagtccaccgtagagagcgaggaggagagtagctccgactacaccgaatattctgaggaggaaagtgagttctctgaaagcgagacgaccgaggaggagtctgaaagcgagacaccatccgaagaggaggaatctagcacccccgagtcagaggagagtgaaagtactgagtcagaaggcgaaaaggcaaggaaaaacattgttctagcccggcgtagaccaatggtggaagaggtaaaggaggtaaagggccgcaaagaggaacctcaggaagagcagaaggaacccaaaatggaggaagaagaacattcagaggaagaagaaagcggtcctgccccagtcgaggagtcaactgaccctgaggcccaggatatacctgaagaagggtcggccgagtcagctagcgttgagggaggcgtagaatccgaagaggaaagcgaatctggcagctcgtcaagttccagtgaatcccagtcaggcggcccctggggttatcaggtgccggcgtacgatagaagcaaaaatgcaaaccagaagaagagccctggtgctaactctgagggctataacactgcattgtag

SEQ ID NO: 131173 - DNA, 1953 bp, synthetic construct
  misc_feature 1..1953: note = Description of Artificial Sequence: Synthetic coding sequence
  source 1..1953: mol_type = other DNA
atgtttaggcagttctacttgtggacttgtcttgcctctggaataattctgggtagtctgtttgaaatttgccttgggcagtacgatgatgattgcaagcttgctcgcggtggtccccctgccactatcgtagccatcgatgaggagagcagaaacggtaccattttagtggataatatgcttatcaagggcactgcgggaggccccgaccccactatcgagctgtcactcaaagacaacgtcgattattgggtactgatggacccagtgaaacaaatgctgttcttgaacagcactggcagggttttagacagggaccctcccatgaacattcatagtattgtggtgcaagtgcaatgtattaacaaaaaggtggggactattatctatcatgaagtgcgaatagttgtgcgcgatcgtaatgataactctcctaccttcaagcatgagtcgtactatgctaccgtgaacgagcttacccctgtcggtacaaccatattcactggcttcagcggggacaacggggctactgatatcgatgatgggcccaatgggcaaatcgagtacgtgattcaatacaatcctgatgatcctacaagtaacgacacctttgaaatccctctcatgctcactggaaacatcgttctccgaaaacggctgaattacgaggataaaacgagatattttgttattattcaggcaaatgatcgcgcccagaacctcaatgagcgccggaccaccaccactacactcaccgtggacgtcctcgacggcgatgatttgggaccaatgtttctgccctgtgtgttagttccgaatacccgcgactgtcgtcctctcacctaccaggctgccatacctgagctgagaacgccggaggagctgaaccctataattgtaacccccccgattcaggccatagatcaggatcgaaacattcagcccccaagcgacaggcctggcatactttactctatcctcgtcggtacacccgaggattatccaaggttctttcatatgcaccctcgtactgccgagctatcattacttgaacccgtaaaccgggattttcaccagaagtttgacctcgtcattaaggaggagccgaaaaaaattaagaagcctaaggtagaaattagggaacccagtgaggaggaggaagtggtggtgacaatagagaagccgcccgccgcagagcctacctacactacctggaagagggctcgcatcttcccaatgatcttcaagaaagtcagaggactggccgataagcgcggcatcgttgacctcgaaggtgaagaatggcagcggagactagaggaagaggacaaggactatctgaagttaaccttggaccaggaagaggcgactgagtccaccgtggaaagtgaagaggagagcagttctgattacaccgaatactctgaggaggaaagcgaattctccgagtcagagacaaccgaggaggaatccgagtccgagacaccttcagaagaggaggagtcgagcactccggaaagcgaagaatccgaaagtaccgagtccgagggtgaaaaagcacgaaagaatatagtgctcgcccggaggaggccaatggtcgaagaggtgaaggaggtgaaggggcgcaaagaggagccccaagaggagcagaaggagccaaaaatggaggaggaggagcattccgaagaggaggagagcggaccagctccagtcgaagagagtaccgatcccgaagcacaggacatcccagaggaggggtctgcggagtcagcgagtgtcgagggcggggttgaatcggaggaagagtccgagtctggtagctcctccagctcaagcgagtcccagtctgggggaccttgggggtaccaggtgcccgcctacgacagatcaaaaaatgcgaatcagaagaaatctcctggtgctaactccgaaggttataataccgcgctgtag

SEQ ID NO: 131174 - DNA, 5358 bp, synthetic construct
  misc_feature 1..5358: note = Description of Artificial Sequence: Synthetic coding sequence
  source 1..5358: mol_type = other DNA
atgtttcgccaattttatctatggacctgtcttgcttccgggatcatactcgggtccctgttcgagatttgtctaggccaatacgacgatgattgtaagttagcgaggggcggaccccctgcaacaatcgttgccattgatgaagaaagccgcaacgggaccattcttgtggacaatatgctgataaaaggtacggcagggggccctgaccccactatagagctgtccctcaaggacaacgtggattattgggtgctcatggatccggtaaaacagatgctctttttgaactcaaccggacgcgtgcttgaccgggatccccccatgaatatccatagtatagtggtgcaggtgcagtgtattaacaagaaagtaggcaccatcatctatcacgaggtgagaatcgtcgttcgagataggaacgataactccccgacctttaaacatgaatcctattacgctacagtcaacgagcttacaccagtcggcacaacaattttcaccgggttttctggggataacggcgccacagatatcgacgatggacccaacggacagattgagtacgtaattcagtacaaccctgatgacccaacatctaacgacactttcgaaattcctttgatgctgacaggcaacattgtgctacgtaaacggttaaactatgaagataagacaagatactttgtgatcatccaggcgaatgatagggcgcagaacctcaacgaacggaggacaaccacaactactctgactgtagatgtcctagacggggatgacctgggacccatgttcctaccctgcgtcttagtgccaaatacaagagattgcaggccgttgacgtaccaggccgctatcccagaactgaggaccccggaagagcttaaccctatcattgttaccccccctattcaggctattgatcaggacaggaatattcagccgccaagcgaccgtcctggcatactctactccatcctggtggggaccccggaagactacccaagatttttccacatgcatcctcgcactgcagagctgtctttactggagcctgtgaatcgggatttccatcagaaattcgaccttgttattaaagcggaacaagataacggtcaccccttaccagctttcgctggcctccacattgagatcctcgatgaaaacaaccagagtccgtattttaccatgccctcctatcaaggctacatcttagagtcagcaccggttggcgctactatcagtgattcattaaatttgacatccccactgagaattgtggccctggataaagacatagaggatgtcccacccagtggcgtgccgactaaagaccctgagctgcatctctttcttaatgactacacatcggtgttcacagtcacacagaccggaatcaccaggtacttgaccctactgcaacctgtggacagagaggagcagcagacttacaccttcagcatcaccgcttttgatggggtgcaggagtctgaacctgttatcgtaaacattcaggtgatggatgccaacgataataccccgacttttccagagatctcgtatgatgtgtacgtgtatacggacatgcggcccggcgacagcgttattcaactgactgctgtagatgcagacgagggctccaatggggaaattacatacgagatcttggttggggcccagggggactttatcatcaacaagacaacaggccttattacaatcgctcctggtgtcgagatgattgtaggtcggacttatgcactgactgtgcaagccgctgacaacgcgcccccagccgaaagacgaaattcaatctgtactgtgtacatagaggtgctgccccccaacaatcagtctccccctcggtttccacagttgatgtattccctggaaatctccgaggccatgagggtgggggccgtactgctgaatctgcaagcaactgatcgtgagggggactccatcacttacgccattgagaacggcgatccacagcgtgtattcaacctatccgagacaactgggatactcacactcggtaaagctttggaccgcgagtcgacagatcggtacatcctgatcattaccgcgagcgacggcagaccagatggcacctccaccgccaccgtaaacatcgtcgtcaccgatgtgaacgataacgccccagtcttcgacccttacctgcccaggaatttatccgtggtggaagaggaggccaacgcatttgtgggccaggtgaaggcaacagacccagacgcaggcatcaacggccaggtccactattctttgggaaacttcaacaacttgtttagaatcacttccaacgggtctatttatactgctgtaaaactgaacagagaggttcgggattactacgagctcgtcgtagtggccactgatggtgctgtccatcctcgccattctaccctgacgctggcgattaaggtgctggacattgatgataactcccccgtgttcacaaattctacctataccgtactagtggaagagaatctgccagcggggaccactattctccagatcgaagctaaagacgtggatctgggcgccaacgtgagttataggattcggagtcctgaagtaaagcatttcttcgccctgcacccttttacaggagaactctccctcctgcggagtctcgattacgaagcgtttccagatcaggaggcgtctatcactttccttgtggaagcctttgatatctacggaactatgccccctgggatagctacagttacagttatagtgaaggatatgaatgattatccgcctgttttctcaaaacgcatctataaaggcatggtggctcccgacgccgtgaaaggaaccccaattactaccgtgtacgcagaagatgcagatcccccgggcctacctgcctcacgcgttagatatcgggtagatgacgtccagtttccttatccagcgagtattttcgaggtcgaagaggatagcgggcgagtcattactcgagtgaacctcaatgaagaaccaactaccattttcaaactagtggtggtggcctttgacgacggggagccagttatgagcagctccgctactgtgaaaatcctagtgctgcaccccggcgagatcccccggtttacacaggaagaatacagacctcctccagtgtcagagctggctactaaagggactatggtgggagttatttctgctgcagccatcaatcaatccatagtttactcaatagtgagcggcaatgaggaggacacgtttgggatcaataatattaccggcgttatttacgtcaatggcccattagactatgaaacccgtactagctatgtgctgagagtccaggccgactccctggaggtggtcctcgccaatcttcgggtgccaagtaagagcaatacagctaaagtgtatatcgaaattcaggatgagaataatcatccccctgtcttccagaagaaattctatatcggaggtgtaagcgaagatgcaaggatgtttaccagcgtgcttcgcgttaaagccaccgacaaggacaccggcaactactcggtgatggcttatagactgatcattccgcccataaaagaggggaaagagggctttgtcgttgagacttacaccggtctcatcaagacggccatgttattccacaatatgcgacgatcctacttcaagttccaggtaatcgctacagacgattacgggaaggggctcagcggcaaggctgacgtacttgtctctgtggtgaatcagcttgatatgcaggtgatagtgtccaacgtgcccccaactttggtcgagaaaaagatagaggatttgactgaaatcttggatagatacgtacaagagcaaatccctggtgccaaggttgtagtcgagtctataggggctcggagacatggggacgccttctctctcgaggattacaccaagtgtgatttgactgtgtatgccatcgacccacagactaacagagctattgaccggaacgaattgttcaaattcctggatggtaagctactcgacatcaataaagacttccagccttattacggggaggggggacgcattcttgagatacgcacccctgaagctgtcacctcaatcaagaaacggggggaaagcttgggatatacagaaggggcattgctcgcgttggcattcatcatcatcctgtgttgtatacctgcaatcctcgtggtccttgtttcatatcgccagttcaaggtacggcaagctgaatgtaccaagaccgcccgtatacaagctgcgcttcctgctgctaaaccagcagtgcctgcacccgcccccgtcgcagcacctccccctcccccacctcctcccccaggggctcacctttatgaggagctgggcgatagcagtatgcacaagtacgaaatgcctcagtatggttccaggaggaggctcctcccacccgcaggtcaagaagaatatggggaggtcgtgggggaagccgaggaggagtacgaggaggaagaagaagagcccaagaaaataaaaaagcctaaggtcgaaatcagagagccctccgaagaagaggaggttgtcgtaaccattgagaaacctcccgccgctgagcccacttacacaacttggaaacgagctcggatttttcccatgattttcaaaaaggtgagaggcctcgccgataagcgggggatcgtggacctggaaggtgaagagtggcagagacgcttggaagaagaagacaaagattatctcaagctcacactggaccaagaggaagctacagagagtacagtcgagtctgaagaggaatcctctagtgattacacagaatactctgaggaggagagtgaatttagcgaatcagagactactgaggaggagtctgagagcgaaacaccctccgaagaagaagagtctagcactcccgaaagtgaagaatccgagtcaacagagagtgagggcgaaaaggcccgaaaaaacattgttctggcaaggcgaagaccaatggtggaagaggttaaggaggtaaaagggaggaaagaggaacctcaggaagagcagaaagagcccaagatggaagaggaagagcacagtgaggaagaggagagtggacctgccccggtcgaggaatccacggatcccgaggcacaagatattcctgaagagggtagcgccgagagcgccagcgtggaagggggggtggaaagcgaggaggagagcgagtctggtagctcctcctctagttctgagtctcagtcgggtggcccgtggggctaccaggtgcccgcttacgaccgcagcaaaaatgcaaaccaaaagaagagcccaggagccaactccgaagggtacaataccgccttgtag

SEQ ID NO: 131175 - DNA, 2946 bp, synthetic construct
  misc_feature 1..2946: note = Description of Artificial Sequence: Synthetic coding sequence
  source 1..2946: mol_type = other DNA
atgttccggcagttttatctgtggacttgcctggcctcgggcattatcctaggctccctctttgaaatttgccttggacagtacgatgatgattgtaaactggcaagggggggacctcccgccactatcgtagccatcgacgaagagtccaggaatggaacaatacttgttgataatatgctgatcaagggcacggccggcggcccggatcccacaatcgagctgtccttgaaggataacgtggactattgggtgttaatggacccggtgaaacagatgctgtttctaaactcgactgggagggtgttagatcgagacccgccaatgaacatacattcaatcgtcgttcaagtgcaatgcatcaacaagaaagtgggcactatcatctaccacgaggtgcgcatcgttgtaagggacaggaacgataacagccccacatttaagcacgagtcttactacgccaccgtaaacgagctaactcccgtgggcactactatttttactggtttcagcggcgataatggcgctacagacatcgacgacgggcccaacggacagatagaatacgtgattcagtataatcctgatgacccaacatcgaacgataccttcgaaatcccgctcatgcttactggaaacattgttcttaggaaacgactgaattacgaggataagactcggtacttcgtgattattcaggccaacgaccgggctcagaacctcaatgagcgccggaccactaccaccaccctgacagtggacgtcctggatggcgacgacctggggcccatgtttttgccttgtgtgctggtacctaacacacgggactgccggccacttacataccaggccgctattcccgagttaagaacccccgaggagctaaacccaatcatcgtcacgcctccaattcaggctattgaccaggaccggaatatccaacccccaagcgaccgacctggcatcctgtactcaatcctggtggggacacctgaggactaccctcggtttttccatatgcaccccagaacagccgagttgtcactgctggagcctgtcaacagggatttccatcagaaatttgatcttgtcatcaaggccgagcaggacaacggccatccgctccccgccttcgcagggctgcacatcgaaattctcgatgagaataaccagtcaccgtacttcacaatgccatcctaccaagggtacatcttagagtcagctcctgtcggtgctaccatttcggattctctcaacctgacctcgccgctgcgcattgtggccctggacaaggacatcgaggatacgaaagacccggaacttcatctattcctgaatgattacacctcggtctttaccgtaacccagactggtataacccgttatctgaccttactccagccggtcgacagggaggaacagcagacttatactttctctatcacagcattcgacggggtgcaggagagcgagccagtcatcgtgaatatccaagttatggatgctaacgacaacactccgacgttccccgaaattagctacgatgtttacgtgtatacagatatgaggccaggcgactccgtgatccaactgacagcagttgacgctgacgaaggatctaatggggagataacctatgagattctcgttggcgcccaaggtgatttcattattaacaagaccacaggattaattactattgctccgggcgtggagatgatcgtgggtcgaacatacgccttgacagttcaggccgcagacaacgctcctccagctgagagacggaacagtatttgtactgtctatatcgaggtcctgcctcccaataatcagtcacccccaagatttccacagctcatgtatagtctagagattagcgaagctatgagagtaggcgccgttttgctgaatctgcaagctaccgatagggaaggcgattcgatcacttatgccatagagaacggcgaccctcaacgtgtcttcaatctgagcgagacaacaggaattttgacccttggtaaagcgttagaccgggagtcgaccgaccggtatattttgatcattacggctagcgatggacggccagatggagaagaacccaaaaagattaagaaaccaaaagtggaaatcagagagccttccgaagaggaggaggtcgtggtcacgatcgagaagcccccggctgccgagcccacttacacaacatggaagcgagccaggatcttcccgatgatatttaaaaaggtgagagggctggccgataaacgcggtatcgtggacctcgaaggcgaagaatggcagcgaagactggaggaagaggacaaggattatctgaaactcactctggaccaggaggaggcaacagagtctacagtggagtccgaagaagaaagcagttccgattacacagagtattccgaggaggaaagcgagtttagcgaatccgagaccacagaggaggagagcgagtcagaaacaccgtccgaagaagaggagagcagcactccagagagcgaggagtctgaaagcactgaatccgagggcgagaaagccaggaagaatattgtcctggcacgccggcgtccaatggtggaggaggtgaaagaggtcaaaggcagaaaggaagagccccaggaagagcagaaggaaccaaagatggaagaggaggagcattcggaagaagaggagtccggaccagcccccgtagaagaaagcaccgatccagaggctcaggatattccagaggaagggagtgcagagagcgcctcagtagagggcggagttgagtctgaagaagagtctgaatccggttcatccagctctagctcagaatcccagtctggagggccatgggggtaccaggttccggcctatgataggagcaagaacgctaaccaaaagaagagccctggggcaaatagcgaaggttacaatacagctctctag

SEQ ID NO: 131176 - DNA, 3453 bp, synthetic construct
  misc_feature 1..3453: note = Description of Artificial Sequence: Synthetic coding sequence
  source 1..3453: mol_type = other DNA
atgcccagctatcaagggtatatactggagagcgccccggtgggagcaactatctcggattcactgaatctgactagccccctgcggatagtagccctggacaaggatattgaggatgtgccgccttcaggggtacccactaaggatccagagcttcatctgtttctgaacgactacacctccgtgttcaccgtgacacagactggcatcaccaggtacctaaccctactgcagcctgtagacagggaggaacaacaaacttacacattctccatcaccgctttcgacggagtgcaggagagtgaaccagtgattgtgaatatccaagtgatggatgctaacgacaacacgcccacctttccggagatatcttatgatgtgtacgtgtatacggatatgcggcccggcgacagcgtaatccagctgacagcagttgacgcagacgaaggttctaacggcgaaatcacctatgagatacttgtaggtgcccaaggagactttataatcaacaaaacgacaggactgataactatcgctcctggggtggaaatgatagtgggtaggacctacgcactgactgtacaggcggccgataacgccccacccgcagaaaggcgcaacagtatatgtacggtatacatcgaggtgctccctccgaacaaccaaagtccgccacgcttcccgcagctaatgtactctcttgagatcagcgaggcgatgcgggtgggcgccgtgttactgaatctacaagccacagacagagagggggattctatcacatacgcaattgagaacggcgaccctcagagagtgtttaatctgtccgagaccactggcatcttaactctgggcaaagcgttagaccgagagtccacggataggtatatactcattattactgccagcgatggccgtccagatggcacgtctaccgccactgttaatatcgtggttacagacgttaatgataacgccccagtgtttgatccttacctaccccggaacctgagtgtcgtggaggaagaggcaaatgccttcgtggggcaagtgaaggctaccgatccagatgccggcatcaatgggcaggtgcactactcccttggtaacttcaacaacctgttccgtattacctctaacggatcgatatacaccgcggtgaaattaaacagggaagtgcgtgactactatgagcttgtcgtggtcgccacagacggtgctgtacatccccggcatagtaccttgactcttgctattaaggtcctcgacatcgacgacaattcacccgtcttcacaaatagcacatacactgtgttagtcgaggaaaatctgcctgctgggactacaattctgcagattgaagccaaagacgtcgacttaggtgcaaacgtgtcatatcggatccggagtcccgaagtcaagcacttttttgccctgcaccctttcactggagagctatctctgttgcggagtctagactatgaggcattccctgaccaggaagcgagtattaccttcctcgtggaggccttcgatatttacggtacaatgccaccgggaatagcgactgtcacagtgatcgttaaggacatgaacgattaccctccagtgttctcgaaaaggatttataaaggaatggtagcgcccgatgccgtcaaagggactccaattactaccgtctacgccgaggacgccgaccctcctggcctgcccgcttctagagtgaggtatagggtagacgacgtccagtttccttatccagcaagtatcttcgaggttgaagaggatagcggaagggtgattactcgcgttaacctgaatgaggagcctactactatatttaaactcgtggtggtggcgttcgatgacggcgaacccgttatgtcctccagtgctacggtgaagatccttgttctgcaccctggggagattccaagatttacccaggaagaataccgaccgccccccgtgtccgagttggccacaaaagggaccatggttggtgttatctcagcagctgcgataaatcagagcatagtgtacagcattgtgtccggcaacgaggaggatacattcggcataaacaacatcaccggggttatatacgtgaatggacccctagattacgagacgcgcaccagttatgtcttgcgcgtccaggccgactcactggaggttgtactcgctaatttgagagtgcctagtaagagcaacaccgccaaggtctatatcgaaatacaggatgagaacaaccaccccccggtgtttcaaaaaaagttttatattggtggtgtttctgaggacgcccggatgttcacgtctgttttgcgggtgaaggcaacggataaagataccgggaactactcagtgatggcttaccggcttatcatcccccccattaaagaaggcaaggagggcttcgtggtggaaacttatactgggctgattaaaaccgctatgctgtttcataacatgagaagatcatatttcaaatttcaggttatagcaaccgacgactatggtaaagggctcagtggcaaagcagatgtgctagtgtcagtcgtcaaccaactggatatgcaggttatagtttctaacgtaccacccactctggtcgaaaagaagatcgaagacttgaccgagattctggatcggtatgttcaggagcagatccctggcgcgaaagttgtggtagaaagcattggcgcccgaagacatggagatgcattttccttggaggactacaccaagtgtgatttgacggtatacgctatagacccacagacaaacagagccatcgacagaaacgaactttttaaatttctggatggcaagctgttggacatcaataaggattttcagccttattacggggaaggcggcagaattttggagattagaacaccagaagccgttactagtatcaaaaagcgcggagagtccctgggatacaccgaaggcgctctcctcgccctcgcttttattattattctttgttgcatacctgcgatcctggttgttctggtcagctataggcagttcaaggtgcgccaggccgaatgtacgaaaacggcgaggatccaggcggctctccccgccgctaagccagccgtgcctgcgccagcgcctgtggctgctccacccccgcccccacctccaccaccaggagcccacctttatgaggagctgggtgacagctccatgcataaaaactacccctggtccctggaattgattctggcgcgcaatatggataaaataatcactgtgatgtccatgggtatgaagtgtcttaatatgggtgttgcggtcgactgctaccaccagctggatagaaggaacatggtgcggtggctggtcaagttgcgaaaaaacatgagacgtaagcgcaaaagtcagcgcaaactgaagaaccagcgcctgaaactggagagtttagtacgtcgcaagaaatag

SEQ ID NO: 131177 - DNA, 990 bp, synthetic construct
  misc_feature 1..990: note = Description of Artificial Sequence: Synthetic coding sequence
  source 1..990: mol_type = other DNA
atgtttcgccagttctatctctggacatgcttggccagcggtataatccttggctccctgtttgagatctgtctcggccagtacgatgacgactgcaagttagcgcgtggggggcctccagccacaatcgtagccattgatgaagagagcagaaatggcactatcttggtggataacatgctcattaagggaaccgccgggggacccgatcccacgatcgagcttagcttgaaagacaatgtcgattactgggtgctcatggatccagtgaagcagatgctgtttcttaacagcacgggacgcgtattggatcgcgatccacccatgaatatacatagcattgtcgtgcaggtacagtgtattaacaagaaggttggcacaatcatctaccacgaggtgcggatcgtggtgagagatcggaacgataacagccctacatttaagcacgagtcatactacgcaactgttaacgaactgacacccgtgggcacaactatctttaccggattcagcggcgataacggcgccacagatatcgacgacggccctaacgggcagatcgaatatgttatacagtacaaccctgatgatcccacatccaatgacaccttcgagatccccctgatgttaaccgggaacattgttctgcgcaaacgcctcaactacgaagacaaaacgaggtatttcgttattattcaagcgaacgatagagcccagaacttaaatgaacgaaggactacgacgactacactcacagtagatgttttggatggcgacgacctggggcctatgttcttgccatgtgtgttggtgccaaacacccgcgattgcaggcctcttacataccaagcagccattcctgagttaagaacgccggacctggggtcactgtgcagcggtactaactcctggtgccagggcagatcgggtgtacactggtcttcgccggcttggaggtgcctgttcccccggaggctccaccagatgtag

SEQ ID NO: 131178 - DNA, 5046 bp, synthetic construct
  misc_feature 1..5046: note = Description of Artificial Sequence: Synthetic coding sequence
  source 1..5046: mol_type = other DNA
atgtttcgacaattttatttatggacgtgcttggcgtccggtatcatcctgggatccctgttcgagatttgtctgggccagtacgatgacgggtggagatatatgtactgcaagctggccagaggcggccccccagcaacaatcgtggcgatagacgaggagtcacgcaatggtactatcctggtggataacatgctgattaaaggcacagctggcggccccgacccaaccatcgaactgtcgctgaaggataacgtcgactactgggtgttaatggacccagtgaagcagatgctctttctgaatagcaccggcagggtcctcgacagggatccacccatgaacatccattcaatcgttgtacaggtccagtgcatcaacaaaaaggtggggacaatcatctaccacgaggtgcggatagtggtccgcgataggaatgacaattccccaaccttcaaacacgagagttactatgccaccgttaacgaacttactcccgtggggacgacaatctttaccggcttcagtggcgacaacggggcaacagacattgacgatggtcctaacgggcagatagaatacgtgatccaatacaatccagacgatcccacaagcaacgacaccttcgagattcctctcatgctgacaggcaacattgttcttcgcaagcgcctgaattatgaggataagacacgatatttcgtaatcatccaagcgaatgacagagcccagaatctcaacgaacgtcgtacaactaccacaaccttaacagtagacgtcctggacggcgacgacttgggtccgatgttcctgccctgcgtgttggtccccaacacgcgcgattgtcgcccgctcacgtaccaggccgccatccctgaactgaggacacctgaggagttgaatccaattattgtgactccaccaattcaggcaatcgatcaggacaggaatatccagcctccttccgacagacctggaatcctatactctattctcgtcgggacaccagaggattatccccggtttttccacatgcaccctaggaccgccgaattgagtcttttggagccggtcaaccgggatttccaccagaagttcgacctcgtgatcaaggccgagcaggacaacgggcatcctttacccgcatttgccgggcttcatatcgagatccttgatgagaataaccagtcaccatatttcactatgccatcttatcaggggtatatccttgaaagcgcgcccgttggagcaaccattagcgacagtctcaacctgacctccccattgcgaattgtggcactggacaaggatatcgaagacactaaggacccggaactccacctcttcttgaacgattacaccagcgtgtttactgtgactcagaccggcatcaccaggtacctgactctgttacaacctgtcgatcgtgaagagcagcagacctatacattttctataacagcatttgacggcgtccaggagagcgaaccggtgattgtgaatatccaggttatggatgcaaatgacaacacaccgaccttcccagaaatatcttatgacgtctacgtatataccgacatgcgacctggtgatagcgtaatccagttgaccgctgtcgacgccgacgagggctccaacggagagattacgtatgaaatcctcgtgggcgcccagggagatttcattatcaacaagactaccggcctgatcacaatcgccccgggagtcgagatgatagttggcagaacttacgcgctaacagtgcaagccgccgacaacgcaccccctgctgagcgtcgaaactccatttgtaccgtgtacattgaggtgttgccaccaaacaaccagagccctcccagattcccgcagctcatgtactccctcgaaattagcgaggccatgcgagtaggagcggtgctgcttaaccttcaggctactgacagagagggagatagtataacctacgctattgaaaacggtgacccacagagggtatttaatctaagtgaaacgacaggaatcctcacattgggaaaagccctcgatcgggaaagtactgaccgctatattctgataattaccgccagtgatggccgcccagacggtacctctaccgccacggtgaatatcgtcgtgacagacgtgaatgacaatgcccccgtcttcgatccgtacctcccgagaaacctgtccgtcgtggaggaggaggccaatgcattcgtgggtcaggttaaagccactgacccagacgctggaatcaatggacaggtgcactatagcctgggaaacttcaataaccttttcagaataacatcaaacggttcaatttatacagcagtgaaactgaaccgcgaggtgagagattactacgaactcgttgtcgtggcaacagatggcgctgtccaccctcggcattctacactaacgttggctatcaaggtgctagatattgacgacaacagtcccgtgtttaccaactcaacgtatactgtgctggtggaggaaaaccttccagccgggactacaatcttgcagatagaagccaaagacgtagatctgggtgctaacgtctcttaccggatacggtcccctgaagtgaagcactttttcgctctgcaccccttcacaggcgagctgtcactgctgcggtcactcgactatgaggcattcccagaccaggaggccagtataacatttctggtggaggcttttgatatctatggaaccatgccgcccggtatcgccaccgtcacagttattgtcaaggatatgaatgactacccccccgtgttcagcaagcggatatataagggtatggtggcccctgacgccgtgaagggtactcccatcaccacagtttacgccgaagatgcagaccctccaggtcttcccgcttccagagttaggtacagggtggatgacgtgcaattcccctaccccgcatccatttttgaggtagaggaagattcaggcagagtgataacgagagtgaacctgaacgaagaaccgactactatttttaaactcgtcgtggtggcgttcgatgatggggagcccgtgatgtcctcatccgcgactgtgaagatcctggtgttgcatccaggtgagatccccagattcacacaagaggaatatcgccctccgcccgtgtccgaactggcgaccaaaggaacaatggtaggggtcatctctgctgccgcaattaaccagagcattgtgtactctattgtctccggcaacgaggaagacacttttggcatcaacaatattactggggtgatctatgttaacggtcctttggactatgaaacgcggacctcttacgttttgcgggtgcaggctgactctctggaagtggtgctcgctaatcttcgtgtgcctagcaagagcaacacagccaaggtctacatcgagattcaggacgaaaacaatcacccgcctgtcttccagaaaaagttttatataggtggggttagcgaggacgctagaatgtttacgagcgttctgcgagtgaaagcgacagacaaggacaccggaaactattcagttatggcataccgccttattatccctccaatcaaggaaggcaaggagggtttcgtcgtcgaaacctacacaggtctcatcaagactgctatgttgtttcacaacatgcgacgctcatattttaagttccaggtgattgccacagacgactacgggaaagggctgtccggaaaagccgacgtgctggtgtcagtcgtcaaccagctggacatgcaggtaattgtgtcaaacgtgccaccaactctggttgaaaaaaagatcgaggatctgacagaaattctggacaggtatgtccaagagcaaattcctggggcaaaggtagtggttgaatctattggggcccgcagacacggtgatgcctttagcctggaagactacaccaaatgtgatctgaccgtttacgccatcgatccacagacaaaccgggcaatcgatcggaacgaactgttcaagttcctggatggcaaactgctagacatcaataaggactttcaaccctattatggagagggggggcgaattctggaaatacggacccccgaagcagtgacatcgatcaagaaaaggggcgaaagtctgggctacaccgagggtgcccttttggcccttgctttcataattatcctgtgttgcattccggctattctggtggtgctggtgagctataggcagaggcaggcagagtgcaccaagaccgcgcggatccaggcggccttacccgcagctaagcccgcggtcccagccccagcccctgtggccgctccacctccacccccaccaccgccccccggagcccacctctatgaagagcttggcgactccagcatcctgtattaccgctatgaaatgccacaatacgggtcaagacggcgattgttaccaccggctggtcaggaagaatatggcgaggtggtgggcgaggccgaggaagagtatgaggaggaagaatgggcccggaagagaatgattaaactggtggtggaccgagaatacgaaactagctctacgggcgaagactcagcacctgagtgccaacgtaatcgactgcaccatccatcgattcacagcaacataaatgggaatatctatatcgcccagaatggatcggtcgtgaggaccagacgggcatgtctcactgataatttaaaggtcgcctcaccggtcagacttgggggccctttcaagaagctcgacaagctagctgtcactcacgaagagaacgtccctctgaatactttgagcaagggtccattttcaactgagaagatgaatgcgcgacccactctcgtgaccttcgcaccgtgtcccgtaggcacagataacacagctgtgaagccgcttaggaatcgcctcaaatccacagtggagcaagaatctatgatagacagtaagaatattaaggaggccctcgaattccactctgaccacactcagtcagatgacgaagagctgtggatggggccttggaataatttgcacatccctatgacgaagctctag

SEQ ID NO: 131179 - DNA, 5889 bp, synthetic construct
  misc_feature 1..5889: note = Description of Artificial Sequence: Synthetic coding sequence
  source 1..5889: mol_type = other DNA
atgttcaggcagttctacctgtggacttgccttgccagcggaattattctggggtctctgttcgagatatgcctcggccagtatgatgacgcatactcttatgaagactgtaaactggctagaggagggcctcctgctacaatcgtcgccatcgacgaagagagtcgcaacggcaccatactagttgacaatatgttgattaaaggtacagccggtgggcccgatcccactatcgagctgtctctcaaagacaatgtggattactgggttctgatggatcctgtgaaacagatgctctttctgaatagtactggacgtgtgttagacagggatccgcctatgaatattcattccatcgttgtgcaggtgcaatgcatcaacaaaaaagttggcactattatttaccacgaagtgcgaattgtcgttcgggacaggaatgataatagccctacctttaagcacgaatcttattacgccacagtgaacgaattaacgccagttggcacgaccatttttactggcttttcaggggacaacggtgccacagatatagacgatggccctaacggacaaattgaatacgtgatccagtacaaccctgacgatccaacatcaaatgatacttttgagatccctttaatgctgactggaaatatcgttctccgcaaacgcctgaattatgaggacaagactaggtacttcgttattattcaagctaatgatagagcccagaacctcaacgaacggcggactaccactaccacactaactgtggatgttctggatggcgacgatctgggccccatgtttctgccctgcgtgctggtcccaaataccagagattgccgcccgctgacatatcaggctgcaatccccgagctgcggacccccgaagagctgaacccgattatcgttactccccctattcaagcaattgatcaggaccgcaacatccagcctcccagcgaccgaccaggaatactgtactctatacttgtcggcacccccgaagattacccccgctttttccatatgcatcccaggacagctgaactgagcctgctggaaccggtcaatcgagacttccaccaaaaattcgatttggtgattaaagccgagcaggacaacggacatccactccctgcgttcgctgggttgcatatagaaattcttgatgaaaataaccaaagtccatatttcacaatgcccagttaccagggctatatccttgagagtgctcccgtcggcgccacaatctctgactccctaaaccttacctcaccactcaggatagtggctctggataaggacatagaggacacgaaggacccagagctgcacctttttcttaatgattacacctctgtgtttaccgtcacccagaccggcatcacaagatacctgacgttgctgcaacccgtcgaccgtgaggaacagcagacatacacttttagcattactgcatttgatggcgtgcaggagtctgagcccgttatagtgaatatccaagtgatggatgccaacgataacacgcccacattccccgagatatcctacgatgtgtatgtgtataccgatatgaggccaggagattccgttattcaactgacagcagtggacgctgatgaggggagcaatggtgagatcacttacgagattctagtcggcgcccaaggagactttattataaacaagaccaccggtctgattacgattgctcccggggtcgagatgattgtggggcgcacttacgcccttaccgttcaagcggcggataacgccccaccagccgaaagacggaacagtatttgtaccgtgtacattgaagtgttacctccaaacaaccagtctcccccccgcttcccccagttgatgtacagtctggaaatcagtgaggccatgagagtcggcgcagtacttctgaatctgcaggcaactgacagagaaggcgactccattacctacgctatcgagaatggcgatcctcagagggtattcaacttatcagaaacaacgggcatccttaccctgggtaaggcgctcgaccgggagtcgacagatagatatatcctgataataactgcctctgacgggcgccctgacggaacgagcacagcaaccgttaacattgtggtcacggacgtcaacgacaacgcccctgtgttcgatccgtatctgccccggaatctgtcagtagtggaagaagaagctaacgcctttgttggccaggtgaaggcgactgaccccgatgccggaattaacggacaggtccactactcactgggtaatttcaacaatctcttccgcatcacgagcaacggctccatttacacagcagtgaaactgaaccgagaagtgagagattactacgaattggttgtggtcgccaccgatggagcggtgcatcccaggcactctaccctcacacttgccatcaaagtgctggatattgacgataattctcccgtttttacgaacagcacctatacagtgctggtggaagagaatctgcccgctggaacaactatcctgcagattgaagcaaaggacgtggacctgggcgctaacgtcagttaccgtatcagatctcccgaagttaaacacttcttcgcattacaccccttcacaggggagctgagtctgctgcgtagtctggattatgaggccttcccagatcaagaagccagcatcacctttctggtggaggccttcgatatttatggaacgatgccaccaggcatcgcgacagtaactgttattgtgaaagatatgaatgactatcctccagtgttttcaaagaggatatacaaaggaatggtcgctcctgatgctgtgaagggtaccccaataaccaccgtttacgccgaggacgccgaccctccgggccttccagcatcaagagtgcgatacagggtcgacgacgtgcaattcccttaccctgcctctatttttgaagtggaggaggacagcggtagagtgatcacaagagtgaatcttaacgaggagcctacaaccattttcaagctagttgtggtagctttcgacgatggtgaacctgtgatgtcctcttccgccaccgttaaaatcctggtgctgcaccctggcgaaattcccagatttacccaagaggagtacagacctccacccgtgtccgagttagccactaagggtaccatggttggtgttatctcagccgccgccatcaatcagtctatcgtgtattctattgtgtcagggaatgaagaggacactttcggcataaataatattaccggcgtgatctacgtaaatggacccctggactacgaaacccgcacaagctacgtcctgagggttcaagccgactcactcgaggtggtcctggcgaatctccgcgtaccaagtaaatccaacacagccaaggtatatattgaaattcaagacgaaaataaccatccacccgtctttcagaagaagttctatattggaggcgtgtctgaagacgctcgtatgtttacgagcgttttacgggtaaaagcaactgacaaagacaccgggaattattccgtgatggcatataggctgattatcccacccataaaggagggaaaagaggggttcgtggtggagacctacactggactgattaagaccgctatgctctttcataatatgcgacggtcatacttcaagttccaggtcatcgccacggatgattacggaaagggtctgtccggcaaggccgacgttctagtttccgtggtgaaccagctggacatgcaggtcattgttagcaatgtgcccccaactctggtggaaaagaagattgaggacctgacggagatcctggatcgctatgtgcaggagcaaattccaggcgctaaggtggtggtggaatctatcggggcacgtcgccacggagacgcgttctccctcgaggattacactaaatgcgaccttaccgtgtatgcaattgatccccagacgaatcgggccatagacagaaacgagttgttcaaatttcttgacggaaaattattagatatcaacaaggactttcagccatattatggcgaagggggtaggatcctggaaatacgcactcctgaagctgtgacatcaattaaaaagagaggagagtccctcggctataccgagggggcattgcttgctcttgcatttatcattatcttatgttgcatccccgccattctggtggtgctggttagttatagacacttcaaacgcaggcaagcggagtgcacaaaaaccgcgaggatccaggcggctctgcccgctgctaagccagcggtccctgctccggcacccgtggccgctcctccaccaccgcctccgccgcccccaggtgctcatctatacgaagaactgggagactcctctatgaaaggcctttttctgctgtaccactttcaacaatcgcgaggcaacaactcggtctcagaagacagaaaacaccaacaggttgtcatgcctttttcaagcaatacaatcgaagcccacaagtcagcccatgtggatggctccctcaagtctaacaagctcaagtctgctaggaaattcaccttcctgtctgacgaggacgacttgagtgctcacaatcccctatacaaagagaatatctcccaagtgtccacaaattccgatatctctcagcgaaccgactttgttgacccgttcagccccaagattcaggcaaaaagtaaatctcttcgcggcccaagagaaaagatccaaaggctctggtctcaatctgtgtcactgccacggcgcctgatgaggaaggtccctaacagacctgaaattatcgatttacaacagtggcagggcaccaggcagaaggcagaaaacgagaacaccggaatatgcaccaataagcgaggttctagcaaccccctgctcaccaccgaagaagccaacttgactgagaaagaagaaatacgacaaggcgaaacgctaatgattgaaggaacagaacagctaaagagtctctcaagcgattcgtccttctgttttcctcggccgcacttttcttttagcaccctccccacagtgtcaagaactgtggaattgaaaagtgagcccaatgtcataagcagtccggcagaatgcagccttgagctctcacctagtaggccttgcgtgctacactctagcctgtcccgaagagagaccccgatctgcatgttgcccatcgaaactgagcggaacattttcgaaaactttgcccatcctccaaacatctccccctcagcttgcccactgcctccccctcctccaatcagcccacccagcccccctcctgcgccagctcccctggctccgccccccgacatcagccccttcagtctgttttgtccccctccttctcctccctccatcccattgccactgccccctcctacctttttccctttgagtgtgtccacctcaggacctccaactccccccctgctaccaccatttccaacccccctgcctccccctcccccctctattccatgccccccccctccctctgcctccttcttaagcacggagtgtgtttgcatcaccggggtgaaatgtaccactaatctgatgcctgctgagaagataaagtccagtatgacacagctgtctacaacaacagtgtgcaagaccgatccgcagcgggagcccaaggggatcctgagacacgtaaaaaatcttgcggagttggagaaaagcgtcgctaacatgtacagtcaaatcgaaaagaattatctccggactaatgtttcggaattgcaaactatgtgcccgagtgaggtcacaaacatggagatcacttcagagcagaacaaaggaagcctaaacaatatcgtggaaggcaccgagaaacagtctcattcacagtccacctctctgtag

SEQ ID NO: 131180 - DNA, 5661 bp, synthetic construct
  misc_feature 1..5661: note = Description of Artificial Sequence: Synthetic coding sequence
  source 1..5661: mol_type = other DNA
atgtttcgccaattctatctgtggacctgcctggcaagcggcattattctgggctccctctttgagatctgcctgggccagtatgatgatgattgcaagctcgcgcgcggaggccccccagccacaattgtggctatcgatgaggagagcagaaatgggactatattagtggacaatatgctcattaaagggacagctgggggacccgacccaacaatcgagctctccttgaaggacaacgtcgattactgggtgttgatggaccccgtgaaacagatgcttttcttgaactcaacgggtcgagtcctggacagagacccaccaatgaacattcactccattgttgtgcaggttcaatgcatcaacaagaaagtgggtactattatatatcatgaggtccgcatcgttgtgcgggataggaacgacaatagtcccactttcaagcacgagtcttattacgctaccgtgaacgagctgacgccagtcggtacaacgatatttaccggcttctcaggggacaacggtgccactgacatcgacgacggcccaaatggtcagattgaatatgtcatacagtataaccccgacgatcctacctccaacgacaccttcgaaatccctctgatgctgaccggaaacattgtcctgaggaaaaggctgaattatgaggataagaccagatacttcgtcattatccaggccaacgaccgtgcccagaatctgaacgaacgcagaactacaaccactacgctgacagtagacgtcctggacggcgatgacctcggcccgatgttcctgccttgcgtgctggtgcctaacactcgggattgccggcctctcacatatcaggccgcaatcccggagctgcgtacaccagaggaacttaatccaatcattgtcaccccacccattcaggcaatcgaccaggatcggaatattcagcccccaagcgacaggccaggaattctgtacagcattctggttgggacgcccgaggattacccacgcttcttccacatgcacccccggactgccgaactctctctgctggaaccggtcaatcgcgatttccaccaaaaattcgacctagtgataaaagctgagcaggacaacggccaccccctacctgccttcgctggactgcacatcgagattttggacgagaataaccagtccccctattttactatgccatcttatcagggatacatcctcgagtccgcccctgtgggagctactatttctgactcactgaaccttacatctcccctgcgtattgtggccctagataaagatattgaagatactaaagatcccgagctgcatctgttcttgaatgactatacctcagtattcaccgttacccagactggcattacacggtacttgacgctgttgcaacccgttgaccgagaggagcagcagacctacaccttctccattactgcctttgacggcgtccaggagtcagagcccgtcatcgtgaatatacaggttatggacgccaacgacaacacacctacatttcctgaaatcagttatgatgtctacgtttatactgacatgagaccaggagactctgtgattcagctgaccgcagttgacgcagacgaggggtccaacggcgaaatcacttacgagattttggtcggcgctcaaggcgacttcattatcaacaaaactacaggtctgatcactatcgcccctggtgtggaaatgattgtgggaaggacatacgccctgaccgtacaggcagcagacaatgcgccacccgcagaaaggtcaacaggtatcctgacactaggaaaggcactggaccgtgagtcgacagatagatacatcttaatcatcactgcttcggacggaagaccagacggtacctcaactgccaccgtgaacattgtggtcaccgacgtgaacgacaacgccccagtgtttgatccctacctgcccagaaatctgtcagtggtcgaagaggaagctaacgctttcgtcggacaggtcaaggctaccgatcccgacgcaggtattaacgggcaggtccactatagcctcgggaactttaataatttatttcgcataacgagcaacggtagtatctatacagctgtgaagctgaaccgcgaagtgcgggattactacgagctggtggttgtggctacagacggggcagttcacccaagacactcaactttgactttggccattaaggtcctggacattgatgacaatagcccagtatttactaactcaacttatacagtgcttgtggaggaaaatcttccagccgggacaacaattcttcagatcgaggcaaaggacgtggacctcggagctaatgtgagttaccggattcggtccccagaagtcaagcactttttcgctttgcatccttttaccggcgagctgtccctgttgagatccctggactacgaagcattccccgaccaggaggcttctataacattccttgtagaggctttcgacatctacggcacgatgccacctggtatcgccaccgttacagtgattgtcaaggatatgaatgattacccgcccgtgttttccaagagaatctataaaggtatggttgccccagacgcagtgaagggcactccaattaccacagtgtatgccgaagatgccgatccgccaggattacctgcctcccgcgttcgttatcgtgtggacgatgtgcagtttccctacccggcctccatctttgaggtcgaagaagactcaggccgcgtaattacacgggtgaacctgaatgaggaacccaccacgatatttaagctggtggtggtggcctttgatgacggggagccagtgatgagctcatccgccactgtgaagattttggtcctccaccccggcgaaatccctagatttacacaggaagaatatcggccaccccccgtctccgagctggctacgaaaggaacaatggtaggtgtcatctccgcagcagccataaaccagtcgattgtttatagcatcgtgtcagggaacgaagaagatacatttgggatcaacaacattacaggagttatttatgtaaacggcccactggattacgaaactcgcacaagttatgtgctccgtgtgcaggctgattcactcgaagttgtgctagcaaacctgcgcgtgccaagtaagtctaataccgcgaaggtgtacatagagatccaagacgagaacaatcatccaccggtgttccagaagaagttctatattggaggggtcagcgaggacgcacgaatgttcacctccgtcctgcgagtgaaagccacagacaaggatactggaaattacagtgtaatggcatataggctgattataccccccattaaggagggaaaagaaggattcgttgtcgagacctataccggcctgattaagaccgccatgctctttcacaatatgcgccgcagctattttaagttccaggtgattgccacagatgactacggtaaaggcctgtcagggaaagcagacgtgttggtgagcgtagtgaatcaattggatatgcaggtcatcgtgagcaatgtgccacccaccctcgtggagaaaaaaatcgaagacctgaccgaaatcctagatcgctatgtgcaggagcagattcccggcgccaaggtagtcgtcgagagtatcggtgctagaaggcacggcgacgcgttttctctggaagactataccaagtgcgacctgactgtctacgccatcgatccccaaacgaatagggcgatcgaccgtaatgaactcttcaagtttctcgacggaaaactgttggacatcaataaagacttccaaccctattatggagagggagggaggatcctggaaattcggacgcctgaggccgttacgtccatcaaaaaaagaggcgagagcctcggctacacagagggggcactcctggccttagccttcattatcattctctgctgcattcccgcaatcctagtcgttttggtgtcttatagacactttaagagacgccaggcggagtgcacaaaaaccgcacggatacaggcagccttaccagctgccaagccggccgtacccgctcccgctcccgtggctgccccgcctcctccaccccccccaccccccggtgctcacctttatgaggagctgggggatagcagcatgaaaggcctgtttcttttgtatcactttcagcagtccagaggtaataattcggtgtccgaggatcgcaaacatcagcaggtggtcatgcccttttcatctaatacaatagaagctcacaagagcgctcacgtggacggttccctcaagagcaacaagctaaagagtgcgcgcaaatttaccttcctgagtgatgaagacgacctttctgctcacaaccccctttataaggagaatatcagccaggtgagcactaatagtgatatcagccagaggacagatttcgtcgatccgttttcacctaagatacaggccaagtcaaagagtctgcggggtccacgggaaaaaatccaacgactttggtctcagtcagtatcgttaccccggagattgatgagaaaagtgccaaaccgccccgaaatcattgatctacagcaatggcagggcacaaggcagaaggccgaaaatgagaacaccggtatctgtacaaacaagcggggcagtagcaaccctctgctaactaccgaagaggccaatctgaccgagaaggaggagattcgccagggcgaaaccctgatgatcgaaggtacggaacaactaaagagcttgagcagcgattcgtctttctgcttcccacgccctcacttcagctttagcaccctgcccactgttagccgtactgtggagctgaagtccgagcccaacgtaatcagcagcccagccgagtgctctttagagctcagccccagcaggccttgtgttctgcacagtagcctgtcccgccgggagacccctatatgcatgctgccaatcgaaaccgagagaaatatttttgagaacttcgcccatccccccaacatctccccctccgcttgccccttacctccccctccccccatctctcctccttctcctccgcccgcccccgctcctctggccccacccccagatatctccccgtttagtttgttctgccccccgccgtccccacccagcatccccttaccgcttcctccacctactttcttcccactcagcgtcagtacatccggtccccccaccccccccctgttacctcctttccctactccactgccccccccacccccatcaataccatgtcccccaccaccatctgcaagtttcctgtctactgaatgcgtgtgcattaccggtgtgaagtgcaccacaaatcttatgcctgccgagaaaattaaaagtagtatgacacagctgtcaaccacgaccgtttgtaaaaccgatcctcagcgtgaaccgaaggggattctgcgccatgtgaagaatctggccgaactggaaaaatcggtggccaacatgtactcccagattgagaagaactacctcagaacgaatgtctccgagctgcaaaccatgtgccccagcgaagtaacaaatatggaaatcacaagcgaacagaacaaaggatcccttaataacatagttgaagggaccgagaaacagtcccattctcaaagcacaagtctctag

SEQ ID NO: 131181 - DNA, 1965 bp, synthetic construct
  misc_feature 1..1965: note = Description of Artificial Sequence: Synthetic coding sequence
  source 1..1965: mol_type = other DNA
atgtttcgccagttttatctttggacctgcttggccagcggcatcatccttggaagtttatttgagatctgcctcgggcagtacgatgacgactgtaaactcgccagaggcggtccacccgcaacaatcgtcgctattgacgaagaatcgaggaacgggactatccttgtggacaatatgcttattaagggcactgccggtggtcctgaccccactatcgagttgtcactaaaagataatgtggactactgggtactgatggacccggtcaagcagatgctttttctcaactccaccggcagagtgctggatcgagaccctcccatgaacattcacagcatcgtggttcaggtgcagtgtatcaataagaaagtcgggacgatcatctatcacgaagtgcggattgtggttagggaccggaatgataattcccctacgttcaagcacgaaagctattacgctacagtcaacgaactgacccccgttggaactaccatctttacggggttctcaggggacaatggtgcaacagacattgacgatggacctaatggtcagattgaatatgtgatccaatataatcccgatgacccgacctctaacgatacctttgagattccccttatgctgactggcaatattgtcctgaggaagaggctgaattatgaagacaagactaggtacttcgtgatcattcaggcgaatgaccgcgctcagaatctgaacgagaggagaacgacaacgaccaccctgaccgtggacgtgttagacggtgacgatctcggcccaatgttcctgccgtgcgtcttagtccccaacactagggattgccgtccactcacataccaagcagcgattccggaattgagaacccctgaggagttaaatccaattattgtgacacctccaatccaagccattgaccaggatcggaacatccagccaccctccgatcggccagggatcctgtacagcattctggtgggtacccccgaagactaccccaggttcttccacatgcaccctagaaccgcagagctgtccctgttagaacccgtcaatcgggatttccatcagaaattcgacctcgtgatcaaagccgaacaggacaatggacacccactgcccgccttcgcaggccttcacattgaaatcttggacgagaacaatcagtctccatacttcaccatgcccagttaccaaggatacatacttgagagcgcccctgttggcgccaccattagtgactcactgaatctgacaagtcccctccgcatcgtagccctggataaagacattgaagacacaaaggaccctgagttgcatctcttcctgaatgactacacgtccgtgttcacagtaactcagacaggaatcaccagataccttacactgcttcagccagtggaccgagaagaacagcagacatacacgtttagcattacagctttcgacggcgtgcaggagtctgagcccgtgatagtcaacatacaagttatggacgcaaatgataatacacccacatttcccgaaatttcctatgatgtgtatgtgtacacagatatgagacctggtgactcggtcattcagcttacagccgtcgacgcggacgaggggagcaacggcgaaattacttatgaaatactcgtgggagcacaaggagacttcattattaataaaactactgggttgataactatcgcccccggcgtggagatgatagtggggcggacctacgcccttaccgtgcaggctgctgacaacgccccaccggccgagagaaggaactctatatgtaccgtgtacatcgaggtcctacccccaaataaccaaagcccccccaggttcccacaactgatgtatagtctggaaatttcagaggcaatgagagtcggagctgtgttattgaacctgcaacatggtgacagcaacctcagggaatccactggccagggtaagcactag

SEQ ID NO: 131182 - DNA, 5034 bp, synthetic construct
  misc_feature 1..5034: note = Description of Artificial Sequence: Synthetic coding sequence
  source 1..5034: mol_type = other DNA
atgttcagacagttctacctgtggacctgtctcgcatccggaattatccttggatccctgtttgaaatatgcttagggcaatacgacgacgactgcaagctggcccgtgggggccccccagcaacaattgtggctatcgacgaggaatcaagaaatggcacaattctggtggacaacatgttgatcaagggaacggctggcggtcccgatcccactattgagctctcattgaaagataacgttgactactgggtgctgatggaccctgtcaaacagatgctatttttgaactcaacaggaagggtgttagacagggaccctccaatgaacatccactcgatagtagtgcaggtccagtgtatcaacaagaaagtcggcacaattatctaccatgaggttcgaattgtggtgcgggatcgaaacgataactctccaacgtttaagcacgagagttactacgctacagtcaacgagcttaccccagtcggaacgacgatcttcacaggatttagcggagacaatggtgctactgacatagacgatggaccaaacggtcaaatcgaatatgttattcaatacaatcctgatgatcccacctcaaatgacacattcgagatccccctaatgctaaccgggaacattgtgttgcgaaagcgcttaaattatgaggataagactcgatacttcgtgatcatccaggccaacgacagggcacagaacctgaacgaacgaaggaccaccactactaccctgaccgtggatgtgttagatggtgatgacctggggcccatgttcttaccttgcgttctggttcccaatacaagagattgtcgccccctgacttaccaggccgccatcccggagcttcgaactccggaagagttgaatccaatcatcgttactccccctatccaggctatcgatcaggatcggaacatacagcccccatctgatcggcctggtatcctgtatagtattctagtcggtactcccgaggactaccccagatttttccacatgcacccccgcacggctgagctgtccctgttggaacccgtgaatcgcgattttcatcagaaattcgatctcgttataaaagcagaacaagataatgggcaccccctgccggcctttgcaggtctacacattgaaatcctggatgagaacaatcaatcaccttatttcacaatgccatcttatcagggatacatcctggagtctgcacctgtaggcgccaccatctccgattctctgaatctcacctccccactccggatcgtggcgctggacaaagatattgaggacactaaggatccggaactgcatttgttcctgaatgattatacaagcgtatttacagtgactcagactggcatcacaaggtacctaacactgctgcagccagtggacagagaagagcagcagacatacacctttagcataaccgcatttgacggggttcaggagagtgagcccgtcattgttaatattcaggtgatggatgccaacgataacacccccacctttccagagatcagctatgacgtctacgtgtacactgatatgagacccggtgacagcgtaatacagttgactgctgttgatgctgacgagggatcgaacggcgagattacctatgagatccttgtcggagcccaaggcgactttatcataaacaaaactaccgggctgatcacgattgcccctggcgtcgagatgatcgtggggcgtacatatgccttgactgtgcaggctgctgataacgcgccacctgcagagaggaggaatagtatctgcacagtctacattgaggtcttgccgccaaataaccagtcacctcctcgcttcccgcagctgatgtattcgctggagatctcagaggccatgcgtgtcggcgcggttctcctgaacttgcaagctactgatagggagggcgacagcatcacatacgccatcgagaacggagatccccagcgtgtcttcaacttgtctgagacgaccggaatactcactttgggcaaggcattagaccgggaaagcacagataggtatatactgatcatcacagcttcagacggtagacctgacggtacatcgaccgccactgttaacattgtggtgacagacgtaaacgacaatgcgcccgtgttcgatccataccttccgcgaaatctgtcagtggtagaagaggaggctaacgcattcgtcgggcaggtgaaagctactgatcctgatgccggtatcaatggccaggtgcactatagcttgggaaatttcaacaacttatttagaattaccagtaacggttccatctatacagccgtgaagctgaaccgggaagtgagagactattatgaactggtcgtggtggcgacggacggtgccgtccaccctaggcactccaccttaacactagccattaaggtgttggacatagacgataacagtccagtttttacaaacagcacatacacagttctggtggaggagaatttgccagccggcactacgattctacagatagaggccaaggatgtggacctcggagcaaatgtctcctatcggatccgaagtcctgaagtaaagcatttttttgcactgcaccccttcaccggtgagttgtcgctgctgcgtagtctcgattatgaggcctttccagaccaagaagctagcattacattcctggtggaagcgttcgatatctacggaactatgccaccagggattgctaccgtgaccgttatcgtgaaggacatgaacgactaccctcctgttttttccaagcgcatttataaaggaatggtcgcccctgatgccgtcaagggcacgcccatcaccaccgtctatgcagaggacgctgatccacccggcttaccggcctctagagtcaggtaccgcgttgacgatgtgcagtttccttaccctgccagcatcttcgaagtagaagaagatagcggccgggtgatcacgcgggtaaacctgaacgaggaaccaacaaccatatttaaattggttgtggtcgcattcgatgatggcgaacccgtgatgtcaagcagcgcaaccgtcaaaattttagttctccatcccggagaaatccctcggtttactcaggaggaatataggcctccgcccgtctcagagttggctacgaaggggactatggtgggggtcatctccgctgccgcaattaaccagtctattgtgtactccatcgtctcaggtaatgaggaagacactttcgggatcaataatattaccggggttatatacgtaaacgggcccctcgactatgaaactcggacttcttatgtcctcagagtgcaagcagactccttggaggtcgtgctggcgaacctgcgcgtgccctccaagagtaatactgccaaggtgtacatcgagatccaggacgagaacaaccatcctcccgtcttccagaaaaagttttatataggcggcgtgagcgaagacgctcgcatgttcacctctgtgttgcgagtgaaggccacagacaaggatacgggaaattacagcgtgatggcatatagattgatcattcctcctattaaagaaggcaaggaaggatttgtggtggagacttatactggcctgatcaaaaccgctatgctttttcataacatgcggaggagctacttcaagtttcaggtaattgccacggacgactacggtaagggcttgagcgggaaggccgatgtgctggttagtgttgtcaaccagctggacatgcaggtcattgtcagtaatgttccccccaccctggtggaaaaaaagattgaagatctgaccgagatactcgaccgctacgttcaggaacaaattccgggcgctaaagtggtcgtagaaagcatcggcgcccgtcgacatggtgacgccttttccttagaggattatactaagtgtgacctcaccgtctatgctattgatccacagacaaacagagccattgaccgcaacgagttgttcaagttcctagatgggaagcttctggacattaacaaggacttccagccctactacggcgaaggtggccgaattctggagatccgaacacctgaagccgtcacctctattaagaagcggggagagtctctggggtacactgagggagcactgctagctctcgcattcatcatcatcctttgttgtatccctgcgatccttgtcgttttggttagctacagacacttcaaacgtcgacaggccgaatgtactaagacagcacgaatacaggccgctctaccagcggcgaagcctgcagtgcccgcaccagcgccagttgctgctccacctccccccccgcccccacctcccggcgcccacctctacgaagagttaggagacagttctatttaccgctacgagatgccacagtatggctcacgaagaagactgttgccaccagccggacaggaggagtatggggaggtggtgggggaagccgaagaagagtatgaggaggaggagtgggctagaaagagaatgataaagctggttgtggaccgggagtatgagacatcttcgaccggagaagactctgcacctgagtgtcagaggaaccggttacatcacccttccatccattcgaacatcaacggcaacatttacattgcacagaacggaagtgttgtgcgcactcggagagcatgtctgaccgacaacttgaaagtagcaagtcccgtcagactcggggggccctttaaaaagctggataagctggcagttacacatgaggagaatgtccccttaaacaccctgagcaagggacccttctcaacagaaaaaatgaacgcgcggcccaccctggtgacattcgctccctgcccggtcggaaccgacaacacggcagtgaagccgcttaggaaccgcctcaaatcaactgtggaacaagaatcgatgatagattcaaagaacataaaggaggccttagaatttcattcagaccatacccagtcagatgacgaggagctgtggatgggcccctggaacaacctgcatattcctatgaccaagctgtag

SEQ ID NO: 131183 - DNA, 279 bp, synthetic construct
  misc_feature 1..279: note = Description of Artificial Sequence: Synthetic coding sequence
  source 1..279: mol_type = other DNA
atgtttcgacagttttacctgtggacatgtctcgcgagtgggatcatactgggcagtctgttcgagatttgtctcgggcagtacgacgacgactgtaaactagccagaggcggccccccagctaccattgtcgcaatcgacgaggaatctaggaacggaactatactagtcgataatatgctgatcaaaggcaccgccgggggtcccgaccccactatagagctctcgttaaaagacaacgttgattattgggtgttgatggacccagtcaagcagtag

SEQ ID NO: 131184 - DNA, 3453 bp, synthetic construct
  misc_feature 1..3453: note = Description of Artificial Sequence: Synthetic coding sequence
  source 1..3453: mol_type = other DNA
atggctccacctcttaggccacttgctcggctcaggcctcccggaatgttactccgggccctgctgcttttactcctgctgtcccctctgcccggtgtgtggtgcttttctgaacttagcttcgttaaggagcctcaggatgtgaccgtaacgaggaaggaccctgttgtgcttgactgccaggcacatggcgaggtaccaatcaaggtgacatggctcaagaatggcgccaagatgagtgagaacaaaagaatcgaggtcctctcaaatggttccctgtacatttcagaggtggagggaagacgcggcgaacagagcgacgagggcttctaccagtgtcttgcaatgaacaagtacggcgctattttgtcccagaaggctcacctggccctttctactatttcggcattcgaggtgcagccaatcagcaccgaagtgcatgaggggggagtcgccaggtttgcatgtaaaatttcatcccacccaccagctgttatcacatgggagtttaatcggacgactcttcccatgacaatggatcggattaccgcgctgcctactggcgtgctgcagatttacgacgtctcacagagagacagtggcaattatcggtgcattgccgcaacggtggcacaccggcgtaaatccatggaggcttcactcactgtcatccctgcaaaggaaagcaagtctttccatacgcctacaattattgccggtccgcagaacatcaccacctcactccaccaaacagttgtcctggagtgcatggctacaggtaatcccaagcctatcatcagctggagtcggctggatcacaagagtatcgatgtgttcaacacccgagtacttgggaacggaaaccttatgatttctgatgtgaggctgcagcacgctggtgtttacgtgtgcagggccacaacccctggaacccgaaatttcacagtggctatggcgacactgaccgttctagcccccccatcctttgtcgaatggccagagagcctcactagaccaagagccggtacagcgcgtttcgtttgccaggccgagggcatcccttctcctaagatgtcctggcttaagaacgggaggaagatccattccaatggccgaatcaagatgtacaatagcaaacttgttataaaccagatcatccctgaagacgatgcaatataccaatgcatggctgaaaattcacagggaagtattttaagtagggcacggctgacagtagtcatgagtgaggaccggccaagcgccccatacaacgtgcatgctgagaccatgtcgagttccgctattttactggcctgggagcgtccactgtacaactccgacaaggtaattgcctactctgtgcactatatgaaggcggagggcctcaacaatgaggaataccaagtcgtgataggcaatgacactacccattacataattgatgaccttgaacctgctagtaactacaccttctacatagtcgcatacatgcctatgggagcctcccagatgagcgatcatgtcactcagaataccctggaagatgtgcctctgaggcctcccgagattagcctgacaagtcgatcccctaccgatattttaattagttggctgccaatccccgccaaatatcggcgtggtcaggtggtgttgtatagactcagcttccgactgtctaccgagaattccatccaggttttggaattaccgggaactacccatgagtatctactggaggggcttaaacctgactcggtctacctggtccgcatcaccgcagctactagagtcggacttggagagtcatccgtctggacttcacaccgaacccctaaggctacatccgtaaaggcgcccaaaagccccgagctgcaccttgaaccactgaattgtacaacgatctcggtgagatggcagcaagacgtggaagacacggcagctatccagggatataagctctattataaggaggagggccagcaggaaaacggaccaatcttcctggatactaaagatctcctttatacactgagcgggcttgaccccagacggaagtaccacgttcgtctcttggcttacaataacattgacgatgggtaccaggcagaccaaacggtgagtactccagggtgcgtgtcagtgcgtgaccgcatggtgcccccaccccccccacctcatcacctatacgctaaggcgaatacttctagctctatctttctccactggaggaggcctgcgttcacggccgctcagattattaattacactatccggtgcaatccggtcgggctgcaaaacgcgagtctggtgctgtacctgcagacctccgagacgcacatgctggtgcagggcctcgagccaaacaccaaatatgaattcgctgttaggctccatgtggatcaactaagtagcccatggagccctgtcgtttatcattcaaccctgcctgaggccccagcgggccctcctgtgggcgtgaaggttacgctgatcgaggatgacactgcactggtttcatggaaaccacccgatgggcccgagactgtcgtgacccgatataccatactgtatgcaagtcgcaaggcatggattgcaggagaatggcaagtgctgcacagagagggcgcgatcacaatggctctgctggagaatctagtggcaggtaacgtctacattgtgaaaataagcgcttcgaacgaggttggggaggggccattttctaactcagttgaactggctgtgctccccaaagaaacgtctgaatccaaccagcgccccaaaagacttgactctgccgatgctaaggtgtactctggctactatcatctagaccagaaaagcatgactggaatcgcagtgggcgtggggatcgcgctcacctgcatcttgatatgcgtgttgatcctgatttaccgatcaaaggctcgaaaatcttctgcttctaaaactgctcagaacggaactcaacagcttccccggacgagcgccagtctcgcctctggcaacgaagtgggcaagaacctcgaaggagcggtgggaaatgaagagagccttatgcctatgatcatgcctaactcctttatcgacgccaagggcggaaccgatttaatcattaatagctatggacccatcatcaaaaataactccaaaaaaaaatggttcttcttccaggatagcaagaagatacaggttgaacagccccagcggcgattcaccccagcggtatgtttctatcaacccggaacaaccgtgttgatctcagatgaagatagccctagtagcccagggcagactaccagcttttctcggccgttcggggtggctgccgacactgagcactccgccaacagcgaaggctctcacgagacgggcgactctgggcgcttcagccacgagtcaaatgatgagattcatctgagctctgtgatctccaccacaccgccaaatctgtag

SEQ ID NO: 131185 - DNA, 1434 bp, synthetic construct
  misc_feature 1..1434: note = Description of Artificial Sequence: Synthetic coding sequence
  source 1..1434: mol_type = other DNA
atggggcgtactgtggtggtgctgggaggagggatttccgggttagcagcctcataccacctgagccgtgccccttgccctcccaaagtcgtcctggtggagagttccgagcgactggggggctggattagaagcgtacgcggaccaaacggagccatattcgaactcggtccacggggaatcagacctgctggagccctgggcgccaggactctgcttctagtctctgagctgggactggattctgaggtcctgcctgtccggggtgaccatccagctgcacagaaccggtttctctacgtgggcggcgctttgcatgccctgccaactggcttacggggcctgctgcgcccgagccctcctttctctaagcccttgttttgggcaggcctgagggaactgactaagcccagaggcaaggagccggacgagaccgttcactctttcgcacagcggaggcttggcccagaagtcgcaagtctggccatggattccctgtgtcgaggcgtgtttgcaggaaactccagggagcttagcatccgttcctgtttccccagtcttttccaggctgaacagacacatagatctattctattaggactcttactgggtgcaggcagaaccccacagccagacagtgctctaattcgacaagccctcgcagagcggtggagccagtggtctctcaggggtggtctggagatgcttccccaagccttggagacccatttgactagcaggggagtctcggtgctcagaggtcaaccggtgtgtggcctgtcactgcaggcagagggtaggtggaaagtgagtctgcgtgactcctcacttgaagccgatcatgtcatcagcgcaattccagcatctgtgctgtccgagctgctgccagctgaagcagctccactggccagggcactgtccgccatcactgccgtgtcggtggcagtagttaacttgcaataccaaggtgcccatttaccagtgcaaggttttggacacctggttccaagttctgaggacccgggggtcctgggtatcgtgtatgactctgtggcattcccagaacaggacggcagtccacccggactaagagtgactgtgatgctgggggggtcttggttgcagacactcgaagctagcgggtgcgtgctgtcacaggaactgttccagcagcgcgcgcaggaggcggctgcgacacagctaggcttaaaggaaatgccctcacactgcctggttcacctacataagaactgcatcccccaatacaccctcgggcactggcagaaattagagagtgctcgtcaattcctcaccgcccaccggctacctcttaccttggccggcgctagctatgagggggtggcagtgaacgattgcatcgaatctgggcgccaggccgccgtctccgtcttagggacagaacctaatagttag

SEQ ID NO: 131186 - DNA, 1434 bp, synthetic construct
  misc_feature 1..1434: note = Description of Artificial Sequence: Synthetic coding sequence
  source 1..1434: mol_type = other DNA
atgggccgcacggttgttgtcctaggggggggtatttctgggctggcagccagctatcacctgtcacgggccccgtgcccgcctaaagtcgtgctcgtagaatcctccgagagactgggcggatggattagaagtgtgaggggtcccaacggcgcaatctttgaactgggaccaaggggcataaggccagccggggctctgggcgcaaggacattattgctggttagcgagctgggactcgattccgaggtgttacctgtgcggggcgatcatccagcggctcagaatcggtttttatacgttggaggcgcgcttcatgctttgccaaccggcctgcgaggactgctgagaccctccccacccttctctaaacctttattctgggcaggtctcagggagttgaccaagccacgcggcaaagaacccgacgaaactgtgcactcttttgctcagcgacgactgggtccggaagtggcctccttggccatggacagtctttgccgaggcgtgtttgccggtaacagccgggagctgagcatccggtcatgcttcccatcactcttccaagctgaacagacacatcgctctatcctgttgggactgcttttgggcgccgggcgcactccacaaccagactccgctctgattcggcaagccctagctgagcgctggtctcagtggtccctgcggggaggactagagatgctcccacaagccctcgagacccacctcaccagtagaggagtgtcagtgctgcgaggccaacctgtctgtggcctgtcgctacaggccgaaggccgctggaaagtgagtctcagggatagctctcttgaagccgatcatgtcattagtgcgattcccgcaagcgtgctatccgagctgttaccagctgaggctgccccactggccagagcgctgagcgcgattactgccgtttccgtggcggtcgtgaatctgcagtatcaaggcgcccaccttccagtccaaggctttgggcacttggtgcccagcagcgaagatcccggtgtcttaggaattgtgtatgattctgtggccttcccagaacaggacggatctccgcccgggctgagggtcacggtaatgttaggcggtagctggttgcagacccttgaggctagcgggtgtgtcctgtcacaggagttgtttcagcagagggctcaggaagcagctgccacccaacttgggctaaaagaaatgccatcacactgtttggtccacctgcataagaattgtatcccccaatataccctcggacattggcagaagctggaaagcgccagacagtttctgacagcccatagacttcccctgaccctcgccggagcgagctatgaaggagtggcagttaatgactgtatcgagagcgggcggcaagcagcagtcagtgtgctcggaacagaaccaaattcctag

SEQ ID NO: 131187 - DNA, 717 bp, synthetic construct
  misc_feature 1..717: note = Description of Artificial Sequence: Synthetic coding sequence
  source 1..717: mol_type = other DNA
atggggcgaaccgtcgttgtattaggaggcggaatctcagggctggccgcgtcttatcatcttagcagagccccatgccctccgaaagttgtgctcgtggagtcttccgagaggcttggcggctggatccggagcgtgcgaggccctaatggagccatttttgagctcggcccgaggggcatacggcccgcaggtgccctcggcgcccgtaccctcttgctggggttcggacacctggtccctagttcagaggatcccggagtgctgggcattgtgtatgacagcgtggctttccctgaacaggacggcagcccgccaggtctgcgagttaccgtaatgcttggaggaagctggctgcaaacactggaggcctcgggatgtgtcctgtcccaggaactgtttcagcagagggcgcaggaggccgcagccacacagctcgggctcaaagagatgccctcgcactgtctggtccacctccacaaaaccaagaaccagctcaagtggcggcaatctcacgatcgaacggtggagtggccgaaggagtatccaggccggagcaggaagcaggcgccatccatactgcacgtgccaggatgtcagttactccggtgtcgggatagagaccatttaggagccgtcagtgagcagccccgctcttcagcagaatcccgagtaggagtggcctcgtccacgtttagcactttccccctcttttag

SEQ ID NO: 131188 - DNA, 1335 bp, synthetic construct
  misc_feature 1..1335: note = Description of Artificial Sequence: Synthetic coding sequence
  source 1..1335: mol_type = other DNA
atggggagaactgttgtcgtcctgggaggagggatcagtggtctcgccgctagctaccaccttagtcgggctccttgcccaccaaaggtcgtcttagtcgagagctccgaaagacttggcgggtggatccgcagcgtacgcggtccaaatggcgctatctttgaacttggtcctcgtggcatccggcctgccggtgctctgggagcaagaacgttactgctggcatgcggggaacaggtaagcgaactagggcttgattccgaagtccttcctgttagaggagaccatcccgctgcacagaaccggttcttgtatgtggggggggccctacacgccctcccaacaggcctctcacctagcctcactctcaaggtagcctccctggctatggacagcttgtgccgcggcgtgtttgccgggaatagccgagaactgagtatacgaagctgttttccaagcctcttccaggccgagcagacccatcgctccatcctgctaggcttactcttaggtgcagggcgtacccctcagcccgatagcgcactgataagacaggctctggcagagagatggtcccaatggtctctgcggggtgggctggagatgctcccccaggcccttgagacccatctgactagccgtggggtttcagtgctgagaggacagccggtgtgtgggctgagtctgcaagccgagggcagatggaaggtgagcctgcgtgacagctccctagaagctgatcacgtcatctccgctatccctgcttccgtgctgtcggaattgctgccagccgaggccgcacctctggccagggctctgtccgccatcacagcagtgtccgtggccgtcgtgaacctgcagtaccaaggcgcacatctacctgtgcaagggttcggccatctcgtccccagctctgaggacccaggggtgttaggaatagtctacgattccgtcgccttccctgagcaggatggatctccgccaggtttacgagtgacagtcatgcttggcggatcatggctgcagacactggaagcgtcgggatgcgtcctgtcacaggagctgttccagcaaagggcccaggaggccgcagcaacccagttaggcctgaaggaaatgcccagccattgcctcgtacatctgcacaagaattgcatcccccagtacacactgggacactggcaaaaactggagtccgcaagacagtttctgacggcacatcgcctcccactcacattggccggcgcatcatatgagggcgttgcagtgaatgactgcatagagtctggaagacaggccgcggtctcagtgctgggtaccgaaccgaattcgtag

SEQ ID NO: 131189 - DNA, 144 bp, synthetic construct
  misc_feature 1..144: note = Description of Artificial Sequence: Synthetic coding sequence
  source 1..144: mol_type = other DNA
atggacatcctcaaatccgaaatcttacgcaaacgacagttagtagaggatcggaacctcctcagtgagagcatgtgtgccaatgatgcttacttgcaaatggcgatcggtaacgctccatggccgattggcgtgacgatgtag

SEQ ID NO: 131190 - DNA, 504 bp, synthetic construct
  misc_feature 1..504: note = Description of Artificial Sequence: Synthetic coding sequence
  source 1..504: mol_type = other DNA
atgatccgaacctttcctggagaaaataagaaatatttcaagcgcagtgaacttgcaaagaaggaggaggaggcatacttcgagaggtgtggttataagatccagccgaaagaagaggaccagaagccactcacatcgtctaatcccgtgctcgagctggagctggctgaggagaaactccccatgacactgtcaagacaggaagtgatcaggcgtcttagggagcgcggggagccaatcaggctgtttggcgaaacagactatgatgccttccagcgactgcggaagattgaaattcttacgccagaagttaataaaggcctacgcaatgatctcaaggcagccttggacaagattgatcaacagtaccttaatgaaattgtgggcggacaggaacctggcgaagaagatacccagaatgacctcaaggtacacgaagaaaatactacgatcgaggagctggaagctcttggagagtcacttggcaagggggacgaccattag

SEQ ID NO: 131191 - DNA, 750 bp, synthetic construct
  misc_feature 1..750: note = Description of Artificial Sequence: Synthetic coding sequence
  source 1..750: mol_type = other DNA
atgattcgtacctttcccggggaaaacaaaaaatacttcaaaaggagcgaacttgctaagaaggaggaagaggcctattttgaaagatgtggatataaacctatcaacgagaagccgagcggagagatacagcccaaggaggaggaccagaagccactgacttcatccaacccagtacttgaactggagctggctgaggaaaagctgccaatgacgctgtcccgacaggaggtcattcgaagactgcgggagcggggcgagccaatccgactgttcggcgagacggattacgatgcttttcagcgcctcagaaagatcgagatactgacacccgaagtgaataaagggctccggaatgaccttaaggccgccctcgacaagatagatcagcagtatcttaacgagatcgttggggggcaggaacccggggaggaagatacacagaatgacttgaaggtccacgaagaaaacaccacgatcgaggaacttgaggctctgggtgagagcttgggaaagggtgatgatcacaaggatatggacataattaccaagttcctgaagtttctactgggggtgtgggccaaggaactgaatgctagggaggactacgtcaaacgctcagtacaaggaaagctgaattcggcgacacaaaaacaaaccgaatcatatttgcggccgctcttccggaagttacggaagaggaatcttcctgccgacatcaaggaatctattacagacattatcaaatag

SEQ ID NO: 131192 - DNA, 1029 bp, synthetic construct
  misc_feature 1..1029: note = Description of Artificial Sequence: Synthetic coding sequence
  source 1..1029: mol_type = other DNA
atggatatcctcaagtctgaaatcctccggaagcggcagctggttgaggaccgaaacttactcgttgaaaataagaagtatttcaaaaggagcgaattagctaagaaggaggaggaggcatattttgaaaggtgtgggtacaagattcaaccgaaggaagaggaccagaagccattgacctcgtccaacccggtgttggagctggaactagctgaagaaaagctgcctatgacactgtcaagacaggaagtcataaggaggctaagggagaggggagagcctatccgcctcttcggagagactgactacgacgcgttccagagactgcgcaaaatcgagatcttgacgccggaagtcaacaaggggctcaggaatgacttgaaggccgctctggataagatcgaccagcaatacctgaatgaaattgtgggtggccaagagcccggagaggaggacacccaaaacgacttgaaagtgcacgaagagaatacaacgatcgaggaactggaagcacttggtgaatctttgggtaagggggacgatcacaaagatatggatatcattacaaaattcttaaagttcctgctcggagtgtgggctaaggaactcaacgctcgagaagactatgtcaagcggagcgttcagggtaagctaaatagcgccacacagaaacagacagagtcctatctacgaccgcttttccggaagctgcgcaaacgtaatttgccggcggatatcaaggaatctatcaccgatataattaaattcatgctgcaacgcgaatacgtcaaagctaacgatgcctatttgcagatggccattggaaacgccccttggccaataggagttaccatggtcggcatccacgcaaggaccggccgggagaaaatcttctcaaagcacgtggcacatgtgctgaacgatgagacccagcgcaagtacattcagggccttaaaaggctaatgactatctgccaaaagcatttcccaactgatccaagtaagtgcgtcgagtacaatgcgctgtag

SEQ ID NO: 131193 - DNA, 750 bp, synthetic construct
  misc_feature 1..750: note = Description of Artificial Sequence: Synthetic coding sequence
  source 1..750: mol_type = other DNA
atgatcaggacttttcccggcgagaataagaaatacttcaaaagatcagagttggccaaaaaagaagaagaggcttacttcgaacggtgcggctataagccaatcaatgagaaaccatctggagaaatccagcccaaagaggaggaccagaagcccctaacctccagtaaccctgtcctggagctcgagctggcggaggaaaaattacctatgacactttcgaggcaggaggtgatccggagacttagggaacgcggggagcctatccggctgttcggagagaccgattacgacgcctttcagaggttaagaaagatcgaaatcctgacacccgaggtgaataaggggcttcggaacgacctgaaggctgccctggataagatcgaccagcagtaccttaacgaaatcgtaggtgggcaggagcctggagaggaagacacgcagaacgatctcaaggttcatgaggaaaatacaaccatcgaggagctggaagcacttggggaatctctaggcaaaggagatgatcataaggatatggatataatcaccaaatttctcaagttcttgctgggcgtatgggctaaagaacttaatgcacgtgaggattatgtgaagcgatccgtacaggggaagctgaactccgcgacccaaaagcagaccgagtcctatttgcgtccacttttccggaaactgaggaaaagaaatctgcccgctgatatcaaggaatccataacagatataataaagtag

SEQ ID NO: 131194 - DNA, 1083 bp, synthetic construct
  misc_feature 1..1083: note = Description of Artificial Sequence: Synthetic coding sequence
  source 1..1083: mol_type = other DNA
atggatacaccgttgagacggagccgaagattgggtggtctccgacctgagtcccccgaatccttaacatccgtgtccaggacaagacgcgcactcgtcgagttcgagtctaatccggaggaaacgagagagcctggatcacccccatctgtccagcgcgcagggctgggcagtccagagagaccaccaaaaacttcacctggatctcctcgtttgcagcagggagccggtctggaaagcccccagggacagcccgagcctggagccgctagcccgcagcggcagcaggaccttcatttggagtcaccccagaggcagcctgagtattctcctgagtcaccacgctgtcagcccaagccctccgaagaggctcctaaatgttcacaggatcagggagtgctcgcctccgagttggctcaaaacaaagaagaacttaccccgggggcaccccagcaccagttacctccggttcccggctcccccgagccctaccccgggcagcaggcacccggccctgaaccaagtcagccactgcttgagctaacaccacgcgcaccaggatctccacggggccagcacgaaccctccaagcctccccctgcaggcgagaccgtgacaggcggatttggagctaagaaacgaaagggcagtagcagtcaggcccccgcatcaaaaaaactgaataaggaggagttaccagtgataccaaaaggtaagcctaaatcgggcagagtctggaaagacaggtcaaaaaagcgcttcagccagatgctccaggataagcccctgcgaactagttggcagaggaagatgaaggagaggcaggagcggaaactggctaaagatttcgcacggcatctggaggaagaaaaagagcgacggaggcaggagaaaaagcagcgcagagcagaaaatctgaaacggcgtttggaaaatgaaagaaaggctgaagtggtgcaagttattaggaacccagctaagttgaagcgcgccaaaaagaagcagctgaggtcaattgaaaagagagacacacttgcgttgttacagaagcagccaccccagcaaccagcggcaaaaatctag

SEQ ID NO: 131195 - DNA, 1095 bp, synthetic construct
  misc_feature 1..1095: note = Description of Artificial Sequence: Synthetic coding sequence
  source 1..1095: mol_type = other DNA
atgagtctggctgatgagctgctcgccgacctggaagaagctgccgaggaggaagaaggaggtagctacggcgaggaagaggaggaacctgccatagaagacgtccaagaagaaacacagctggacctgtcaggagatagcgttaaaacaattgccaaactctgggactcaaaaatgttcgctgagattatgatgaaaatcgaggagtacatttcaaagcaagccaaagcctcagaggtcatgggcccagtggaagcggccccagagtaccgcgttatcgtcgacgctaataatctcaccgtcgaaatcgagaacgagctgaacatcatccacaaattcatccgagacaagtacagtaagaggttcccggagttagagtccctggtaccaaacgccctcgactatattcgaacagtcaaggagctgggcaacagcctcgataagtgtaagaacaacgagaacttgcagcaaatccttaccaacgccaccatcatggtggtgagcgtgacagcaagtactactcagggacagcagctgagcgaggaggagctggagcggttggaggaagcctgcgacatggcacttgagctgaacgcatctaaacaccgcatttacgaatacgtggagtctcggatgtcatttattgcaccgaacttgtcaatcatcattggagctagcactgctgctaagataatgggggtggcagggggcctgaccaatctctcaaaaatgccagcttgcaatatcatgctcctgggcgctcagcgaaagacgctgtcgggcttcagctcaacctctgtcctccctcatacaggttacatttaccattcagacatcgttcagtctttgccacccgacctgcgcagaaaagccgcgcgcctcgtggctgctaagtgcaccctggcggctagagtagactcatttcatgagagcacagaaggtaaggttgggtacgagctgaaggacgagatagaacggaagttcgacaagtggcaacgacgcagatggctacggcctactagaagcatttcacctgcctggctgtcctcatctagatccagggcccggcgagttgctctatgccctcctgaatag

SEQ ID NO: 131196 - DNA, 1500 bp, synthetic construct
  misc_feature 1..1500: note = Description of Artificial Sequence: Synthetic coding sequence
  source 1..1500: mol_type = other DNA
atgtctctcgcagatgaacttctcgccgacttagaggaagctgctgaggaagaggagggtggctcttacggagaggaggaagaggagcctgcgattgaagacgtgcaggaggaaacacaacttgacctcagcggcgactctgtgaagaccattgcaaaactgtgggactccaaaatgttcgcagaaataatgatgaagatagaagaatatatcagtaagcaagcaaaggccagcgaagttatgggtcctgtggaggcagcccctgaatatcgagtcatcgtggacgccaacaatctgacggttgagattgagaacgagcttaatatcatccacaagtttatacgagacaagtacagcaaacggttccctgagttagagagcttggtgccaaatgccctggactacatcaggaccgtgaaggagttgggaaactccctagacaagtgcaaaaacaacgagaacctacaacagattttgacaaatgctaccattatggtcgtctccgtaaccgctagcaccacacaaggccagcaactatcagaagaggagctggagcgtctggaagaggcttgtgatatggctctagaacttaatgctagcaaacatcgtatatatgagtatgtcgagtccaggatgtctttcatagcgcccaatctttcaataattatcggcgcatcaactgctgctaagatcatgggcgtcgcgggtggattaacaaacctatctaaaatgcccgcttgcaatatcatgctactcggggcccaaagaaaaaccctgtcagggttctcttccacgtcagtgctcccccacactggttacatctaccatagcgatatcgtgcagagcctgcctccggatctgaggagaaaggccgcccggctggtggcggctaaatgtacactcgccgctcgggtagactctttccatgagagtactgagggaaaggtgggctatgagctgaaggatgaaatagaacgaaaatttgataagtggcaggagccgccacccgtgaaacaggtgaaaccattaccagccccattggacgggcaaagaaagaagcgggggggcaggaggtaccgtaaaatgaaggagcgcctcggcctgactgaaattcggaaacaggccaatagaatgagcttcggcgagatcgaggaggatgcctaccaagaggacctcggattttccctcggtcatctgggcaaatcaggcagcggcagagtgcggcagacacaagtaaatgaggccaccaaggcccggatttcgaaaactttgcagagaaccttgcagaagcagtctgtggtttatgggggaaagagcacgataagggataggtcttcgggcaccgcttcaagcgtagccttcacgccactgcagggcttggaaattgttaaccctcaagccgccgagaaaaaagtggccgaggctaatcagaagtatttcagttcaatggcggagtttctcaaagtgaaaggagaaaagagcggcctgatgtccacttag

SEQ ID NO: 131197 - DNA, 1353 bp, synthetic construct
  misc_feature 1..1353: note = Description of Artificial Sequence: Synthetic coding sequence
  source 1..1353: mol_type = other DNA
atgagtctggccgacgaactactcgctgatcttgaggaagctgccgaggaagaggagggaggatcctacggtgaagaggaggaggagcctgccatcgaggacgtgcaggaggaaacacagcttgatcttagtggtgattccgtaaagacgatcgcaaagctgtgggattcgaagatgttcgccgaaatcatgatgaagattgaagaatacattagcaaacaggcaaaagcttctgaagtgatggggcccgtggaagccgctccagaatacagagtgatagtggacgcaaacaaccttaccgtggaaattgaaaacgaactgaatataattcacaaatttataagggataaatacagcaagcgttttccggagctggaaagcctggttccaaatgctctcgactatattcgcaccgtcaaagaattgggtaacagtctggataagtgcaagaacaacgagaatctgcagcagatcctcaccaatgctactattatggttgtctcagtgactgcctctactactcagggacagcagctgtccgaggaagaactggaaaggttggaggaagcatgcgatatggctctggaactgaatgcatctaaacacaggatttatgagtatgtggaaagccgcatgtccttcattgcacccaacctgtctatcattattggtgcgtcaaccgccgctaagatcatgggagtggccggcggactcacaaacctgagtaagatgcccgcttgcaatatcatgctgttgggggcccagagaaaaaccctgtcaggcttttcaagcaccagtgtcctcccccatactggttatatttatcatagcgatatagttcagtccctacctccagacctgagaaggaaggccgccaggctggtcgcggctaagtgtacattggcagcccgcgtagattcattccatgagtcaactgaaggcaaagttgggtacgagctaaaagacgagattgaacgcaagttcgacaaatggcaggaaccaccccccgtcaagcaagtgaaaccactgcctgctccattagatggccagcggaaaaaacgcggggggcgccgctaccggaaaatgaaagagcgccttgggctgacggagattaggaaacaagccaacagaatgtcattcggcgagatagaagaggacgcatatcaagaggatttaggcttcagcctcggccacctggatgcagcagccgatccagcggaggctgagcgtcgcatatggcgggaagtccaccatccccgccccttgctaggccacggtctccaacgtggcctacatccgacacctggccccggagactgtgagcctaccggtgggcgggaagaaggtggatag

SEQ ID NO: 131198 - DNA, 831 bp, synthetic construct
  misc_feature 1..831: note = Description of Artificial Sequence: Synthetic coding sequence
  source 1..831: mol_type = other DNA
atgtctctcgcggatgaacttttagccgacttggaagaggctgccgaggaggaggaaggcggttcctacggggaggaagaagaagaacctgctattgaggacgtgcaagaagagactcagctggatctctcaggcgactcagtgaagaccatcgccaaattgtgggatagtaaaatgttcgcagaaatcatgatgaaaattgaggaatacatctccaagcaggccaaggcctctgaggtgatgggccccgtcgaggccgccccagagtacagagtcattgtagacgccaataacctgaccgtagaaattgaaaatgagctcaatataatccacaaattcattagggataaatactcgaaaaggtttcctgagctggaatcactggtccccaacgctctcgactatattcgcacagttaaagagttgggcaacagcttggataagtgtaaaaacaatgagaatttgcagcagattctcacaaatgctacaattatggtggttagcgttacagcctccaccactcaagggcaacagctgagcgaggaagagctagagagactggaagaggcctgcgatatggctctggagttaaacgcttctaagcatagaatttatgagtatgttgaatccagaatgtcctttatagcaccgaacctgtctattatcatcggtgcatccacggcagctaaaatcatgggagtcgctggcggtctgactaatttgagcaagatgcctgcatgcaatataatgttgctgggcgcccagcgcaagacactgtccggcttttcttcaactagtgtcctcccacacactggatatatatatcactag

SEQ ID NO: 131199 - DNA, 855 bp, synthetic construct
  misc_feature 1..855: note = Description of Artificial Sequence: Synthetic coding sequence
  source 1..855: mol_type = other DNA
atgtctctcgccgacgaactactcgccgacttggaggaggccgcggaggaggaagaaggaggaagctacggagaggaggaggaggagccagcaatcgaagacgtgcaggaggaaacacaactggacctgtctggggattcagtgaagacaattgcgaagctttgggactctaaaatgttcgctgagatcatgatgaaaatcgaagagtatattagcaaacaggcgaaggcctctgaggtgatggggcctgttgaggcagccccagagtatagagttattgtggacgccaacaacctgaccgtggaaattgagaacgagttaaatattatacacaaattcatcagagataagtattcaaagaggtttccagagcttgagagcctggtgcctaatgcactggactatattaggaccgtaaaggagctaggtaatagcctggataaatgcaagaacaatgaaaacttacagcagatcctgacaaacgcaacaattatggtggtgtccgtgaccgcctcgactacgcagggacagcagctgtccgaagaggaattggagaggttagaagaggcctgtgacatggctcttgaactgaatgccagcaaacaccgtatttacgagtacgtcgagagcagaatgagtttcatcgcccccaatttgagcatcataatcggagcctcaacagcggccaaaattatgggcgtagccggcgggctgacaaatctgagcaagatgcccgcctgtaatataatgttgctaggggcccaacggaagactctaagcggattttcatccacttcagtcttaccacataccgggtacatctaccatagcgacatcgtacagagcctgccgtag

SEQ ID NO: 131200 - DNA, 786 bp, synthetic construct
  misc_feature 1..786: note = Description of Artificial Sequence: Synthetic coding sequence
  source 1..786: mol_type = other DNA
atgagtctggccgacgaactgctagccgatctggaagaagccgctgaggaggaggaaggaggatcatatggcgaggaggaggaagagcccgcaatcgaggacgttcaggaggagacacagctcgatttgagcggcgattccgtaaaaacgatcgccaaactctgggactctaaaatgtttgcagaaatcatgatgaaaatagaagaatacatctccaagcaggctaaggcttccgaggtgatgggcccagtcgaagccgctcccgaatatagggttatagtggacgcaaacaatctcacagtggagattgagaacgagctaaacatcatccacaagtttatacgggacaaatattcgaagaggttccctgagctcgaatccctcgttcctaatgccctcgactacatacgcacagtgaaggagctgggaaattctctggataagtgcaagaataacgaaaacctgcagcagattctgaccaacgctactatcatggtggtctctgtgacagcaagcaccacccaggggcagcagcttagcgaagaggagcttgagcgactcgaggaggcctgcgacatggcccttgagctcaacgcatctaagcaccgtatctacgagtacgtcgagtctagaatgtcgttcatcgcccccaatctatcgatcattattggggcttccacagcagcaaagataatgggagtcgccggcggcctgactaatctgagcaaaatgcctgcgtgtaacattatgctgctgggtgcccagcggaagacactttcaggatag

SEQ ID NO: 131201 - DNA, 1569 bp, synthetic construct
  misc_feature 1..1569: note = Description of Artificial Sequence: Synthetic coding sequence
  source 1..1569: mol_type = other DNA
atggctagtagtagggcaagttcaacccaggcaaccaaaactaaagcacccgatgacctggtagctcccgtcgtgaagaaaccacatatttactacggaagcttggaggagaaggagagagagcggctcgcgaagggggaatctggaatcctggggaaggatggactgaaggccgggatagaggcagggaatattaacatcacgagcggcgaggtgttcgagatagaggagcacatttctgaaagacaggcggaagttcttgccgagttcgaacgtaggaaacgcgcccgccagattaatgtgtctaccgatgactctgaggtgaaggcctgtttacgcgctctgggagaaccaatcaccctcttcggcgaaggaccagccgaacgccgcgagaggctccgcaacattctgagtgtcgttggcaccgatgcacttaagaagaccaagaaagacgacgaaaagagcaagaagtccaaagaggagtaccagcagacttggtatcacgagggaccgaacagcctcaaggtggccaggctgtggattgcaaattactcactgccgcgcgccatgaagcgcctggaggaagctagattgcataaggagatcccagaaaccaccaggacatcccaaatgcaagagttacataagtccctgcgcagcctcaataatttctgctcccaaataggagatgacaggcctatcagctactgccatttcagtccaaacagtaaaatgttggcgaccgcttgctggtcagggctctgtaaattgtggtccgtcccagattgcaacttattacacactctccgaggccacaacactaacgtgggggctatcgtgttccatcctaagtctacagtctctctggatcctaaagatgtgaacctggcctcgtgtgccgcggatgggagcgtgaagctctggtcgctagacagcgacgaacctgtggccgacatcgaaggccacacagtccgagttgcccgcgtaatgtggcaccctagcggaagattcctcggaaccacgtgttacgatcgttcctggagactgtgggacctggaagctcaggaggaaatcttacaccaggagggtcacagcatgggtgtgtacgacatcgcctttcaccaagatggtagtctggccggcaccgggggcctagacgctttcggacgagtgtgggacctgcgcactgggagatgcattatgttcctcgagggccatctaaaagagatctacggaattaatttctctcccaacgggtaccacattgcaacaggatctggcgataacacatgcaaggtgtgggatctgcgacagcggaggtgtgtttacactatacccgctcatcagaacctcgtgactggggtgaaatttgagcccatccacgggaacttcctgctgactggagcttacgataatactgctaagatctggacccatccaggatggagtcctctcaaaacattggccggacatgaaggcaaggtgatggggctggatattagtagcgacggccaactaattgccacctgtagctatgatcggacatttaagctgtggatggcggaatag

SEQ ID NO: 131202 - DNA, 1566 bp, synthetic construct
  misc_feature 1..1566: note = Description of Artificial Sequence: Synthetic coding sequence
  source 1..1566: mol_type = other DNA
atggctagctctcgtgcgagctccacagctacaaaaactaaggcccccgacgaccttgttgctcccgtcgtgaaaaaaccacacatctattatggtagcctggaagagaaagagcgggaaaggctcgcgaagggagagtccgggattctgggtaaggacggtctgaaggctgggatcgaggccggtaatatcaatattacctccggtgaagtcttcgagatcgaggagcatataagcgagaggcaagcggaagttctcgctgagtttgaaaggcgtaagagggcgagacagatcaacgtctccaccgacgactccgaggttaaggcctgtctacgagcactgggcgagcctatcacactctttggagagggcccggccgagcgcagagagcgcctgcggaatatcctctcagtggtgggcactgacgccttaaagaagacaaagaaggatgatgaaaaaagcaagaaatctaaggaagagtatcagcaaacatggtaccatgaaggcccaaatagcctgaaagtcgcccgcctgtggatagcaaattatagcttgcctcgggctatgaagaggttagaagaggcgcgcctgcacaaggaaatccccgagacgacccggacgtcccagatgcaggaactgcacaagtccctgcggtccttgaacaacttctgtagccagatcggtgatgatagacccatttcgtactgccatttttcccccaattcaaagatgctggcaactgcctgctggagcgggctctgcaagttgtggtccgtcccagattgtaatctgttgcacacactgcggggccacaacaccaacgtgggtgctattgtgttccatcctaaatccacggtctctttagatccaaaggatgttaacttggcatcctgtgcggctgatggctcggtcaaactgtggagtctggatagtgatgaacctgtggccgatatagaagggcatacagttcgagtggctagggtgatgtggcacccctcaggtagattcctgggaactacgtgctacgaccgcagctggcgtctgtgggacctggaagcacaggaagagatcctccatcaagaagggcactcaatgggagtttatgacattgcatttcatcaagatggaagcttagctggaaccgggggcctggacgcatttggcagggtgtgggacctcaggacaggcagatgcatcatgtttcttgaaggacatttaaaagagatatacggaattaacttttctccgaacggctatcacatcgccacaggatcaggcgataacacttgtaaagtttgggacctgcgtcagcggcgctgcgtatacacgatcccagcacaccagaatctggtcacaggtgtcaagtttgagcccatacacgggaatttcttgttgacaggagcctacgataacaccgccaaaatttggacccacccgggctggagccctttgaaaaccctggcaggtcacgagggaaaggtgatgggcttagatatctcttctgacggacaattgatagcaacctgttcttacgatagaacctttaaactttggatggccgagtag

SEQ ID NO: 131203 - DNA, 3024 bp, synthetic construct
  misc_feature 1..3024: note = Description of Artificial Sequence: Synthetic coding sequence
  source 1..3024: mol_type = other DNA
atggctgccgctgagacccaatccttgcgggagcagccagagatggaagacgcaaattccgagaaaagcataaacgaagaaaacggtgaggtgtccgaggatcagagtcagaacaagcacagtcggcataagaagaagaaacataagcaccggtccaagcataagaagcataagcacagttccgaggaagataaggataaaaaacataaacacaagcataagcacaagaaacataagagaaaggaaatcatagatgcctccgataaagaggggatgtcacctgctaaacgcactaagttggacgacctggcattgctggaggacctggagaaacaacgagctctgataaaggctgagctggataacgagcttatggagggaaaagtacaatctggaatgggcctcatcctgcagggctatgagagcggttctgaggaagagggggagatccacgagaaagcccgaaatgggaatagaagttccaccagaagttcatcaaccaaaggtaaactggagctcgttgacaacaaaatcactacgaagaaacgatctaaatctcgctctaaagaacgcacacggcatcgttcggacaagaagaaatcaaagggcggaatcgagattgtgaaagaaaagaccacaaggagtaaatctaaagagaggaagaagagtaagtctccttcaaaaaggtccaagagtcaggatcaagctaggaagtccaagagccctacgcttagacgaaggagccaggaaaagattggtaaggcgagaagtcccactgatgataaggtaaagatcgaggacaagtctaagagtaaagatagaaaaaagtccccaataattaatgaaagcaggtctcgagatcgggggaagaagtctcgatctcctgtggacttaaggggaaaaagtaaggatcgtaggtctcgcagcaaggagagaaagagcaagcggtccgagacggacaaagagaaaaaaccaatcaaatctcctagtaaggatgcatcatccgggaaagagaaccgcagcccgtctcgtcggcccggccgcagtcccaaacgacggtcactttcccccaagccccgggataaatcccggaggtctcgctccccccttttgaatgatcggaggagcaaacagtcaaaatctccctcccgtaccctcagtccaggcaggagggccaaaagtcgcagcctggagaggaagcggagagaaccagaacgcagaaggctcagctctccccggacaagacctagggatgacattttgagccggagagaaagaagcaaggacgcctcccccataaatcgatggtcccctaccaggagacggagcaggtccccgattaggagaaggtcaaggtctcctctccggagatctcggtctccccgacgcagatctcgaagtcctcgtagacgggacaggggcaggaggtccagaagccgtttgagaaggaggtctaggtcacgggggggacgccgccgtcgctctcggagcaaggtgaaggaggataagttcaaaggctccctatcagagggaatgaaggtggaacaggagagcagcagtgatgacaacctggaagatttcgatgtggaggaagaggatgaagaggccctcatcgagcagaggcggatacaaagacaggccatcgtccagaagtataaatatcttgcggaagactcgaatatgtccgtgccctccgaacctagtagccctcagagttccactcgcacacgctcaccctcgcctgatgatattctggagcgggtggccgctgacgttaaagagtacgagagagagaatgtggacacctttgaggcctcagtcaaagctaaacacaatctcatgaccgtagaacaaaataacggctcctctcaaaaaaagttgcttgctccagatatgtttacagaatccgatgacatgtttgcagcatatttcgattctgccaggcttcgcgctgcgggcataggtaaggacttcaaggaaaacccaaatttgagagacaattggactgatgcagaagggtactacagagtgaacattggcgaagtgttagataagagatacaatgtttacgggtatactggccagggtgtgttctccaacgtcgttagggcacgcgacaacgcaagggccaatcaggaggttgctgtcaaaataattaggaacaacgaactgatgcagaaaactggactaaaggagctggagttcttgaagaagttgaacgatgctgatccggatgacaagttccattgtctgcgcttatttcggcacttctaccataagcagcacctctgcctcgtgtttgagcccttgtccatgaatctgcgcgaagtgcttaaaaaatacggaaaggatgtcggactgcacatcaaggcggttcggagctacagccagcagttgtttctcgctctgaaactgcttaaacggtgcaatatccttcatgcagatattaaaccagataacatcctcgttaacgagtccaaaaccatcttgaaactgtgtgactttggttctgcatcccacgtggcggacaacgacatcacaccgtaccttgtttctagattttatcgggccccagagatcatcattggaaagtcatacgactacgggatcgacatgtggtccgttggctgcacgctgtacgaattgtacacaggcaaaatacttttccccggaaaaaccaacaaccacatgctgaaactagcaatggacttaaaagggaaaatgcctaataagatgatcaggaaaggggtattcaaagaccagcactttgaccagaatttgaactttatgtacattgaagtagataaagttaccgagagggagaaggtgactgtgatgagcacgatcaaccctacaaaggatctgctggccgatttaataggctgccaaagacttcctgaggatcagagaaagaaagttcaccagcttaaggacctactggatcagatcctcatgctggatcctgcaaagaggatctccatcaaccaggctttgcagcacgccttcattcaggaaaagatttag

SEQ ID NO: 131204 - DNA, 3024 bp, synthetic construct
  misc_feature 1..3024: note = Description of Artificial Sequence: Synthetic coding sequence
  source 1..3024: mol_type = other DNA
atggccgccgcggagactcaaagtctgcgggagcagccagagatggaggacgctaattcagagaaaagtattaatgaagagaacggtgaagtgagcgaagatcagtctcaaaacaaacactcccgacacaaaaaaaagaagcataaacacaggagtaagcacaagaagcacaagcatagcagcgaggaagacaaggacaagaagcacaaacacaaacacaaacataagaagcacaagaggaaggagattatagatgccagcgacaaagaggggatgagtcctgcgaagcggaccaaactggatgacctggcgcttctggaagacttggagaagcagcgggctctaatcaaggcggagctcgacaacgagttgatggaaggtaaggtacagtctgggatggggctcattctgcagggctatgagtctgggagtgaagaggaaggcgagatacacgagaaggcaaggaacggcaaccgcagctctaccaggagttcctccacaaagggtaaactggaactcgtggataataaaattactaccaagaagcgatccaaatctagatccaaagagaggacccgccacagatctgacaagaaaaagtctaaaggcggcatcgaaatcgtgaaagagaagaccaccagatcaaaatctaaagaacgaaaaaaatcgaaaagcccttctaagaggagtaaatctcaggatcaggctcggaagtcgaagagccccacacttaggcggcggtcccaagagaagatcgggaaggcccgctcgcccactgatgacaaggtcaaaattgaggacaaatctaagtccaaggaccgcaaaaagagtcctatcataaacgagtcacggtcccgcgatagagggaagaaatcaagatctccagtggatctgcgcggcaagtctaaggaccggcgttcgcggtccaaggagaggaaatccaaacgttccgagacagataaggagaagaaacctatcaagtctcccagcaaggacgcctctagcggaaaagagaaccgctccccctcccggagacccggtcggtcacctaaaaggcgtagccttagtccgaagccaagggacaaaagccgcaggtctcgctccccactgttaaatgaccgtcgctcaaaacaatccaaatctccttcccgcactctcagcccaggcaggagagcgaaaagtaggtccctggagcgaaaacggagggaacctgagcggagacgtctgtctagcccaaggacgagaccaagggatgatatcctgtctcggcgcgagcggtccaaagatgcttctccgataaaccggtggtcgcctacacgccgcaggtcaagatctccaatacgccgtcgttccaggtctccactccggcggtcgcggtctccccgacgtcgctcacgatctccgaggcggcgtgacagaggtcgccgctctagaagtagacttagaaggcgcagtaggtctcgaggggggcgcaggcgccggtcaagaagcaaggtgaaagaggacaaatttaagggctccctgagcgagggaatgaaggtagagcaagaatcttccagcgacgacaacctggaagattttgacgtcgaggaagaggacgaagaggcactcatagagcaaagacgcattcagagacaagccattgtccagaagtataaatatctggccgaggacagtaacatgagtgttcctagcgaaccaagctcaccccaaagctcaactcgaacaaggagcccctctcctgatgacatactggagcgggtagctgcggacgtgaaggagtacgaacgtgagaacgtggacacttttgaagcctccgtgaaggccaagcacaacttaatgaccgtggaacagaacaacggatcttcacagaagaaattacttgcaccagatatgtttacagaaagcgatgacatgttcgccgcgtacttcgacagcgccaggctgagagctgcaggcattgggaaggacttcaaagaaaatccaaatctccgtgataactggacggatgccgaagggtactaccgcgtcaatattggggaagtgctcgacaaacggtacaatgtgtacgggtacactggccagggcgtttttagtaacgtggttagagctagggataacgcgcgggccaatcaggaggttgcagtgaagattattaggaacaacgaactgatgcagaagactgggcttaaagagctggagtttctcaagaagctcaatgatgctgatccggatgacaagttccactgcctgagactctttcggcacttttaccacaagcagcatctatgtttagtgttcgaacccctgtccatgaatctgagagaagtgctgaagaaatatggtaaggacgtgggtctgcacattaaggcagtccgtagctactcacagcagttattccttgcgcttaaactactgaagaggtgtaatatcctccacgctgatatcaagccagacaatatattagtcaacgaatcgaagactattttgaaactttgcgatttcggaagcgccagtcacgtggcagacaatgacatcaccccttacctggtcagcagattctatagagcgcctgaaatcattatcggcaagagctatgactatggaattgatatgtggtccgtgggttgtaccctctatgagctttacacaggcaaaatcctgttcccagggaaaacgaacaaccacatgctgaagttggcgatggatctgaaaggtaagatgcccaacaagatgataagaaaaggtgtgtttaaggaccagcattttgaccagaaccttaactttatgtacatagaagtggacaaagtgaccgaacgggagaaggtgacggttatgagcaccattaacccaacaaaagatcttttggccgatcttataggttgtcagcggttgccagaggaccaaagaaaaaaagtccatcagctgaaggacttattagatcagattctgatgcttgatccggcaaaacggatctccatcaaccaggcgctgcagcacgcatttatacaagaaaagatctag

SEQ ID NO: 131205 - DNA, 2982 bp, synthetic construct
  misc_feature 1..2982: note = Description of Artificial Sequence: Synthetic coding sequence
  source 1..2982: mol_type = other DNA
atggaagacgcaaactccgagaagtccattaatgaagaaaatggcgaggtctccgaagatcaaagccagaataagcattctcgccacaagaagaaaaaacacaagcacagaagcaagcataaaaagcataaacacagttccgaggaggataaggacaaaaagcataaacataaacataaacataagaagcacaagcggaaggagattatagatgctagcgataaagagggaatgtctcccgcaaaacgcacaaagctggacgacctggctctgctggaggatcttgagaaacagcgcgctttaattaaggctgagctggacaacgagctgatggagggtaaggtgcagagcgggatgggtctcatcttgcaaggctacgaatcaggaagcgaagaggagggcgagattcacgaaaaggcacggaatgggaaccgcagttctacacgatctagctccaccaagggtaaactggaactggtggacaacaagatcacaacaaagaaaaggtctaaaagtcgaagtaaagaacgtactagacatcgaagcgataaaaagaagagtaaaggagggattgagattgtcaaagaaaaaaccactcgaagtaagtccaaggagaggaagaaatccaagtcaccttcgaagaggtcaaagagccaggaccaggctagaaaatctaaatctccgaccctccgccgtagatcacaggagaaaataggaaaagctcggtctcccaccgacgacaaagtgaagatcgaggacaaaagcaaatctaaagatcgcaaaaagtcacccattatcaacgagagccggtcaagggatagggggaagaagtcccgctctcctgttgatctccgcgggaaatccaaagatcgcagatcacgatctaaggagcgcaagtcaaagcgatcagagacagataaagaaaagaaacccataaagtctccttcgaaggacgcctccagtggcaaagaaaataggagtccatccaggcgccctgggagaagtcctaagcgtcgcagcctttcacccaaaccacgtgacaagagcaggcgatctagatctccgttgttaaacgatcgcagaagcaagcaatctaaatctccttccagaaccctcagccctggcaggcgggccaagagcaggtcacttgaaagaaagcgcagggaacctgagcggcgccgtctcagtagtccacgaacgcgccctagagacgacattctgtccaggcgagaacggtctaaagatgctagccctatcaataggtggtctcctactcgaaggagaagtcggagcccaataagacggagatcgagaagcccgctccggcggagtcgttctccaaggcggcgttctagaagcccccggagaagggacagagggagacggtcaagatctcgcttgcgtcggagaagcaggtcacgcgggggccggcggcgccgcagcaggagtaaggtcaaggaggacaaatttaagggttccctgtccgagggtatgaaggtagaacaggaatcctcctcagacgataatcttgaagactttgacgtcgaggaggaggacgaagaagcgctgattgagcaacgcaggatccaaagacaggcaatcgttcaaaagtataaatatctggccgaagacagcaatatgagcgtgcccagtgaaccctccagcccccagagctcaacacgcacaagaagcccttctcctgatgacatcctagagagggtagccgctgacgtaaaagaatacgagcgtgaaaatgtcgatacttttgaggcatcagtgaaggctaaacataatctaatgactgtcgagcagaacaatggatcctcccagaagaagctgctggctccagacatgtttaccgagagtgacgatatgttcgccgcctatttcgacagcgctagattgcgcgcagccggcatcggcaaagactttaaggagaaccccaatcttagggacaattggactgatgccgagggttattatcgcgtgaacattggggaggtcctggacaagagatataatgtctatggctatacggggcagggggtgtttagtaatgtggtgagagcgagagacaatgccagggccaaccaagaggttgcggtgaagatcattcggaacaacgagctaatgcaaaaaaccggtctcaaagagctggagtttctgaaaaagcttaatgatgccgaccctgacgataaattccactgtcttcgactgttccggcacttttaccataagcagcacctttgccttgtttttgagcctctgagtatgaatttgcgtgaggtcctgaaaaaatacggcaaggatgtgggacttcatataaaagctgttaggagctacagtcagcagctgttcctcgcactcaagctgcttaaacgctgcaatatcctgcacgcggatattaagcccgataacattctggtgaacgagagtaagaccattttgaagctttgcgattttggctcagcttcccatgtcgcggacaacgacattacaccctatctggtctcaaggttctacagagctccagagataatcatcgggaaaagctatgactacgggatcgatatgtggtccgttggctgtaccttgtacgaactgtacaccggcaagattctgttccccggcaaaactaataatcatatgttgaagttagcaatggatcttaagggtaagatgcctaacaagatgataagaaagggtgtgtttaaggatcagcacttcgaccaaaacctaaatttcatgtatatcgaggtggataaagtgaccgagcgcgaaaaggtcacagtgatgtccacaataaatcccaccaaagatcttttagcggacctcatcggatgtcaacggctgcccgaggaccaaagaaagaaagtccaccagcttaaagatcttttggatcaaattctcatgctggatcccgccaaacgcatctcaatcaatcaggctctacaacacgctttcatccaggagaagatttag

SEQ ID NO: 131206 - DNA, 2820 bp, synthetic construct
  misc_feature 1..2820: note = Description of Artificial Sequence: Synthetic coding sequence
  source 1..2820: mol_type = other DNA
atgagacctgggaccggcgcagagagaggcgggctcatggtgtccgaaatggaatcccatccccctagccagggtccgggcgatggggaacgcaggctgtccggatcaagcctgtgcagtggcagttgggtcagcgctgacgggttcctgcgaagaagaccaagtatggggcatccgggcatgcactacgcccctatgggaatgcacccgatggggcagcgggcgaatatgccaccagttccgcatggcatgatgccccagatgatgccacccatgggcggcccacctatgggacagatgccagggatgatgtcttcagtgatgcctggaatgatgatgtcccacatgtcacaggccagtatgcaacccgcactcccccccggggtcaactccatggatgtggccgcaggcacatacactctttataagagcatgtggacagaacacaagtctccagacggaaggacatactactataacaccgagaccaagcagagtacctgggaaaagccggatgatctcaagacacccgctgagcagctgttatccaagtgcccatggaaagaatacaagtcagacagtggcaagccatactactataattcacaaacaaaagagagccgctgggctaaacccaaggagttggaagacctcgaagggaaaatgggaaagattaagtactctaagcaagaggagtgtaccacaacctcaactgcaccagtcccaaccaccgagatccctacaacaatgagcactatggctgcggccgaggccgctgccgctgttgttgctgcagcggccgctgccgcagccgccgctgcagccgcgaatgcgaacgcttctacatctgcatctaatacagtttccgggaccgtgccagtcgtgcccgagcctgaagtaacaagcatagttgcaactgtggtggataatgagaataccgtcactatatcgaccgaggagcaagcccagctgacctcaactccagctatccaggaccagtcagtggaggtgtcttctaatactggcgaggagacatccaagcaagaaaccgtggccgatttcacaccaaagaaagaggaggaggaatcacagcccgctaaaaaaacgtacacttggaatacaaaagaggaggcaaagcaggcgttcaaggagctgctcaaagagaaaagggtcccctccaatgcctcttgggaacaagccatgaagatgataatcaacgatccaaggtattcggcactggcaaagctttccgaaaagaagcaagcctttaatgcttacaaggtgcagaccgagaaggaggagaaagaagaagcccggtcgaagtacaaggaggcaaaagagagcttccagcgatttctcgagaaccatgaaaagatgacaagtacaactagatacaagaaagcggagcagatgttcggggaaatggaggtctggaatgccattagtgaaagagatcgcctggagatttacgaggacgtgctattcttcctcagcaaaaaggagaaagagcaggccaagcagctgaggaagcgtaactgggaggccttgaagaatattcttgataatatggctaacgtgacttatagtacaacttggtcggaagctcagcagtacctcatggacaatccaacttttgctgaggatgaggagctccagaatatggataaagaggacgcacttatttgctttgaggagcacattagggccctcgaaaaagaagaggaggaggagaagcagaaaagcctgcttagggaacggcggcgtcagcgaaagaaccgggaaagcttccaaatcttcctggatgagctgcacgagcatggacagttacactctatgagcagctggatggagttataccccactatttcctctgacattagattcacaaacatgctgggccagcccggatctaccgcgcttgatttgtttaaattttacgtagaagatctgaaggctaggtaccatgatgagaaaaaaatcatcaaggatattctgaaggataaggggttcgtggtggaggtgaatactacatttgaggatttcgtcgcaataatatctagtaccaagcgctcaacaacactcgatgcaggcaatataaagctggcatttaatagcctcctggagaaggcagaggcgcgcgaaagggaaagagaaaaagaggaggcaaggaagatgaagaggaaggaatccgcctttaaaagcatgctgaagcaagctgcaccgcccatcgagttggacgccgtgtgggaagacatcagggagcgctttgttaaagagcccgcctttgaggatatcacccttgaatcagaaaggaagcggattttcaaggattttatgcatgtgctggagcacgaatgccaacatcatcattccaagaacaaaaaacattcaaagaaatctaagaaacatcaccggaagcggtcaagatctcgtagcggttccgactccgacgacgacgacagccattcaaaaaaaaaaagacaaaggtccgagtcaagatcggcttcggagcatagttcatccgcagagtcagagcgttcatacaagaaaagcaaaaaacacaagaagaagtccaagaaaaggcgtcacaagtctgattcccccgaaagcgacgccgagcgcgagaaagataagaaggagaaagaccgtgagagcgagaaggatcgaacccgccaaaggtcagaaagtaaacacaaatctcctaagaaaaagacgggcaaagactcaggtaactgggatacatccggtagcgagttgagcgaaggtgagttagagaaaaggcgcagaaccctgttggagcagcttgacgacgatcaatag

SEQ ID NO: 131207 - DNA, 2451 bp, synthetic construct
  misc_feature 1..2451: note = Description of Artificial Sequence: Synthetic coding sequence
  source 1..2451: mol_type = other DNA
atgtgtagtggctccgggcgccggagatccagtctctccccaaccatgcggcccggcactggcgccgaaagaggcggcctcatgatgggccaccctggcatgcattatgctcctatggggatgcacccaatgggacagagggctaacatgccaccggtgccacacggcatgatgccacagatgatgcctcccatggggggcccccccatggggcaaatgcccggaatgatgtcaagcgtcatgcctggcatgatgatgtctcacatgagtcaggcgtctatgcagccagcactccctcagttactttcaaagtgcccctggaaagaatataaatcagactcgggaaaaccatattattacaactctcagaccaaggaaagccgatgggcaaaaccgaaagaactggaagacctggagggataccaaaatactattgttgctggttcgttaatcacaaagtctaacctgcatggcatgctgactgaactgaagtattccaagcaggaggaatgtactactaccagtacagcccccgtgccaacaactgaaatccccaccacaatgtcgactatggccgccgccgaagcggccgccgctgtggtggctgcagccgctgccgcagcagccgcagcggcagctgccaatgccaacgcatccacttctgcaagcaacacagtctccgggactgtgcccgtggtgcccgagcctgaagttacctctatcgtggccaccgttgttgataacgagaatactgtcaccatttcaaccgaggagcaggcccagttgacatctactcctgccatccaggatcaatcagttgaggtgagcagtaacactggggaggaaacatcaaagcaagaaaccgtggccgactttacaccaaagaaagaagaggaagagagccagccggcaaaaaagacctatacctggaatacaaaagaggaggcaaagcaagcatttaaagagttgcttaaagaaaagagggtgccttctaacgcctcatgggagcaggccatgaagatgattattaatgatccccgctattccgccctcgcaaagctgagcgagaaaaagcaggcgttcaatgcttacaaggtacagactgagaaggaagagaaagaggaggctagatccaagtataaggaggcgaaagagtctttccaaagattccttgagaaccatgagaagatgacttccacgactcggtataagaaggcagagcagatgttcggggaaatggaagtctggaacgccatttcagaacgagatcgcctcgagatatatgaggatgttctgttctttctctccaaaaaggagaaggaacaagctaagcagttgaggaagcgaaactgggaagcactcaaaaacattctagataacatggcaaatgtgacatactctacaacttggagcgaggcccagcagtatctgatggacaatcccacttttgcagaggacgaagaactgcaaaacatggacaaggaggatgccctgatctgttttgaggagcatatacgtgcccttgaaaaagaagaagaggaggagaaacagaaatcccttctgcgcgaaagacggcgccaacggaagaaccgtgagtctttccagatctttctggacgaactccatgagcatggacagctccacagcatgtcttcttggatggaactttacccaaccatctcatcagatatccgttttacaaacatgctaggacagcctgtgtttagtcttggcagtacagccctggatctgttcaaattctatgttgaggatttgaaggctagatatcacgatgagaagaaaattattaaagatatccttaaagataagggattcgtggtcgaggtaaatactacctttgaggatttcgtggccatcatctcatccactaagcgcagtacaacactggacgctggtaacatcaagctggcctttaactcccttctggagaaggcggaggctagagagagggagagggaaaaagaagaggcccgaaaaatgaagagaaaagagagcgccttcaagagcatgctgaaacaggctgcccctccaattgaattggatgccgtatgggaggatattcgcgaacgcttcgtaaaggagccggccttcgaagacatcacattggagagtgaaagaaagcgaatattcaaggatttcatgcatgttctagagcacgagtgtcagcaccaccattccaagaacaagaaacacagcaagaaatctaaaaaacaccatagaaaaaggagcaggagccgcagcggctccgacagtgacgatgatgactcgcactctaaaaagaaaagacagcgctctgagagccggagcgcctctgagcattcatccagtgccgaaagtgagcgcagttacaaaaaatcaaagaagcataagaagaaaagcaagaaacggcgccataaatctgattcacctgagagcgacgcagaacgttag

SEQ ID NO: 131208 - DNA, 2793 bp, synthetic construct
  misc_feature 1..2793: note = Description of Artificial Sequence: Synthetic coding sequence
  source 1..2793: mol_type = other DNA
atgtgctccggctcaggacgacgaaggtctagcttgtctcctaccatgcggcccggtaccggcgctgaacgcggaggcctgatgatgggccacccgggaatgcactacgccccaatgggcatgcatcccatgggccagcgcgcgaacatgccccccgtgcctcatggcatgatgccccagatgatgcccccaatgggtggaccccccatgggccagatgccaggtatgatgtcgagcgtgatgcctggtatgatgatgtcccacatgtcgcaggcctctatgcagccagcccttccacccggcgtcaacagtatggatgtggcagctggtactgcttctggggcgaagtcgatgtggacagagcataagtctccggatgggcgaacgtactactacaacacagagacgaagcaatccacctgggagaagccagatgatttgaaaacgcccgcagagcaactgctaagcaagtgcccctggaaggagtacaagtcagactcaggcaaaccttactactacaattcccagactaaagaaagcaggtgggcaaagccgaaagagctcgaagatcttgagggatatcagaacaccattgtggccggatcactcattactaaatcaaacctgcacgctatgatcaaagccgaagagtccagcaagcaggaggagtgcacaacaacctcaacagctccggtccctaccaccgagatacctaccacaatgtctaccatggcggctgcagaggcagcagcagccgtggtcgctgccgctgcagctgcagccgctgcagctgccgctgccaacgccaatgcatcaacttcagctagcaatactgtctccggaaccgtgcctgtggtgccagaaccggaagtcacctctatcgtcgctaccgtcgtagataacgagaacaccgtcacaatcagtactgaagagcaggcccagctaaccagcacacccgccatacaggatcaatctgtggaagtgtccagcaatacaggagaagaaacatccaaacaggagaccgtcgcagacttcactcctaaaaaagaggaggaggagtcacagccggccaagaagacgtacacttggaacaccaaggaggaggctaaacaggcctttaaggagctcctgaaggaaaagagggttccatcgaacgcttcctgggagcaggctatgaaaatgatcatcaatgacccgcggtattccgccctggccaagctgtccgagaagaaacaggcatttaacgcctataaggtgcagactgagaaggaagagaaagaggaggctcgctctaaatataaggaggccaaagagagttttcagaggttcctggagaatcacgagaagatgacctccactactcggtacaaaaaagcggaacagatgttcggcgagatggaggtttggaacgctatttctgagcgggatcgtctggagatctacgaggatgttctatttttcctaagcaaaaaggagaaggaacaggctaaacagcttagaaagagaaactgggaagctctgaaaaacatccttgacaatatggcaaatgtcacctacagcacaacatggagtgaggcacaacagtacttaatggacaaccccacctttgccgaggatgaagagcttcaaaacatggataaagaagatgcccttatatgttttgaggaacatatacgggctctagaaaaagaagaagaagaagagaagcagaaaagcctcttgagagagcggcgccggcagcggaaaaatcgcgagtcatttcagatctttttggatgaacttcacgagcatggacaacttcattcgatgtccagctggatggagctgtaccctaccatcagcagtgacatccggttcacaaacatgctgggtcaacccgggtccaccgcgctagatctcttcaagttttatgtcgaagacctaaaggcaaggtaccatgacgagaagaagatcatcaaggatatcttaaaagataaggggtttgtggtggaagtgaataccacgtttgaggacttcgttgctatcatctcgagtaccaaacgatcaactacattggatgcagggaacataaagcttgccttcaacagccttctggagaaagcggaggcccgtgagcgggagcgcgaaaaagaagaggccagaaagatgaaacggaaggaatctgctttcaaatctatgcttaagcaggccgctccacccattgaactcgacgcagtgtgggaggacataagagaaaggttcgtgaaggaacctgctttcgaggacattaccctggagtccgagagaaaaagaattttcaaagacttcatgcatgtcttggagcatgagtgtcagcatcaccactcaaagaataagaaacacagcaagaagagtaaaaagcaccacaggaagaggagccggtctagatcaggcagcgactccgacgatgatgacagccactcgaagaagaagcggcagcgaagtgaatcccggagtgcaagtgagcatagctcttccgcagaatctgagcgatcttacaagaaatcaaagaaacacaaaaaaaaaagtaaaaagagacggcacaagtcggacagccctgaaagcgacgcagagcgggagaaggataaaaaagagaaggaccgggaaagtgagaaggatcgcactaggcagaggtccgagagtaagcacaaatctcccaagaaaaagaccggcaaggactccggaaactgggatacatctggttccgagctaagtgaaggcgaactggagaagcgccgtagaaccctgttagagcagctagatgatgaccagtag

SEQ ID NO: 131209 - DNA, 2481 bp, synthetic construct
  misc_feature 1..2481: note = Description of Artificial Sequence: Synthetic coding sequence
  source 1..2481: mol_type = other DNA
atggacgtcgccgccgggaccgcatccggcgccaaatcgatgtggacggagcacaagtcccctgatgggcggacttattactataatacagagaccaagcaaagcacctgggaaaagccggatgatctcaagacccccgccgaacagttgttgtcaaaatgtccgtggaaagagtataagtctgatagcgggaaaccatattactacaactctcaaactaaggagtcaaggtgggccaagccaaaagagcttgaagacctagagggctaccaaaatactattgtcgctggaagtctcatcacgaagagcaatctccatggaatgttgaccgagttgaagtactcaaagcaggaagaatgtacaacaacgagtaccgcccctgtgccgacgacagagatcccgactaccatgagcaccatggccgccgcagaggcagctgcagccgtggttgctgccgccgcagcggccgctgctgcggcagcagccgctaacgcaaatgccagtacgtctgcttctaacactgtaagtggtaccgtcccggtcgtcccagagcctgaagtgacgtccatagtggccacggtagtggacaatgaaaatactgtgactataagtaccgaggaacaggcccagctcacttctaccccagctattcaggaccagtccgtggaggtgtcgtctaacactggagaggagacttctaagcaagaaacggtggctgactttacccccaaaaaagaggaggaagagagccagcccgctaagaaaacttacacctggaacacaaaggaggaagctaagcaagcattcaaggaactattgaaggaaaaaagagtcccctccaatgcctcgtgggagcaagcaatgaagatgatcatcaacgatcccagatacagcgccctggcaaagctgagtgaaaaaaaacaggccttcaacgcttacaaggtgcagaccgaaaaagaggagaaggaggaggcaagaagcaagtataaggaggccaaggaatcatttcagcgttttttagagaatcacgaaaagatgacaagcaccaccagatataaaaaagccgaacagatgtttggagagatggaagtctggaatgctatctctgagcgggacagactcgaaatatatgaggatgtgctgttttttctatctaaaaaggagaaggaacaggctaaacagctgcgaaagcgcaactgggaggcactgaagaatattctagacaacatggccaacgtgacatattctactacttggagtgaagcccagcagtacctgatggataatcccaccttcgctgaagacgaggaactacaaaatatggacaaagaggatgccctgatatgtttcgaggagcatatcagagcccttgagaaggaggaggaggaagagaaacagaagagtttgctgcgcgagagacgacgacagagaaaaaaccgcgaaagcttccagatctttttggatgagctccacgaacacggacagctccattctatgagtagttggatggaactctaccctaccattagttcagatatccgctttaccaacatgcttggacaaccagggtctactgccctagacctgttcaagttctacgtcgaggatctgaaggcaaggtaccatgatgaaaagaagattataaaggacatcttaaaagacaaaggcttcgtggtcgaggttaatacaaccttcgaggactttgtggccatcatcagcagcaccaagagatctaccaccttggatgccgggaacatcaagctcgcatttaacagcctcctggaaaaggctgaagctagggagcgtgaacgcgagaaggaggaagctagaaagatgaagcgtaaagagtccgccttcaagtcaatgctgaagcaggctgccccaccaatcgaacttgatgctgtctgggaggatattcgggagagatttgttaaagagccggcgttcgaagacatcacacttgaatctgagagaaaacgcattttcaaagactttatgcatgttctagaacatgagtgccagcatcaccattctaagaacaaaaaacactccaagaagtccaagaaacaccaccgcaaacgtagccggagcaggagcggaagcgatagcgacgacgacgattcgcatagcaaaaaaaagcgccagcggtccgagagcagatccgcatccgagcactcaagctctgccgagtccgagcggagctataagaaatcaaaaaaacacaaaaaaaaaagcaaaaagcgcagacataagagcgactctccagagagcgacgccgaacgtgaaaaagataaaaaggagaaagatcgggagtccgagaaagaccgcacacgccagcgttctgaaagcaagcataagtcgcctaagaagaaaaccggaaaggattccggcaattgggatacttcaggctcagagctttccgagggcgagctggaaaagcgtaggcgaaccctgctcgagcagttggatgacgatcaatag

SEQ ID NO: 131210 - DNA, 1347 bp, synthetic construct
  misc_feature 1..1347: note = Description of Artificial Sequence: Synthetic coding sequence
  source 1..1347: mol_type = other DNA
atgcgcccaggaacgggcgcagagcggggcggcttaatggtgtccgaaatggagtctcatccaccatcgcaagggccgggggatggggaacgccggttatccggcagctcactctgcagcgggtcatgggttagcgctgatggcttcctgcggagacgtccgagtatgggccatcccggtatgcactatgcacctatggggatgcatcccatggggcaaagggctaatatgcccccagtgccacatgggatgatgccgcagatgatgccccccatgggtggtcccccgatgggacaaatgccagggatgatgtcgtctgtcatgcccggaatgatgatgtcgcatatgagccaagcgtccatgcagcccgctttaccacccggggtaaacagtatggacgtggcagccggaacagcgagtggggcgaagtcaatgtggacagagcataaatcccctgacggtcggacatactactataacaccgagactaagcagtcaacttgggagaagccagacgatctcaaaacgccagcagagcaattgctgagtaaatgtccatggaaagagtataaaagtgattctggcaagccctactactacaattctcagacaaaagagagccgctgggctaaaccaaaagagctcgaagatctggaagggtaccaaaacaccatcgtcgctggatctttgataactaagtcaaaccttcatgccatgatcaaagccgaagagagtagcaagcaggaagagtgtaccacaacctcaacagctccagtacctacgactgagattcccacgacaatgtctacgatggcagctgcagaggcagcggccgccgttgtggccgctgctgccgccgcagccgcggccgctgcagcggctaacgccaatgcctccactagcgcctcgaacacagtgagcgggaccgtaccagtggtaccagaaccagaagtgacatctatagtcgctaccgtggttgacaatgagaacaccgttaccatctccacagaggagcaggcccagttaactagcaccccagcaatacaagatcaatctgttgaagtgtccagcaatacaggtgaagaaacatccaaacaagagaccgttgccgattttacacctaagaaggaagaggaggagtcccagccagccaagaagacatacacgtggaatactaaagaagaggcgaagcaggcttttaaggaactgctgaaagagaagcgcgtaccttcgaacgcctcttgggagcaggcgatgaagatgatcattaatgaccctcggtactctgcgttggccaaattatctgagaaaaagcaggcattcaatgcatacaaagtgcagacgtag

SEQ ID NO: 131211 - DNA, 2826 bp, synthetic construct
  misc_feature 1..2826: note = Description of Artificial Sequence: Synthetic coding sequence
  source 1..2826: mol_type = other DNA
atgaataaaaaaaaaaaaccctttctaggaatgcctgctccgctagggtatgtgccaggacttgggagaggtgctacagggttcactacgagaagtgacattgggccagctcgagatgctaatgacccagtggacgaccggcacgccccccccggcaaacggaccgtcggtgaccagatgaaaaagaatcaagccgcagacgatgatgacgaagatctgaacgacacaaactacgatgaattcaacggatatgccggctccctcttctcaagcggaccttacgagaaggacgacgaggaggccgatgccatttatgccgccctcgataagagaatggacgaaaggcgcaaggagaggagagagcagagagaaaaggaagaaatagaaaaatacagaatggaaagaccaaagatccagcaacagttctccgaccttaaacgaaagctcgcggaggtgacagaggaggagtggttatcaatacccgaggtcggagacgcccgcaacaagaggcagcgcaacccccggtacgagaagctcactcccgtgcctgacagcttctttgcgaaacatctccagactggcgagaatcatacaagcgtggaccctcggcagacccagttcgggggactgaacacaccatacccaggaggactgaataccccctatcccggcgggatgacccctggattgatgacaccaggcacgggagaactcgatatgagaaagatcggccaggccagaaacaccttgatggatatgaggttaagccaagtatccgactcagtttccggccagaccgtggtggatccgaaaggatacctaaccgacttaaatagcatgatacccacacatggaggggacattaatgacataaagaaagcaagattgttacttaaatccgtccgagaaaccaacccccaccatcccccagcatggatagcctcagcacgcctggaggaagtgactgggaagctgcaggttgctcgaaacctcatcatgaaaggaacggagatgtgtcctaagagcgaggatgtgtggttggaagccgccaggctgcaaccaggggatactgccaaggctgttgtcgcccaggcagtgagacacctgccacagtctgtccgcatctacatccgtgcggctgagctggagactgacattcgagccaagaaaagagttctgagaaaggcgctagagcacgtgcccaattctgtacgtttatggaaagcggcggtggagctggaggagcccgaggacgcaagaatcatgctgtctagggccgtcgaatgctgccccacttccgttgagttgtggctggcccttgcccggctggagacttacgaaaatgcccggaaggtcctaaataaggcgagagaaaacattccaacagaccgccacatttggatcaccgcagccaaattggaggaggccaatgggaatacccagatggttgagaaaatcattgaccgagctattacatcattgagagctaacggagtcgagattaatagggaacagtggattcaggatgcagaagagtgcgatagggcaggttcagtagccacctgccaggccgtgatgagggctgtcatcggcattgggattgaagaggaagacaggaaacatacttggatggaggatgctgactcctgcgtcgcgcacaacgctctggaatgcgctcgggcaatatacgcctatgcgttgcaggtttttccttcaaaaaagagcgtatggctcagagcggcatactttgaaaagaatcacggcacgcgcgaaagcttagaggctctcctgcaacgcgctgtggcccactgtcctaaagcggaggttctctggttgatgggcgcgaaaagtaaatggcttgcaggggacgttccagcagcacggagtattctggcactcgccttccaggctaatcccaacagtgaggagatttggctcgcagccgttaaactggagagcgagaatgacgagtacgaacgggcccggcggctgttggctaaagcccgcagtagtgcaccaaccgctcgtgtgttcatgaaaagtgtcaagctggaatgggtgcaggacaacataagggccgctcaagatttatgtgaagaagccttgaggcactacgaagacttccccaagctctggatgatgaagggtcaaatcgaagagcaaaaagagatgatggagaaggcccgtgaggcttataatcagggtctcaaaaagtgcccacatagtacaccgctatggctgttgctatctaggctggaggagaaaattggacagttgacgcgggccagggcgatcttagagaaatcccgactgaagaaccctaagaaccctggtttgtggctcgagagtgttaggcttgagtatagagccgggcttaagaacatcgctaataccttgatggccaaagccctgcaggagtgccccaacagtggcatcctttggtcagaggcaatctttcttgaagcccgccctcagcgccgaaccaagtctgttgacgctttaaaaaaatgcgaacatgacccacacgtgttgctcgctgtggcgaagcttttttggagccaacgcaaaatcacgaaagctagggagtggttccataggacagtgaagattgactcagacctcggagatgcctgggcctttttctataaattcgagttgcagcacggtacagaggaacagcaagaggaggtgcgtaaacgatgtgaaagcgctgaaccgaggcacggagaactgtggtgcgccgtgtcaaaggacatagccaactggcaaaaaaagattggagacatcctgcgccttgtagcgggccgaatcaaaaataccttttag

SEQ ID NO: 131212 - DNA, 2706 bp, synthetic construct
  misc_feature 1..2706: note = Description of Artificial Sequence: Synthetic coding sequence
  source 1..2706: mol_type = other DNA
atgaataaaaagaaaaaaccctttctcggcatgcctgctcccctcgggtatgtccctggccttggtaggggcgcaacggggttcactacccgatcagatattggccccgcaagagatgctaacgaccccgtcgatgacaggcatgcacctccaggtaagcgaaccgtaggagaccagatgaaaaagaaccaggccgccgacgatgatgatgaggatctcaatgacacaaactacgacgagtttaacggatatgcggggtcgctgtttagttccggcccttatgagaaagatgacgaagaagcagacgcgatctacgctgcactggataagcgtatggatgagcgccgcaaggagcgcagagagcaacgagagaaggaggaaatagagaagtaccgaatggagcgcccgaagatacaacagcagttcagcgacctgaaacgaaagctggcagaagtgaccgaagaggagtggctcagtattcccgaggtcggggatgcacgcaacaaacgacagcgcaaccctcgttacgagaaactaacacctgtgcccgattctttttttgccaagcacctacagactggggaaaaccacaccagtgttgaccctagacagacacaattcgggggcctcaatactccatatcctggggggctgaacactccttatcccgggggcatgactcctggactcatgactcctggcactggcgaacttgatatgcgtaaaataggccaagcacgcaatacactcatggacatgaggctgagtcaagtcagcgactccgtgtctggtcaaaccgtcgtggatccaaaaggatacctcacagaccttaacagcatgattccaacccacggaggcgacattaacgatattaaaaaggctagactgctcctgaaatccgtaagagagacaaacccccatcatccaccagcctggattgcatcagctcgactggaggaggtcacaggtaaactgcaagtggcccgaaacctgatcatgaaagggacagagatgtgccccaaatcggaagacgtgtggctcgaggccgcacggttacaaccaggcgatacggccaaggccgtagtggcccaagctgtccgacacctgccacagtcagtgagaatttatataagagcagctgagctagagacggatatccgagccaagaagcgggtcctccgtaaagcccttgagcacgttccaaattcagtgagactgtggaaggccgcggtggagctggaggaaccagaagatgcgcgcatcatgctgagcagagccgtcgagtgttgccctacatcagtcgaactgtggttagcactcgcaaggttggagacgtatgagaacgcgcgcaaggtcctcaataaagcccgggagaatattcccacagaccgacatatctggataacggcggccaaattggaggaggctaatggtaacacacagatggtagaaaagattattgaccgggcaattacatctctacgggccaacggggttgagattaatagggaacagtggattcaggatgccgaggagtgtgatagggcaggatccgtcgctacatgtcaagccgtgatgagagccgttatcgggattggcatagaagaggaggatcgcaaacatacttggatggaggacgcagattcatgtgtggctcacaatgccctggagtgtgcccgggccatctacgcctatgctctccaggtgttccctagtaagaaatcagtgtggctgcgggccgcctatttcgaaaagaaccacggaacaagggagtccctggaagcacttctccagagagctgtggcacactgccctaaggctgaagtgctctggctgatgggcgcgaagtcaaaatggctagccggcgatgttccggcagctaggtccatcctggcactggcttttcaggttttcatgaagtctgtgaaacttgagtgggtgcaagataatataagggctgcccaggacctttgtgaggaggccctgcggcattacgaggactttccaaagttgtggatgatgaagggacagatcgaagagcagaaagagatgatggaaaaggccagggaagcctacaaccagggactcaagaagtgtccacacagcacgcctctgtggctcctgctgagtagactggaggagaaaataggccagctgacccgcgccagggccatcttagagaagtcccgtctgaagaacccaaaaaaccctggcctgtggcttgaatccgtcagactcgagtaccgggctgggttgaaaaacatcgcaaatacattaatggctaaggccctgcaggaatgcccaaacagtgggatcctctggagcgaagcaatcttcctggaggcgcgtccacagcgtcggacgaagtctgttgatgcattaaaaaagtgtgagcacgacccacatgtactgctcgcagtggccaagctcttctggagccaacgtaaaataacaaaggcacgtgagtggttccacaggacagtaaaaatagatagcgatctgggtgacgcgtgggcctttttctataaatttgagctgcagcatggaacggaggaacagcaggaggaagtcagaaagcgttgcgagagcgcagagccgcggcatggtgagctctggtgtgctgtgtccaaagacatagcaaactggcagaagaaaatcggcgacatcctgaggctggtggctggacgcattaagaacactttctag

SEQ ID NO: 131213 - DNA, 7008 bp, synthetic construct
  misc_feature 1..7008: note = Description of Artificial Sequence: Synthetic coding sequence
  source 1..7008: mol_type = other DNA
atggctggggtgttcccctatcgcggaccggggaacccggtgcctgggcccttagcccccctcccagactacatgagcgaagagaagctgcaagaaaaggcgcgcaagtggcaacagttacaggcaaagcggtacgctgaaaaaagaaagtttggcttcgtggacgcgcaaaaagaggatatgcctcctgagcacgttaggaaaattataagggaccatggcgacatgacaaacagaaagtttcggcatgataaacgcgtgtacctcggcgcccttaaatacatgccacacgcagtcttaaagctgctggagaacatgccgatgccatgggaacagatcagagacgtgccggtcctgtaccacattactggtgctataagtttcgtcaacgaaatcccgtgggtgatcgaaccagtatatattagccagtggggctccatgtggattatgatgcggagagagaaacgcgatcgccgtcacttcaaaaggatgcggtttccaccattcgacgacgaggagcctcctctcgattacgcggacaacatccttgacgttgagccattggaggctattcagctggaactcgatcccgaagaagatgcccctgttctcgattggttctatgatcaccagcctctgagggattcaagaaaatacgtgaatggctccacgtaccagcgatggcaattcaccctgcctatgatgtcgaccctgtacaggctagccaaccagctcctaactgatctcgtcgacgacaactatttttacttattcgacttgaaagcattctttacatcgaaggccctgaacatggccatacccggaggacccaaattcgagcccctcgtccgggatatcaacttacaggacgaagattggaatgaattcaatgacataaataaaatcatcatcagacaaccgattagaaccgaatacaagattgcctttccatatctgtacaataacctaccccaccacgtgcacctaacatggtaccacacccccaatgtggttttcattaaaaccgaggatcccgatctacctgccttttacttcgaccctctcatcaatcccattagccatcgccatagcgtaaagagtcaggagcccctgccagacgacgatgaggaatttgaacttcctgaattcgtggaacccttcctcaaagacacgcctctatataccgataacacggcaaatgggatcgctctactctgggctccaagaccttttaacctccgctccggtcgcacccggagagccctcgatatcccattggtgaaaaattggtaccgggagcactgtcctgctgggcaacctgttaaagtgcgcgtcagctaccaaaagctccttaagtattacgtgctcaacgcactcaagcaccgaccgccaaaagcccaaaaaaagaggtacctctttcggtcgtttaaagccacgaagttttttcaaagtacaaagctggactgggtggaggtgggcctgcaggtgtgcaggcagggctataacatgcttaatctactgatccacaggaagaatctcaactatctacatctcgactataatttcaaccttaagcctgtgaagaccctgaccaccaaagagaggaaaaaatctagattcggcaacgcattccatctgtgccgtgaagtcctccgtttgacaaaactggtggtggactcgcatgtgcagtatcggctgggcaacgttgacgcctttcaattagccgatgggctgcaatacatatttgcccacgtcggacagctaactgggatgtacaggtacaagtacaaactcatgcggcaaatcagaatgtgtaaagacctcaagcacttgatctactaccggtttaacacaggtcctgtcggtaagggcccaggatgcggattctgggcagctggctggcgggtatggctcttcttcatgaggggtatcactcctcttcttgagcgctggttaggcaacctgctggctcgacagttcgagggccgccacagcaaaggggtggcaaagacggtcacaaaacagcgcgtggaaagccatttcgatctggaacttcgcgccgccgtaatgcatgatattctcgatatgatgccagagggcattaagcagaacaaagcaaggaccatcctccagcatcttagcgaggcttggcggtgttggaaggcgaatattccttggaaagtccccggattgcccacccccattgagaatatgatcttgaggtacgtcaaggcaaaggccgattggtggaccaatacggcccattataaccgcgaacgcatccggaggggagctaccgtcgataaaaccgtttgcaaaaaaaacttaggccgcctgactcgcctgtacctgaaggccgagcaggagcgacaacacaattacctgaaagacgggccatacatcaccgccgaggaggctgtggccgtgtatacaacgacagtgcactggctggagtcccgcaggttctcccccatacctttcccgcctcttagctataagcatgacactaaactgctcatcctggccttggaacgactcaaagaggcctactccgtgaagtcaaggttgaaccaaagccaacgtgaggagttgggtttgatcgaacaagcgtacgacaaccctcatgaagccttgtcgcggattaagcggcacctgctcacacagcgcgcattcaaagaggttggcattgagttcatggatctctactcacatctggttcctgtctacgatgttgaacccctagaaaaaattaccgatgcgtatctggaccaatatctttggtatgaggctgacaaaaggagactattccccccatggatcaaaccagccgatactgagcccccaccactgcttgtttataaatggtgtcagggcatcaataatcttcaggatgtgtgggaaacaagtgagggagagtgtaatgtcatgctggaaagcagatttgagaaaatgtacgaaaagattgacctgactttactgaacagattgctccggctcatcgttgaccacaacattgccgattatatgaccgcaaagaacaacgtggtcataaactacaaggacatgaaccatacgaattcctatggcatcattcgaggcctgcaatttgcctcgttcatcgtccaatattatggacttgtgatggatttactggtccttggattgcaccgcgcctccgaaatggcaggcccgccccagatgcctaacgatttcttgtcgttccaggacatcgctactgaagcagcccacccaatcagactgttttgccggtatatcgatagaatccacatcttttttcgcttcacagctgatgaggcacgagatttaatccagcgatatctgactgagcatccagatcccaacaatgagaatatcgtgggctataacaacaagaagtgttggcctcgcgacgcgaggatgcgcttgatgaaacacgatgtcaacctgggtcgggcagtcttttgggatattaagaataggttacccaggtccgtgacaacagttcagtgggaaaattcctttgtctccgtatatagcaaggacaatcctaacctcctcttcaatatgtgcggctttgagtgtagaattctgccaaaatgccgcacctcttacgaagaattcactcacaaagacggcgtttggaatttgcagaacgaagtgacgaaagagcggaccgcccaatgttttctgcgcgtggatgacgagtccatgcagcggtttcataatagggttcggcagatactgatggcctccggctccactacattcactaaaatagtgaacaagtggaataccgccctgataggactcatgacatattttagagaagctgtggtcaatacacaggaattactcgatctgctggtcaaatgcgagaacaaaatacagacccgtataaagattggtttaaatagcaagatgccaagtcggttccctcccgttgtgttctataccccaaaggagctgggcggactggggatgctctcaatgggacacgtcctaatcccacagtccgatctcaggtggtccaaacagaccgatgtgggcatcactcactttcgcagcggcatgtcccacgaggaagaccagctgatccctaacctatataggtatatccagccctgggaaagcgagtttatcgactctcagagagtctgggctgagtatgctcttaagagacaggaggccatagcccaaaaccggaggcttacgctcgaagatttggaagactcttgggacaggggcatcccccgcataaacaccctcttccaaaaggataggcacactctggcatacgacaaggggtggagggtgcggacggatttcaaacagtaccaggtcctgaagcagaatccattttggtggacacatcagcgccacgacgggaagctctggaaccttaataattacaggactgacatgatccaggctctggggggggttgaaggcatactcgagcacactctcttcaaaggcacttattttcccacctgggagggcctcttttgggagaaagcttcaggcttcgaggaatccatgaagtggaagaagctcacaaatgcccagcgcagtgggctcaaccaaattcccaaccgacgatttacactttggtggagtcccaccatcaatcgcgccaacgtttatgtcggttttcaagtgcagctagatttaacagggatctttatgcacggcaagataccaacattgaaaattagccttattcaaatcttccgggcacacttgtggcaaaaaatacatgaatccatcgtcatggatctctgtcaggtgttcgaccaggagctggatgcattagaaatagaaactgttcagaaggagacaatacatcctcggaaaagctataaaatgaatagtagttgcgctgacatattgttgttcgcatcttacaaatggaacgttagccgcccctccttgcttgccgacagcaaggacgtgatggactcaactaccacccagaaatattggatagacatccagctaaggtggggggattacgatagccacgatatcgagagatatgccagggctaagttcctcgactacacgaccgataacatgtctatctacccatctccaacaggtgttctgatcgcaattgatctggcctacaacctgcacagcgcatacggcaattggttcccaggcagcaagcccctgatacagcaagccatggccaaaataatgaaggccaacccagctctgtatgtattgagagaaagaatccggaagggtttacagctatatagcagcgaaccgacagaaccatacttgtctagccagaattatggagaactcttctccaatcaaatcatttggtttgtcgacgacacaaacgtgtaccgggtgaccatccataaaactttcgaaggaaacctgactactaaacctattaacggcgcaatattcatcttcaatccaagaacaggccagttgtttctgaagattatacatacatcagtatgggcaggacagaaaagactgggacagctcgccaagtggaagaccgctgaggaggttgccgcactgatccgaagcctcccagtggaggagcaaccaaaacaaatcatcgtcacccgtaaaggaatgctggacccattggaagtgcatttgctggacttcccgaatattgtgataaagggatccgagctgcaactccccttccaggcttgcctgaaggtagaaaagttcggagacttgatcctgaaggccactgagccccagatggtactgttcaacctgtatgatgactggctgaaaacaattagctcatatacagctttcagccgattgattttaatcttacgtgcattgcatgtcaacaatgatcgcgcaaaagttattctcaagcccgacaaaactactatcacggagccccaccatatttggcccaccctgaccgacgaagagtggatcaaagtggaagtccaattaaaggacctgatactcgctgactacgggaaaaagaacaatgtgaacgttgcttcgctcacccagtcagagatcagagacatcatcctcggtatggaaatctccgctccttcccagcagaggcagcagatcgccgaaatcgaaaagcaaacaaaagagcagtctcagcttaccgctacccagactcgcaccgtgaataagcatggggatgagatcattacatcgaccacaagtaactacgagactcagacgttcagttccaagaccgaatggagggtgcgggcgatcagcgctgctaaccttcacctgagaacaaaccatatctacgtgtcctccgatgatatcaaggaaaccggctatacatacattttacctaaaaacgtcctcaagaagtttatatgtatcagcgacctgcgcgctcaaatagcaggttacttatatggggtctcgccacccgacaaccctcaagttaaagaaattcgatgcatagtcatggttccccagtggggaacccaccagacagtgcatctgccggggcagttgccacaacacgagtatttgaaggagatggagccgcttggttggattcacacccagccaaacgagtctccacagctctctccccaggacgtgaccacacatgctaaaattatggcagataatccatcttgggacggggagaaaactatcatcataacatgttcttttaccccagggagttgcacattgaccgcctacaaactcaccccatcaggttatgaatgggggaggcagaacactgataagggtaataatccaaaaggatacctaccttcacattacgaacgagtccagatgcttctgagcgatcggtttttgggattctttatggttcctgcccagtccagctggaactacaactttatgggagttcgccacgatccaaacatgaaatatgaactccaacttgctaatcctaaggagttttaccacgaggtgcatcggccatcccacttcttgaacttcgcactacttcaggagggcgaagtatacagcgcggatagggaggacctctacgcatag

SEQ ID NO: 131214 - DNA, 1392 bp, synthetic construct
  misc_feature 1..1392: note = Description of Artificial Sequence: Synthetic coding sequence
  source 1..1392: mol_type = other DNA
atgattcaggcactaggcggtgtagaagggatcctggagcacacccttttcaagggaacctacttccctacttgggagggcctgttctgggaaaaagcatcagggtttgaggagtcaatgaaatggaaaaagctcactaacgcccagagaagcggcctaaaccagattcctaataggcgctttaccctgtggtggagcccaaccatcaatagggccaacgtttacgtcggctttcaggtgcagctcgatctgaccggaatcttcatgcacggaaaaattccaacactgaagatttcgctgatccagatctttcgggcgcacttatggcagaagatccacgaatcaattgttatggacctatgccaggttttcgaccaagagttagatgcactagaaatcgagaccgtccaaaaagagactatccaccccagaaagagttacaaaatgaattcttcttgcgcagatattctgctgttcgccagttacaagtggaacgtctcaagaccctctctcctggccgacagcaaagatgtcatggactccaccactactcaaaagtactggattgatatacagctgagatggggcgactacgattcgcacgatatcgaacgatacgctagagcgaaattcctggactacacaaccgataatatgtctatctacccttccccaaccggtgtgctgattgctatcgatctcgcatacaatctgcatagttactctgaggtaggctcgctgcagcaggcgagccatactacaggagcaaaaattatgaaagccaatccagccctgtatgtgctcagagaaaggatacgcaaaggcctgcaactatattcctcagagcccacagagccctatctgtcatcccagaactacggggaattattctctaaccagatcatttggtttgttgacgacacaaacgtataccgggtgaccattcataaaaccttcgagggaaatctgaccaccaaacctatcaacggcgccatcttcatttttaaccccagaaccgggcagctgttcctgaaaattattcacacatctgtctgggccggccagaaaagactcggacaactagcgaagtggaaaaccgctgaggaggtggctgccttgattcggagtctgcccgtggaggagcaaccaaagcagatcatagtgactagaaaaggcatgttggaccctcttgaagtgcaccttctggattttccaaatatcgtcatcaaggggtcagagttgcagctcccttttcaggcttgtctgaaagtcgagaagttcggcgacttgatactgaaggccacagaacctcagatggtgctgtttaatctgtatgacgactggctgaaaaccatctcctcatatactgccttttcgaggctaattctttag

SEQ ID NO: 131215 - DNA, 2727 bp, synthetic construct
  misc_feature 1..2727: note = Description of Artificial Sequence: Synthetic coding sequence
  source 1..2727: mol_type = other DNA
atggcggacggaggtggcccgaaagacgcacctagcctccgctcatcccccgggcctgcccctcgtgtgcctcgtgctgtagggcctagtggtggtggaggagagactccacggaccgcagcacttgccctaaggttcgataagcccattaagcaagccttttacaatacaggggccgtgctcttcgtgtgcctgtgctgcggggcagccgttctggtatactttatcctggaagcctttctacggcctctcctttgggcagtcctgtgtggaaccttcctgcatccttttaaatcgtcgctgaccagactcggccgtcactggctgcagcgtctgcaccgggcgcatacaccgatcgtccttgctgccttgctcctccctctctgctttgtggactacggtgtagaggcgctcggggagcaggcgctgcgcaggcggaggctgttattacttctcggcgctggcggacccctcctgtatgggctgtattgcttgggtagttatctgggcgtgcaggtcttgctcgtccatgccgcaactctgatatgtaggggactggattatttctcttcgctctggatttggactctggttgtgggttatgtgctgaccgttagctttaagtggaacgcttcaacagagcggtacctgcgggctgtttctattcccgtgtggatcatactgctgttccatctggcttctctggctggcagctggaggattccagtgttcctggtgatcgttttcttaatgtccgtcggcacactgtacgaaaaacagaacggtaaggaaagctctggcgccgagctgcccggccaggtgatctccatggctgcatcgacactcgctaacttggcgatttctataactggctacgagtctagttctgaagaccagccctcaacccaacctgctgaagcagtcgatcggggagaaagcgcgccaacgctctcaaccagcccctctcctagtagcccctcacccacttcacctagtccaaccctcggcagacggcggcctgaaataggtacctttctcagaaagaagaagaccagcgatatctattttgtgagcctggtttgggccatagtggtaatgcagatttggcttaacctgtggatcgtccagctgctacctgtccccatcgcagtgtggatacttaaaaagctcgtcatccacttcggagtagtcgactttcttgaaaaaagatatcatgtctggtggggcatcatcgagtcattcttaaaggagcggcagggtgctttagcaccttggcctatcgttggactcggcaagttccttctgaaagttgattccaaactgtggcattggctcaacaagaaaatgataatctggctcgaaaagatgctggataaaattatctcaattttcattatatttcttctcgtgattggcacactgctgctagcccttctcctgacagcaaaggtccaccaagagagcgtacatatgatagaggtgacatcgaatctgattaacgaaacgttggccaaccatcctgagtgggcaaattggttacccgaagcacaggtcgtgcagcgcgctttaaatagcgccgccaacaacgtttatcaatatgggcgggagtggatcacacataaactgcacaagatcttaggcgacaaggtgaacaatactgcagtgatcgaaaagcaggtgttagagctgtgggacagactgtaccatagctggtttgtgaagaacgttacacattccgggagacataaaggtcaaaagctgcacgtgtcccggcagaacagctggcttggtgacattctcgattggcaggatatagtgagtttcgtgcatgagaatatagagaccttcctgagtattttggagagcctttggattgtcatgagtagaaatgtttccctgctgttcaccacggtcactacgttgcttaccatactgttctattccggtacagcgctcctgaattttgtcctcagtctcatcattttccttactaccctgttctatttgttgtcgtctagcgatgagtattacaagcccgtaaagtgggttattagcttgacgccgttgtcccagccagggccctcctcaaatattattgggcagtctgttgaagaagctattaggggagtgttcgacgccagcctgaagatggccggtttttacgggttatatacctggttaacccatacaatgttcgggattaatattgtttttatacctagcgcccttgcagccatactaggagctgttccattcctcggtacttattgggcagctgtccccgcagttctggacctgtggctgacacaggggctcgggtgcaaggccatcttgttactcattttccatttgctacctacttacttcgtggacactgccatctattcagatatatccgggggaggacatccttacttgaccggcctggcagtggcaggtggagcatactacttgggcctcgagggtgctattatagggcctattctgctgtgtatcctagtggtggcttctaatatatatagtgccatgctggtcagccccaccaactcagtgccaacccctaaccagacaccctggcctgcgcagcctcagagaacatttcgggacatcagccgctccgaaatattttctgtcgatgttgtgtctagcgcagttattttccgcaagttcaagttcgattccgaattctcctctgccgttgcattgtgcccttctagctgcgcatag

SEQ ID NO: 131216 - DNA, 1062 bp, synthetic construct
  misc_feature 1..1062: note = Description of Artificial Sequence: Synthetic coding sequence
  source 1..1062: mol_type = other DNA
atgcttaaaagctgttctcgggcctcgttctctcccagcgtccgaaaaccacctcttattcttcggcgattgctgtctgaggatgtgggcatggatattccctttgaggagggagtcctgagcccaagtgccgcagatatgagaccagagcctcccaactcacttgacctgaatgacactcatccaagacgaatcaaacttaccgcccccaatatcaacctctccctggaccagagcgaggggtccattctgtccgacgacaacctcgattccccagacgagatcgatattaacgtggacgagctggatactcctgatgaggctgactccttcgaatacactgggcacgaagatcccaccgccaacaaagacagtggccaggagagcgagtctatccctgagtatactgccgaggaagagagggaagacaatcggctttggaggaccgtggttattggtgagcaggaacagaggatcgacatgaaagtgatcgaaccataccggagggtaattagccacggaggatactacggagatgggctcaacgccatcattgtgttcgctgcctgttttctacccgacagctctagagctgactatcactatgttatggagaacttattcctctacgtcattagtactctggaattgatggtcgcagaagactacatgatagtttatctcaacggggctacaccgcgcagacggatgcctggactcggctggatgaaaaaatgttaccagatgatagatcgcaggctgcgcaaaaatctcaaatccttcatcatagtgcacccgtcatggtttataaggacgattctggccgtaacaagacccttcatcagttccaagttcagttccaagattaagtacgtgaactctctctcagagctcagtgggctcatccctatggattgtatccatattccggaatctatcatcaagctcgacgaggaactgagagaagcaagcgaagccgccaaaacaagctgtctctacaacgaccctgagatgtccagtatggagaaggatatagacctgaaactgaaagagaagccgtag

SEQ ID NO: 131217 - DNA, 9267 bp, synthetic construct
  misc_feature 1..9267: note = Description of Artificial Sequence: Synthetic coding sequence
  source 1..9267: mol_type = other DNA
atggaagagttcttgcaacgcgccaagagcaaactcaacaggtctaagcggttggaaaaggtgcatgtggtgatcggccctaagtcctgcgatctggacagtctgatcagcacatttacttatgcttatttcctagataaggtatcaccgcccggcgtgctttgcctgcctgtgcttaatatcccacgaactgagtttaattattttactgagacgaggtttatactggaagaactgaatatctccgaatccttccacatatttcgggacgagattaatctacaccagcttaacgatgagggcaagctgtccattaccttagtaggtagcagtgtgctggcttcagaagacaagaccttggagagcgccgtcgtgaaagttataaatccagtagagcagtctgacgcgaatgtggagttccgtgaatcttcctcaagccttgtcctgaaggagattctgcaggaggccccggaactaattactgagcagctcgctcaccgactaaggggctccatcctgtttaaatggatgacgatggagagcgaaaagatctccgagaagcaggaggaaattctctcaatactcgaagagaagtttccgaatttgcctcctcgagaggatatcatcaacgttctccaagagacacagttcagcgcgcagggactgtcgatcgagcagaccatgctgaaggatctgaaagaactaagtgacggagagatcaaggtagcgatttccactgtttctatgaatctggaaaattgtctgtttcactctaacatcacgtcggacctcaaggctttcaccgacaagtttggcttcgatgttctcattctgttctcctcttacctgagcgaggaacagcagcctcgccggcaaatagctgtttactccgagaatatggagctgtgtagccagatttgttgcgaattggaagagtgtcaaaatccttgtctggaattggaacctttcgattgtggctgcgacgagatcttggtataccaacaggaagacccaagcgtcacttgtgatcaggtagtactggtggtcaaagaggtgatcaaccgacgttgtcccgagatggtttccaattcacggactagctctaccgaagcagtggccggctctgctcccctgtcccagggctcgagtgggattatggaactgtatggctcagacattgagccccaacctagcagtgtgaattttatagagaacccgcctgatctaaacgactctaatcaggctcaggtggatgcgaatgtggatctcgtgtctccagactccgggctggctacgatccgatccagccgctcttcaaaggagtccagcgtgttcctgtccgatgattctccagtgggcgaaggtgctggacctcatcacactctgctgcccggcctcgattcttattctccaattcctgaaggcgccgtggccgaggaacacgcctggtcaggagaacacggtgagcattttgacttgtttaacttcgaccctgctcctatggcctcaggtcagtcacagcaatcttcccattccgccgactacagccccgccgacgatttcttcccaaatagcgatctgtccgaggggcaattacctgccggtccagaggggctggacgggatgggtacaaacatgagcaattacagttcgagttctctgctatcaggtgcaggcaaggattccctcgttgagcatgacgaggagtttgtacagagacaggactcacccagggataactctgaaagaaacttatccctaaccgatttcgtcggcgacgagtcaccaagcccagaacgcctgaagaacacggggaagaggatcccaccgacaccaatgaatagcctcgtggaatctagcccctctactgaagaacctgctagtttatacacagaggacatgacacagaaggcaaccgataccggccacatgggtccgccacagacacacgctaggtgttccagttggtggggtggattggaaatcgactcaaagaatattgccgatgcctggtcaagtagtgagcaggaatccgtattccaaagcccagaatcgtggaaggaacacaagccctccagtattgataggagggcctctgacagcgtattccagccaaaatctttggaatttactaaatcaggtccatgggagagcgagtttggacagcctgaattaggaagcaatgacatccaggacaaaaacgaagaatccctgcctttccagaaccttcccatggagaagagcccacttcctaatacttctcctcaagggacaaatcacctaattgaagactttgctagcctttggcacagcgggaggagcccaaccgctatgcctgagccgtggggaaacccaacggacgatggagagcccgctgccgttgccccattccccgcatggtctgccttcggaaaggaggaccacgatgaggcactgaagaacacatggaacttgcaccccacctcaagtaagaccccttccgtgcgagaccctaatgaatgggccatggccaagagcgggtttgccttttcctcctccgagctgctcgataactctcctagcgagatcaacaatgaggctgctcccgaaatttggggcaagaaaaacaacgactcaagggaccacatattcgccccaggaaatccttcttcggacttggaccacacatggaccaactccaagcctcccaaggaggatcagaacgggttggttgaccccaagacaagagggaaagtgtatgaaaaggttgatagctggaatctttttgaggaaaatatgaagaaaggaggctcggacgtcctggtgccctgggaggacagctttctgtcttataaatgctcagactacagtgccagcaatctgggagaggactctgtgccgtctcccctggatactaactactctactagcgatagctacacttcacctacttttgccggcgacgagaaggagaccgaacataagcccttcgctaaagaagaaggtttcgagagcaaagacgggaattctaccgccgaggagactgacatcccaccacagagtctccagcagtcctctagaaacaggatcagcagcggtcctggcaatctcgacatgtgggccagtccccacactgataactccagtgagattaacaccacccacaacctggacgagaacgagctcaaaacagagcacacggacggcaaaaatatctcgatggaggatgacgtgggggagtctagccagtcctcttacgatgatccatctatgatgcagctttacaatgagactaacagacagttgacgttgctgcactcatctacaaatagcagacaaaccgcgcccgactcacttgatctgtggaatagggtgattctggaggatacacagtcaacagcaaccatcagcgacatggacaacgacttggactgggatgattgtagcggcggtgctgccatcccttccgacggccagactgagggctacatggcagagggctccgaaccagagacgagattcactgtgcgccagctcgaaccatggggattagagtaccaagaagcgaatcaggtcgattgggagctccctgcctcagatgagcacacaaaggattcggccccaagcgagcaccataccctcaacgaaaagtccggacagctgatcgctaacagtatctgggactccgttatgagagacaaggatatgtcatcctttatgctgcctggctcttcccacattactgattccgagcagcgagaattaccccctgagatcccgagccacagtgcaaacgtgaaagatacccactccccggacgctccagcagcatcggggacctcagagagtgaagcactgatctcccacctcgataaacaagatactgagagggagactttgcagtccgacgcagcatccctggccacacgcctggaaaatcctggttatttcccacaccctgacccttggaagggacacggcgacggccagagcgagtctgaaaaggaggcacagggagccaccgaccggggtcatctcgatgaggaggaggtcatcgcctccggggtggaaaatgcctcaggcatttccgagaagggccaatctgaccaggagctaagttctttagtcgctagtgaacaccaggagatctgcattaaatccggtaagatttcctcattagcggtgacgttcagtcctcagaccgaggagccggaggaggtactggagtatgaggagggctcatataatttagactcgcgggatgtgcagacaggcatgagcgccgacaatctacagccaaaggatacacacgagaagcacttgatgagtcagaggaattcgggcgagaccaccgagaccagcgacggaatgaatttcaccaagtatgtcagtgtccccgagaaagacctggagaaaacagaagagtgtaactttctggaacccgagaacgtgggcgggggccccccacaccgggtgccacgttcattagactttggagacgttcctatagattccgacgtgcacgtgtcctccacctgcagtgagatcacaaagaaccttgatgtgaaaggaagcgaaaacagtctaccaggggccggatcaagtgggaactttgaccgagacacgatctctagtgaatatacacactcttctgcctcatcccctgagttgaatgatagttctgtggccttatccagctggggccaacagcccagtagcggataccaagaagaaaaccagggtaactggtccgagcaaaaccatcaggagtccgaactgatcaccaccgatggacaggtggagatagtgaccaaggttaaggacttggagaagaatcgcattaatgagttcgaaaaaagcttcgatcgtaagaccccgacattcttagagatttggaatgattccgtcgacggggatagctttagttctctatctagtcctgaaaccgggaagtatagtgagcattcgggcacccaccaggagtccaatctcatcgcatcttatcaggagaaaaatgaacacgatatctcagctactgtacagcccgaggatgcaagagtgatatctacatcctccggatccgacgatgacagcgtcggaggggaggagagtatcgaagaagagatacaggtggccaactgtcacgttgccgaggatgaatccagggcatgggacagtctaaacgaaagtaacaaattcctggtgaccgccgacccaaaaagtgaaaatatttatgactacctcgacagtagcgagccagcggaaaacgaaaataagtcaaacccattctgtgataatcagcagtcatcccctgacccatggacatttagtcctctgacggaaaccgaaatgcaaatcaccgctgtagagaaagaaaaaagatcctcaccagagacaggtacgacaggcgacgtagcatggcagatctcacccaaggcgtcatttccaaaaaatgaggacaattctcagctcgagatgctcggtttctctgcagatagtacagaatggtggaaggcttccccacaggaagggcgcctcatcgagagccctttcgagcgggagttgagtgacagtagtggcgtgctcgagatcaactcctccgtgcaccagaatgcatccccctggggcgtacccgtgcagggtgacatcgaaccggtcgaaactcactataccaaccctttcagcgacaaccatcagtccccttttttagaaggcaacggaaaaaacagtcatgaacagctgtggaacatccagccgcggcagcccgacccggatgccgataagtttagccagctcgtgaaactagaccagattaaggagaaggactctagagaacagacctttgtgtccgctgcgggcgacgagctgactcctgaaacccccacgcaagaacagtgccaggatactatgctgccagtgtgcgatcaccccgacacagcattcactcacgcagaagagaattcctgcgtcaccagcaacgtgtcaactaatgagggacaggaaacaaaccagtgggagcaagagaagtcctatctgggggaaatgacgaacagtagcatcgccacagaaaattttcctgcagtatcgagccccacccagttaataatgaaaccaggcagcgagtgggacggcagtaccccatcagaggattccagagggacttttgttcccgacattctccacgggaattttcaggaagggggacagctggcctccgctgcacccgacctgtggatcgacgcgaagaaacccttcagcctcaaagctgatggagagaatcccgatattctcacccattgtgagcacgacagcaacagtcaggccagcgactcacctgacatttgccatgattccgaagccaaacaggagacagaaaagcatttaagcgcatgcatggggccagaggtcgagtcatcagaactgtgcctgacagaacctgagatcgatgaagaacctatctacgagccgggacgagagtttgtgccatcaaacgccgaacttgactctgagaatgctacagtcttaccccccattggttaccaggcggatattaaagggagctctcaaccagcatcccacaagggttccccggaaccttccgagatcaatggagacaatagcactggtctccaggtaagtgaaaagggagctagtcccgatatggcacccatccttgaaccagtcgatcgcagaattccccggatcgagaatgtcgccacctccatttttgtcactcatcaggaacctacccctgagggggatggaagctggatcagcgacagcttctctccagaatcccagcccggagctagagctttgttcgacggagacccacatttatcgactgagaacccagcactggtgccagatgcactgctggctagtgacacatgcctagacatcagcgaggcagcgttcgaccatagttttagcgacgcctctggtcttaacacatctacagggaccattgacgatatgagcaagctgactcttagcgagggacaccctgaaaccccagtggacggcgacctcggaaagcaggacatttgtagcagcgaggctagctggggagatttcgaatatgacgtgatgggacaaaatatcgatgaagacctgctcagggaacccgagcattttttgtatgggggggatccgcctttggaagaggattccctcaaacagagcctggccccctacactcctcccttcgatctgagctacttaacggagcccgcgcagagtgccgagactatcgaagaagctggatctcctgaagatgagtctctgggctgtagggccgctgaaattgtactgagtgcattgccagatcggaggtctgagggcaaccaggcagaaacaaagaaccggctccccggttctcaacttgccgtccttcacatccgggaagaccccgagtccgtttatcttccagtcggggcgggtagcaacattctgagcccatctaacgtggattgggaagtcgagacggataacagtgacttacctgcagggggggacattggaccaccgaatggagcgtcaaaggaaatctctgaactggaggaggagaagaccattcccaccaaagaaccagagcagataaagtccgagtataaagaagaacgatgtacagagaaaaacgaggatcgccatgccctgcatatggattatatccttgtgaatcgagaggagaactcccattccaagcccgaaacctgtgaagagcgcgaaagcatcgcagaacttgagctgtacgttgggtctaaggaaactggactgcagggcacgcagctggccagctttcccgatacatgtcaacctgcctcactgaacgagagaaagggcctcagtgcagagaagatgtcttctaaaagcgacaccagatccagtttcgagtcccccgctcaagaccagtcgtggatgtttcttggccattccgaggtcggagatcctagcctagatgcacgagattccggcccaggctggtccggtaagaccgtggaaccattttctgagctcggtttgggagaaggcccacaactacagatactcgaggagatgaaacctctggaaagcctcgctcttgaagaagcttcgggtccagtcagtcagtcccaaaagtccaaaagcagagggcgcgctggccctgatgctgtgacccttcaggcggtgacacacgataatgaatgggagatgctgagccctcagcctgtgcagaagaatatgatccctgatacagagatggaggaggaaaccgagtttcttgagctgggaacgcgtatcagtagaccaaacggattactcagcgaggatgtgggaatggacattccatttgaggagggggtgctttctccaagcgctgccgacatgaggccagaacctcctaactctttggacctgaacgacacacacccaagaagaattaagctcaccgccccaaatatcaacttgagcctagaccagtcagagggatcgatcctttcagatgacaatttagatagtcctgatgaaatagatatcaacgtggacgagctggatacccccgacgaggccgactcattcgaatacacaggacatgatcctactgcaaacaaggactcggggcaggagtccgaatctatcccagaatataccgccgaagaggaacgcgaagacaataggctatggcgcacggttgtcattggcgagcaggaacagcgaatcgatatgaaggttatcgagccataccgtcgggtgatctcacacggcggctactatggagatggtctgaacgctatcattgtgttcgcggcttgctttttacctgacagctccagagctgactaccattatgtgatggaaaacctctttctttatgtcatcagtaccttagagcttatggtggccgaggactatatgattgtgtacctgaatggggcgaccccccgccggagaatgccaggcctcggatggatgaagaaatgctaccagatgatcgatcgaaggttacgcaaaaacctcaagagcttcatcattgttcacccatcgtggttcattagaaccatcctggccgtcactcgaccctttatctcctccaaatttagttccaaaatcaagtacgtgaatagcctgtccgagttatcgggactgatcccgatggactgtatacacattcctgagagtataatcaaactggatgaggaactcagggaggcttcagaggccgccaagaccagttgtctatataacgatcctgaaatgagcagcatggagaaagacatcgatctgaagctcaaagaaaagccatag

SEQ ID NO: 131218 - DNA, 9165 bp, synthetic construct
  misc_feature 1..9165: note = Description of Artificial Sequence: Synthetic coding sequence
  source 1..9165: mol_type = other DNA
cgtaacttgatgcacagaatgaaggagagcgagaatcgcagcaagcgcctggagaaagtgcatgtcgttatcggaccaaaatcttgtgacctggattctctgatctcaacatttacgtacgcatacttcctcgacaaagtctccccaccgggagtgctttgcctgcccgtcctcaacattcccaggaccgagttcaactacttcacagagactcgatttattttggaggagcttaacatatccgaaagctttcacattttcagggacgaaattaacctgcaccagctgaacgatgaggggaagctttctataaccctggtcggatcatctgtcctggcaagtgaagacaaaactcttgaatcggcagtggtgaaggtgataaacccagtggaacagtcagacgccaacgttgagttcagagagagtagctctagtttagtgctaaaggagattctccaggaagctcccgagctcattacagaacaactggcacaccggcttcgtggcagcatcctttttaagtggatgacaatggagtccgaaaaaattagcgaaaagcaggaagagatcttaagcattctggaggaaaaattccccaacctccccccccgagaagatattatcaatgtcctgcaggaaacacagtttagcgcacagggactgtctatcgagcaaacgatgctgaaggacttgaaggagctcagtgacggcgaaatcaaagtggcgattagcacagtgtcaatgaacctggagaactgcctgttccactcaaatataacctctgatctgaaagcattcaccgacaagtttggcttcgacgttttgatcctcttcagtagttatctgagcgaggaacagcagccacgtcggcagatagctgtctattctgagaatatggaactatgttcgcagatttgctgtgaactggaagaatgtcaaaatccgtgtctggagttggagccttttgactgtggctgtgacgagatactggtatatcaacaggaagacccttcggtgacttgtgatcaagtggtgctggtggtgaaggaggtcattaaccgccggtgtccagaaatggtcagcaactcacgcactagctccactgaagcggtggctggcagtgcaccccttagccagggaagctccggaatcatggaactctacgggtcggacatcgaacctcagccaagcagcgtcaacttcattgaaaatccgccagacctgaacgactcaaaccaggctcaagtcgacgcaaacgtggatttggtgtccccggactcaggccttgctaccattaggtcttctcggtcttctaaggagtcttccgttttcctgagtgatgatagccctgtgggggagggagcaggcccacaccacacactgctgccgggcttggattcttatagtcccatacctgaaggcgccgtcgcggaggaacacgcctggtccggcgaacatggagagcacttcgatctgttcaatttcgaccccgcaccaatggctagcgggcaatcccaacaatctagccatagtgccgactattctccagccgacgacttcttccccaattccgacttaagcgaggggcaactacccgctggccccgaaggattagatggaatgggaaccaacatgagcaactattcatcttcttcactcctctctggtgccggcaaggactctctagtagagcatgatgaagagttcgtccaacgccaagattcaccaagagacaatagtgaaagaaatctgagcctaaccgactttgtgggcgacgaatcaccatccccagaaaggcttaagaacacgggcaagcgaatacctccaacacccatgaactctctggtagaatcctccccctcaaccgaagaacccgcgtccctgtacactgaagatatgacacagaaagccacagatactggccatatggggcccccacagacacatgctcgctgttccagctggtgggggggcttggagattgacagcaagaacatcgcggatgcttggtcgtcaagcgaacaggaaagtgttttccagtcccctgaaagctggaaagaacataagccatcttccattgacagaagagcctccgattcagtctttcagcccaaatcactcgaattcaccaaaagcggcccgtgggagagtgaatttggacaaccggagctgggcagcaatgatattcaagacaagaatgaagaaagtctgcctttccagaatcttcctatggagaagtcccctttaccaaataccagcccgcagggaactaaccacctaatcgaagatttcgcatctctgtggcattcaggtagaagcccaacagccatgcccgaaccatggggaaacccgacagatgacggggagcctgccgccgtcgcgccgtttccagcctggtccgcatttggtaaggaggatcacgacgaggctctcaagaatacgtggaatctccaccccacatcttctaaaaccccctcagtccgagacccgaacgagtgggccatggcaaagtccggtttcgccttcagcagtagcgaactgctggacaattcaccgagtgagattaataatgaggcggcgccagagatttggggaaagaaaaataatgatagtcgcgatcatatatttgcccctggaaaccctagcagcgacctggaccatacatggaccaactccaagccccccaaagaggaccaaaacggacttgtggatccgaagactagagggaaagtgtacgaaaaggtcgactcttggaacctgtttgaggagaatatgaaaaaaggcggttcagatgtgctggtgccatgggaagactcattcctgtcttacaagtgctcggactactctgccagtaacctgggggaggactccgtaccttctccgctggatacgaattattcaacatccgattcgtatacatcccccacatttgctggtgacgaaaaagagacagagcataagccgtttgcaaaagaagaaggattcgagtccaaagatggcaacagtacagcagaggaaacagatatccccccacagtcactgcagcagtcctccagaaataggatctcttcaggtcccggaaatctcgatatgtgggcgagtccccataccgacaactcatcagaaatcaacacaacccacaatctcgacgaaaatgagttaaagaccgaacataccgatggaaagaatataagcatggaagatgatgtaggggagtctagccaatcatcgtatgatgatcccagcatgatgcagttgtataatgagaccaaccgccaactgacacttctgcactcttccactaattctagacagaccgccccagatagtctggatctgtggaaccgagtgatcttggaggatacccagtcgaccgctacaataagcgatatggacaatgatcttgattgggacgactgctctggaggagcagcaatcccttccgacgggcaaacagaaggctacatggccgaaggatctgaacctgagaccaggttcactgttcggcaattagaaccgtggggcctggagtatcaagaggcgaatcaggtggattgggaactcccagcgtccgatgagcacactaaggatagtgccccctccgaacaccacaccttgaatgaaaaatcaggacagttgatcgcaaacagcatctgggatagcgttatgagagacaaggacatgagtagcttcatgctccccggctccagccacattaccgactctgaacagagagagctgccgcccgagataccgagccacagtgccaatgttaaggacacacacagcccggatgctcccgcagccagcggcacttcagagtccgaggctttgatctctcatctcgacaagcaagacacagaaagagagaccttgcagtcagacgccgcttccttggcaactcgactggaaaaccccgggtacttcccccatcccgatccttggaagggccacggtgatggccaatccgaaagcgaaaaagaggcccagggagccacagataggggacatctggacgaggaagaagtgatcgcttctggcgtagaaaacgcatctggaatctccgaaaaggggcagagcgaccaggagctgtcttccctcgttgcctcagagcatcaagaaatctgtatcaaatcaggaaaaatttcctctctggctgtcacattctcccctcagactgaagagccggaagaggtattagagtacgaagaggggtcatacaaccttgacagtagggacgtccagaccgggatgtctgcggacaatctgcagccaaaggacacacacgagaaacatctcatgtcgcagcgtaactctggagaaactactgaaacttcagatggaatgaacttcaccaaatatgtctccgtgccagagaaggatcttgaaaagactgaagagtgcaattttctcgaaccagagaatgtcggtggcggtccaccgcacagggtgcccaggagtctggactttggggacgtgccaatagactccgacgttcacgtgtccagtacctgcagcgagatcactaaaaacctagacgtgaaaggttccgagaattcccttcctggggctggctccagtggtaatttcgatcgagacacaatcagttcggagtacacacattcctcagccagttccccagaattaaatgattcctccgtggcccttagctcctgggggcagcagccttcatcaggctatcaggaggagaatcaggggaattggagcgaacagaaccaccaggagtctgagttaataacaaccgatggccaggttgagatcgtgacaaaggtaaaggacctggaaaagaaccgaatcaatgagtttgaaaagagcttcgatcggaagacccctaccttcctcgaaatctggaacgattcagttgatggcgactcattctcttccctttcttctccagagacaggaaaatactccgaacatagcgggacccatcaggagagtaatctcattgcctcttatcaggagaagaatgagcacgatatcagtgccaccgttcagccagaagacgcccgagtcatcagtacaagctcgggcagcgacgacgactccgtgggcggcgaggagtccatcgaggaagagattcaggtagccaactgccacgtggccgaggatgagtctagagcgtgggacagcttgaacgagagcaacaaatttctggttaccgcggatcctaaaagcgaaaacatttacgattatctagacagcagcgagcctgccgagaatgagaataagtctaatccattttgtgataatcagcagtcaagccccgatccctggactttctccccccttaccgagacagagatgcaaatcactgcggttgagaaagagaagcgttcctctcctgaaactggcaccaccggggatgtggcctggcagatcagtccaaaggctagtttccccaaaaatgaggataactcccagctagagatgctgggattcagcgccgattctacggaatggtggaaggcctcccctcaggaaggtcggttaattgaaagccccttcgaaagagagctgtcagatagcagcggggttctagagattaactcctctgtgcatcagaacgcctccccgtggggggttcctgtgcagggcgacattgaaccggtggaaactcattatactaaccctttttccgataatcaccaatctccttttctggaagggaacggcaagaatagccacgagcagctgtggaacatccagcccagacagcctgaccccgacgcagacaagttctcccaactcgtgaagctggaccagattaaggagaaagacagccgggagcaaacattcgtcagcgcggccggggatgaattaaccccagaaactcccacacaggagcagtgccaagacacaatgctgccagtctgcgaccatccagatacagcttttactcatgctgaggagaattcgtgcgttacatccaacgtgagcacaaacgaaggccaggagacaaatcaatgggaacaagagaaaagctacctcggggaaatgaccaactcctctattgcaactgaaaatttccccgcggtgtccagccccacccaacttataatgaagcctggatcagaatgggatggcagcacacctagtgaagacagcagggggaccttcgttccggatatactccacggaaatttccaggagggcggacaactcgcaagtgctgcccccgacctctggatcgacgcgaagaagccttttagcctcaaggctgacggagagaaccctgatatactgacacactgtgaacatgattctaactcgcaggcctctgattcccctgacatctgtcacgacagcgaagccaagcaggaaacagagaaacacctgtcagcatgcatggggccagaagtggagagcagcgagctgtgtttaaccgagccagaaattgatgaagaacctatctacgagcccggccgggaattcgtccccagcaacgcggagctcgacagcgagaacgctaccgtcctcccccccattggataccaagcggatatcaagggatcaagccagcctgccagccacaaaggaagcccagagccttctgagattaatggcgataattcaactggcttgcaggtgtccgagaagggtgcctcccccgatatggcccccattctcgagccagtggataggcggatcccccggattgaaaatgtggcgacatcaatattcgtgacacatcaggagccaacccccgaaggcgatgggagttggatctctgatagcttcagtccagagtcccaacctggcgcacgggccctgtttgacggggatccacacctgagcaccgagaaccctgccttggttcctgacgctctccttgcctccgacacttgcctcgatatctctgaagctgcttttgaccacagtttttccgatgccagcggtctgaacacttcaaccggcacaattgacgacatgtctaagttaacgctgtcagaaggacaccctgagacacccgtcgatggagacctgggtaaacaggacatctgtagctctgaagcatcctggggggacttcgaatacgacgtgatgggccaaaacatcgacgaggatctcctccgggagcccgagcattttctatacggcggcgatccccccctcgaagaagatagtctgaaacagagcctcgccccatacacacctccatttgacctgagttatcttactgaaccggctcagtctgctgaaaccatcgaggaggccgggtccccagaagacgagagccttgggtgcagggcagcagagatagttctatccgccctgccagacagaagatctgagggcaatcaggccgaaacaaagaatcgtcttccgggctcgcaactggccgtgctgcatatccgggaggatccggaaagtgtttatctgcctgtaggcgccgggagtaacatattaagcccaagtaatgtcgattgggaagtggagactgataattcagatctgccagccggcggcgacataggtccccccaacggggctagcaaagagatctctgaactcgaagaagagaaaacgatccctacaaaagaaccagagcagataaagtcagaatataaggaggagaggtgtaccgagaaaaacgaggatcgtcacgcccttcacatggattacattctcgtgaacagggaggagaactcacactctaaacctgaaacttgcgaggagcgcgagtcgattgcagaactggaactttacgtcggctcaaaggaaaccggcctacagggaacccaacttgcctcttttccagatacttgccaaccagcctcactgaatgaacggaaggggctgtcagccgaaaagatgtcgtcgaaaagcgatacaagaagctcattcgagagtccagcccaggaccaatcttggatgttcttggggcacagtgaggtgggtgatccctctctggacgccagagacagcgggcctggatggtctgggaaaacggtagagccattttccgaacttggccttggcgaagggccacaattgcagatcctggaggagatgaagccattggagtctctagctttagaagaagctagcggcccagtgtcgcagtcccaaaagagtaagtctcggggccgcgccggcccagacgccgtgacgttgcaggccgtgactcacgacaatgaatgggagatgctgagcccacaacccgtccagaaaaatatgataccagatactgagatggaggaagaaacagagttcttggagcttggaacccggattagtcggcctaatggtcttttatccgaagatgtgggtatggacatcccctttgaagagggagttctgtctccttcagctgcggatatgaggcccgagccaccaaattcactggatctgaacgatacccatccacggcggattaagttaactgcaccaaacattaacctcagtctcgaccagagtgagggaagcatcctgtccgatgataatcttgattcgccagacgagattgacattaatgtggacgagttagatactccggacgaagcggattccttcgaatacaccgggcacgaggaccccacagctaacaaggacagcggccaggagagtgagagtatccctgagtacacagccgaagaggagcgagaggataaccgtctgtggcgcacagtcgtaatcggcgagcaagaacaaagaattgatatgaaagtgatcgagccctatagacgggtcatttcacacggaggctcaagggggtattacggtgacggtctcaacgctatcattgtctttgctgcctgctttctcccggacagctctcgggctgattaccactatgtgatggagaatctgtttctttatgtcattagcacactcgaattaatggtagcagaggactacatgatagtttatctcaacggggccacaccgcgaagaaggatgcccggcctcggatggatgaagaaatgctaccaaatgatcgatcgacgtctccgtaaaaacctcaagagcttcattatcgtgcacccttcttggttcattcggacgatactggcagtcaccaggccatttatctccagtaagttctccagcaagataaaatacgtaaatagcctcagcgagctgagcggccttataccgatggactgcattcacattccagagtctatcataaattattag

SEQ ID NO: 131219 - DNA, 783 bp, synthetic construct
  misc_feature 1..783: note = Description of Artificial Sequence: Synthetic coding sequence
  source 1..783: mol_type = other DNA
atcgatataaacgtagacgagctggacacccctgatgaggctgatagctttgaatataccggccacgaccctactgctaataaggatagtgggcaggagagcgaatccattcccgagtatacagccgaagaggaaagggaggacaaccggctctggagaacagtggtcatcggggaacaggaacagcgaattgatatgaaggtcatagagccctatcgccgtgtgatttcccatggaggcgactccggatattacggcgacggactgaatgcaattatcgtatttgctgcttgtttcctccctgattcctccagggcggactatcactacgtgatggaaaatctgttcctttatgtgatctcaaccttggaactaatggtggctgaggattatatgatcgtgtacctcaatggagctaccccccgaaggagaatgccagggctgggatggatgaagaaatgttaccagatgatcgatcgtagactgcggaaaaacctgaaatcttttatcatcgtgcatccaagctggttcattagaacaattctggcagtgactaggccattcattagctctaagttcagttcaaagattaagtatgtgaactccctttccgagttatcagggctcattcccatggactgcatccacatccccgagtccataattaagtatgatgaggagagatcatataagcgcagtgtgcgaacatcttgtctgtacaacgaccccgagatgagctctatggaaaaggacattgatctgaagctgaaagaaaaaccctag

SEQ ID NO: 131220 - DNA, 7155 bp, synthetic construct
  misc_feature 1..7155: note = Description of Artificial Sequence: Synthetic coding sequence
  source 1..7155: mol_type = other DNA
tgattccagagccctgaaagttggaaggagcataaacctagctctatagaccggagggcttctgatagcgtctttcagcccaagagcttggaattcacaaagtctggcccatgggagtccgagtttggccagccagagctgggcagtaacgacattcaggacaagaatgaagaatccctacccttccagaatctgccaatggaaaaatcacctctgcccaatacatccccacaggggacaaatcatcttattgaggactttgcctcgctctggcattccggccgaagtccaaccgccatgcctgaaccctggggaaatcctactgacgatggagaacctgccgcagtggccccatttcctgcctggagtgcctttggaaaggaagatcacgacgaggccctgaagaatacgtggaacctgcatccgacctcctctaaaactccgagtgtgcgagaccctaacgaatgggctatggccaagtcagggttcgcgttttcgtcttctgaactgctcgacaactccccctccgaaattaataatgaggcggcccctgagatttggggcaaaaagaacaacgactcccgcgatcacatttttgcccccggtaacccatcaagcgacttggaccacacatggaccaattcgaagccccccaaggaagatcagaatggtctggtcgatcctaagacacgtggtaaagtgtacgaaaaggtggactcttggaatctgttcgaggagaacatgaagaagggaggtagcgacgtcctggtcccctgggaggactcgttcctctcatacaaatgcagcgactattcggcatcgaacctgggggaagattctgtaccctctcccctcgatactaattacagcacttctgacagttacacatcccccacctttgcaggcgacgagaaagaaactgaacacaagcctttcgccaaggaggagggattcgagagcaaagacggaaacagtactgctgaggagaccgacatccctccccaatctttacagcagagtagccgaaaccggataagttccgggcccggaaacttagacatgtgggcgtctcctcataccgataactcttccgaaattaatacaacgcataatctggatgagaatgaactaaagaccgaacacaccgacgggaaaaacatctccatggaggacgatgtcggggagtctagccagagttcttatgatgacccatcgatgatgcagctgtacaacgagacaaacaggcagctgacgctgctgcactcctcaacaaattcacggcagaccgcccctgattcactggacctgtggaatagggtgatcctggaagatacacagagtactgctacaatatcagatatggataacgatctcgactgggacgactgcagtggaggagcagcaatacctagcgacggccagactgaaggatacatggccgaaggatccgaaccagagacaaggtttactgttcgacaactggaaccctggggacttgaataccaggaggccaatcaggttgactgggaacttcctgccagcgatgaacacacaaaggattccgctccatcagaacatcatacactgaacgaaaaaagcggtcagctgattgccaacagcatttgggacagtgttatgcgggataaggacatgtcgagcttcatgttgcctgggtccagccacatcaccgattcagagcagcgcgagctgcccccagagattccttctcatagtgctaacgtcaaagacacacatagccccgacgctcccgctgcgtcaggcacttctgagtccgaggccctgatctcacacctggacaagcaggacaccgaacgggagacgcttcaaagcgacgccgccagtctggcgacaaggttggaaaaccccggatacttcccacaccccgatccttggaaaggccatggagacggacagtctgagtcagagaaggaagcacaaggcgccaccgacaggggccacctagacgaagaggaggtaattgccagcggtgtcgagaatgcatctggtatttccgaaaagggccagtctgatcaagaactcagtagcctggtagcatctgagcatcaggagatttgcatcaaatcaggtaagatcagtagcctggctgtcacatttagtccacaaactgaggagccagaggaagtgctcgaatacgaggaagggagctacaaccttgactcacgggacgttcagacagggatgagtgccgataatctccagccgaaggacacacatgagaagcacttaatgtcccagaggaacagcggggagacaacagagacatccgatggcatgaatttcactaagtatgtctcggtacccgagaaagacctggagaagactgaggaatgtaattttctggagcctgagaacgttggtgggggcccgccccacagagtcccacgctcgcttgacttcggcgatgtccctattgactctgacgtgcatgtgtcctccacctgctccgaaatcactaagaacctggacgtcaaagggtctgagaatagtctacctggagctggttcaagcggcaatttcgacagggacacaatttcctcagagtatacgcactcatccgctagttctccagagcttaacgacagctccgtggctctttcgagttgggggcagcagccatcctctggataccaggaggagaatcagggaaattggtctgagcaaaaccatcaggagagcgaacttatcaccaccgacggccaggtggaaatcgtgaccaaagttaaggacttggaaaagaatcggattaatgagtttgaaaaatcgttcgaccggaagacgccgacatttctcgaaatctggaacgactccgttgacggcgactctttcagcagcctgagtagcccagaaactggaaagtatagtgagcactccggcacacatcaagagtcgaatttgattgcatcctatcaggaaaagaatgagcatgacatttcggctaccgtgcagcccgaagacgctcgtgttattagcacttcatcgggctccgacgatgactcagttggaggcgaggagtctatagaagaagagattcaggtggccaactgccatgttgcggaggacgaaagcagggcctgggactcgttaaacgaatctaacaagttccttgtaactgccgaccctaagtctgaaaatatctacgactaccttgattccagcgagcctgcagaaaacgaaaacaagagtaaccctttctgcgacaaccagcagagtagtcctgacccttggactttttcccccttaactgaaaccgaaatgcagattacagctgtagaaaaagaaaaaagaagttcacccgagacagggactacaggcgatgtggcatggcagatttcaccaaaagcaagctttcccaagaacgaggacaattcccagcttgaaatgctcgggttttcggctgattccacagaatggtggaaggctagcccacaagaggggcgactcatcgaatcccctttcgagcgggagcttagcgactccagtggagtactggaaattaattcttctgtacatcagaatgcatctccatggggtgtcccagttcagggcgatatcgagcccgtcgaaacgcattataccaatccgttcagtgacaaccaccagtcaccattcctggaggggaacggaaaaaactcgcatgagcagctgtggaatatccagccccgccagcctgatcccgacgctgataaattttctcagctcgtaaaactggatcaaatcaaggaaaaagacagccgagaacagacattcgtgtcggctgctggtgatgagttaacacccgagacgcccactcaggagcagtgccaagacactatgttaccggtgtgtgaccatcctgatacggcctttacccacgcagaggaaaactcctgcgtaacgtctaacgtgagcacgaatgagggtcaagaaactaatcagtgggagcaagagaagagttatcttggggagatgacaaattcatccattgccactgaaaatttcccggccgtgagctctcctacacagcttatcatgaagcccgggtctgaatgggacggcagcactccatccgaggattctcggggcacgttcgttcccgacatcctgcacggaaattttcaggagggcggtcagctggcttccgccgcacctgatctctggattgacgctaagaagcctttttcactgaaagccgatggggaaaatcccgacatcttgacccattgtgagcatgactctaactctcaagcctcagacagtccagatatctgtcacgactccgaagctaagcaggagacggaaaagcacctttctgcttgtatgggccccgaagtggagagctcagaactctgcttaactgaacctgagattgacgaggagccaatttacgagcccggacgggaatttgtcccatctaacgcagagcttgatagtgagaacgcgacagtcctgcctccaatcggctatcaggccgacattaagggcagtagccagccagccagccacaagggatcccctgagcctagtgagattaatggtgacaattccacaggtctgcaggtgagcgagaagggtgctagcccggatatggctcccatcctggagcccgtggacagaaggatcccccggatcgaaaatgtcgctacttcaatatttgttacccaccaagaacccacaccagaaggagatgggtcctggatatcggattcattttcaccggagtctcagccaggcgctagggctctctttgatggagatcctcacctttctaccgaaaaccctgcgttggtgcccgacgccctgctcgctagcgatacctgcctagacataagtgaagcggctttcgaccactcattctccgatgcatcaggattaaatacctctacagggactatagatgacatgtcaaaacttaccttatccgaaggacatcccgagacccccgtggatggagacctggggaaacaagatatctgtagctcggaggccagctggggcgatttcgagtacgacgtgatgggccaaaacattgatgaagatttgctgcgcgaacctgagcattttctgtatggaggcgacccccctcttgaggaagatagtctgaaacagtcccttgctccctataccccaccgttcgacctgtcctatttgacagagcctgcgcagagcgccgaaactatcgaggaggccggctctcctgaggatgagtccctgggatgtagagccgccgagattgtgctgtctgctctgcccgataggcgctctgagggaaatcaagccgagacaaagaaccgtcttcccggctcgcagctggcagtattacatattagagaagacccggagagcgtctacttgcctgtgggcgcaggaagcaatatcctgagcccttccaacgtggattgggaagtggaaaccgacaactcagacctgccagccggaggcgacattggcccgcccaacggagcttcgaaggaaatctccgaacttgaggaggagaagaccatccccacaaaggagcctgagcagatcaaatccgaatacaaggaagagagatgcaccgaaaagaacgaggaccgacacgctctgcacatggattatatcctggttaatagagaagagaatagccattcgaagccagagacctgtgaggaacgggagtcaatcgccgagctggaactctatgtgggtagcaaagagactggattgcagggtacacagctggccagcttcccggacacatgccagccagccagcctaaacgagcggaaggggctctccgccgaaaagatgtcctccaaaagtgatacaagatcctctttcgaatctccagcacaggaccagtcctggatgttcctggggcactcagaggtcggcgatccgagtttggacgccagggatagtggacccggatggagtggtaaaacagtcgaacctttctccgaactgggactgggggaaggtcctcagttacaaattttggaggagatgaaaccactggaaagtttggcgttagaggaagcctcgggcccagttagccagtcccaaaagtccaagagtcggggccgcgccggccccgatgccgtgacattgcaggctgttacacacgacaacgaatgggaaatgttgagtccacaacccgtgcagaagaacatgattcctgacacagaaatggaggaagaaaccgagttcctggaactgggcacaaggatttcgcgccctaacgggttgctttccgaggatgtgggaatggacattccctttgaggagggcgtactctctccatctgccgcagatatgagaccagaacctcctaactcactggacctgaatgacacacatcccagacgtattaaactcaccgcacctaacataaatcttagcctggaccaaagcgagggctctatcctctccgatgacaaccttgactctcctgatgagatcgacatcaatgtcgacgaactggacactcctgatgaggcggacagtttcgaatacaccggccacgaccccactgctaacaaagactctggtcaggagtccgaaagcattcctgaatataccgccgaggaggaacgggaggacaaccgtctctggaggaccgtggtgattggcgagcaagaacagaggatagatatgaaagttatagaaccttatcgtagggtgatttcccacggtggggactcaggttactacggggacggcttgaatgctataatcgtttttgccgcctgtttccttcccgattcctccagagctgattatcactacgtgatggagaatctttttctgtacgtgatctcaacactcgagctaatggtcgctgaagactatatgatcgtgtatttgaatggcgctactccacgtcgtagaatgcccggtctgggttggatgaagaagtgctaccagatgatagacagaaggctcaggaagaatcttaagagtttcattattgttcacccctcctggtttatacgaaccattctcgcggttacacgcccatttatctcttccaagttttcttctaagattaagtatgtgaactccctctctgaacttagtgggctaattcccatggattgtattcatattcccgagtcaatcattaacatcgatctcaaactcaaggaaaagccctag

SEQ ID NO: 131221 - DNA, 8193 bp, synthetic construct
  misc_feature 1..8193: note = Description of Artificial Sequence: Synthetic coding sequence
  source 1..8193: mol_type = other DNA
atggtctccaatagccgtaccagttccactgaggccgtggcaggctccgctccactcagtcaaggctctagcggcatcatggaactttacgggagcgatattgagcctcagccatcttccgttaatttcatcgagaaccctcccgaccttaacgacagcaatcaggcacaagttgacgcgaacgtcgacctggtgtcccctgactctggcttagctacaatcaggagttcaaggagcagcaaggagtcaagcgtgtttctgtcggatgattcccctgtcggagagggcgccggcccccatcatactctgctccccggcttggatagctactctcccattcctgagggtgcagtggctgaagaacacgcctggtccggtgagcacggagagcatttcgatctcttcaatttcgatccagcccccatggcttctgggcagtctcagcaatcttcccattccgctgactacagcccagctgacgacttttttccaaactccgacctttcggaggggcaactgcccgctggcccagaaggcctggatggcatgggcaccaacatgtcaaactacagcagctccagcttacttagcggtgccggtaaggatagcctagtcgaacatgacgaggaatttgtgcaacgccaggattctcccagagataatagtgaaagaaatctgtcactcactgactttgtaggagacgagagcccctcacctgagaggttaaagaacaccggcaagaggatacccccaacacccatgaactccttggttgagtcctccccatctactgaagaacccgcttctctatataccgaggacatgacccagaaggctacggacacagggcacatgggcccccctcaaactcacgcccggtgttccagttggtggggcggcctggaaattgacagtaagaatattgccgatgcctggagctcttcggaacaggaaagcgtttttcagagccccgagtcctggaaagaacacaaaccctcatctattgatagacgcgcatcagattcagtatttcagccgaagagcctggagtttactaaaagcgggccgtgggagtcagagtttggccaacccgaactgggaagcaacgatattcaggataagaatgaggagtctctgcccttccaaaatttacccatggagaaaagcccactgcccaatactagcccccagggcacgaaccatctgattgaggattttgctagcttgtggcatagcgggcgctccccaaccgccatgcccgaaccctggggtaacccgaccgatgatggcgagcctgcagctgtggcacctttccccgcttggtctgctttcggtaaggaagatcatgatgaggcgctgaaaaacacctggaacttgcatccgacgagcagtaagactccgtctgtgcgagatcctaatgaatgggctatggcgaaaagcggctttgctttctcaagctctgaactgttagacaattctccctctgaaatcaataacgaggccgccccggagatttgggggaagaagaacaacgacagtagggatcacatcttcgctcctggaaaccctagttccgatcttgaccacacttggacaaatagtaaacccccaaaggaggatcagaacgggctcgttgaccccaaaacccgtgggaaggtctacgaaaaggttgacagttggaatctgttcgaagaaaacatgaaaaaagggggatctgatgtcctagtcccttgggaagatagcttcctgtcctataagtgtagcgattacagtgctagcaatcttggtgaagactccgtaccgtcccctctggacactaactatagcacatccgattcctatacatcccccacatttgccggggatgagaaagaaactgaacacaaaccatttgccaaagaggaaggctttgagtctaaagatgggaactccacggccgaggagacagacattccacctcagtctttgcagcaatccagtcggaatcggatctccagcggtccggggaacctggacatgtgggctagcccacacaccgacaactcctccgagatcaatacaacgcacaatctggatgagaacgaattgaagacggagcatacggacggcaaaaatataagtatggaggatgatgtgggagagagcagccaatcgagttatgatgatccgtcgatgatgcagctgtacaacgagaccaaccggcagctgacattactccactcatccacaaattcccggcagaccgcgccggattcccttgacctctggaatcgagttattctggaggacacacaaagcactgcaacaatcagcgacatggataacgatctggattgggatgattgcagcggtggcgccgcaattccgagtgacggacagaccgaagggtacatggccgaggggagcgaacctgagactcgatttacagtgaggcaactcgagccctgggggctggaatatcaggaggcgaaccaagtggactgggagctaccggcaagcgacgaacatactaaagatagtgccccctctgagcatcacactcttaatgagaagagtgggcagctaatagctaactctatatgggatagcgtgatgagggataaagatatgtcctccttcatgttaccaggctcatcacacatcacagatagcgaacagcgcgagctgccacctgaaataccttctcactcagcaaacgtgaaggatacccactctccggatgccccagcagccagcgggaccagtgagtcagaggccctgatcagccacctggataagcaggatacagagcgggagaccctccagagcgatgccgcaagtcttgctacaaggctagagaatccgggctacttccctcatcctgacccttggaaaggacatggcgacgggcagtctgaaagtgaaaaagaggctcagggcgcgacagatcgcggacatctggacgaggaagaggtaatcgcatcaggcgttgagaacgcctcagggattagtgaaaaaggacagtcggaccaggagctgagctccctcgttgcctctgaacaccaggagatctgcattaaatccgggaagatttccagcctagccgtgaccttttccccccagacagaggaacctgaagaagtgctggagtacgaagagggctcctataatctcgacagcagggatgtgcagaccggaatgagcgctgataacctccagcctaaggacacccacgaaaagcatctgatgtctcaaaggaactccggggagaccaccgaaaccagtgacgggatgaatttcaccaaatatgtatctgttcccgaaaaggaccttgagaaaacagaggaatgcaactttctggaacccgagaatgtgggaggagggcccccgcaccgcgtgcctcgctctcttgacttcggcgacgtacctatagatagcgacgttcacgttagctcgacatgtagcgagattaccaaaaatcttgacgtgaagggctccgagaatagcctgcccggcgccgggtcctctggtaactttgacagagatacaatcagttcggagtacacacactcttccgccagctcacctgaattgaatgattcttctgtagccttgtcttcctggggccaacagcccagctctggataccaggaggagaaccagggaaactggtctgagcagaatcaccaagagagcgagctgatcactaccgatggccaggtagagattgtgacgaaggtaaaagatctagaaaaaaaccgcattaacgagtttgagaagagcttcgaccgcaagactcccactttccttgaaatttggaacgacagcgtggatggggattcctttagctccctgtccagccccgaaacaggcaagtactccgagcacagcggaacacaccaggagagcaatctgatcgctagttaccaagaaaaaaatgagcacgatattagcgcaaccgttcagccagaagacgcgagggttatatccacaagttccgggtctgatgacgattcagttggcggagaggagtcgatcgaggaggaaattcaggtggctaactgccacgtagctgaggatgagtcccgcgcctgggattcgcttaatgagagcaataaatttctggtgactgccgacccaaaatctgagaatatttatgattatctcgatagcagtgagccggcagaaaatgaaaataaatccaaccctttttgtgataatcagcagtcctctccggacccctggacctttagtcccctcaccgaaaccgagatgcaaatcaccgctgtggagaaagagaaaaggagctcgcctgagactggaaccaccggtgacgtggcctggcagataagtccaaaagccagttttccaaaaaacgaagataacagccaactcgagatgctgggcttttctgctgatagcacagaatggtggaaagcatctccccaggagggcagactaatcgagagccctttcgaacgagagctgtccgatagcagcggagtcctggagatcaactcttctgtacaccaaaacgcttcgccctggggagtgcccgtacagggagatatcgagcctgtagagacacactacacaaatccgttctctgacaaccaccaatctccttttcttgaaggaaacggcaaaaactcccacgaacagctctggaatatacagccacgccagccggatcccgatgccgataaattttcacagctggttaaactggatcaaatcaaagagaaagactctcgagagcaaacatttgtctcagcggcaggagatgaactcaccccagaaaccccaacccaggagcagtgccaggacactatgcttcctgtgtgcgaccacccagacactgcattcacacacgctgaagaaaacagttgcgtgaccagcaatgtgagtaccaatgaagggcaagaaaccaatcaatgggagcaggagaaatcgtacttgggcgaaatgacaaatagctctatcgctaccgagaacttccccgcggtgtcttcgccgacccagctgatcatgaagccagggtctgagtgggatggcagcacaccctcagaggattctcgcgggacattcgtccctgatatcctgcacgggaattttcaggaggggggccaactcgccagtgccgcacctgacctgtggatcgatgcaaagaagccgtttagcctaaaagcggacggggagaaccctgacatcctcactcactgtgaacacgactccaatagccaagcctcagacagccccgatatctgccacgattcagaagccaagcaggagaccgagaagcatctgagcgcctgcatgggcccagaggtggagtccagtgagctctgtctcaccgaaccagaaatcgatgaagagcccatctacgaaccaggcagggagttcgttccatctaatgctgaactggatagtgaaaatgctacagtgctgcctcccatcgggtatcaggccgacataaaagggtcttcacagcctgcttcacacaaaggcagcccagagcctagtgaaataaatggcgataattctaccggcctacaagtgagcgagaagggggcaagccccgatatggcaccaattttggagcccgtggaccgaagaattcctaggattgaaaatgtcgccacatcgatatttgtgacccatcaggaaccgacccccgagggggacggaagctggatcagcgactccttttcccccgagtcgcagccaggagcccgcgccctcttcgacggggacccccacttgtcgaccgagaatcccgctttggtcccggatgctctgctagcctccgatacatgtctcgacatctcagaagccgcttttgaccacagtttttccgacgcctctggcctgaacacctctactgggactatcgatgacatgtccaagttgaccctgtccgagggtcacccagagacaccagtggacggagacctgggcaaacaagatatctgtagcagtgaggcctcctggggggacttcgaatatgatgtaatgggccagaatattgatgaagatcttcttagggagcccgagcacttcctgtacgggggggatccaccactggaggaagactctctgaaacaatccctcgcgccctacactcctcccttcgatctctcatacctgactgaacccgcccagagtgctgaaacaatagaagaagcgggctcacctgaggatgagagcctgggctgtagggcagcagagatagttttgtccgccctgccagaccgtaggtctgagggcaatcaagccgagactaaaaatagacttcctggatctcagctagccgtgctccacattcgagaggatccagaaagtgtttacctgcctgtgggtgcaggtagtaacatcctctctccatccaacgtggactgggaggttgaaactgacaacagcgatctgcctgcgggcggagatattggccctcccaatggtgcttcaaaggagatctccgaactcgaggaagagaagaccataccaaccaaggagcctgaacagataaagtctgagtacaaagaggagaggtgtaccgagaagaatgaggatagacacgccctacacatggactatatcttagtcaatagggaagagaatagtcactcaaaacctgagacctgtgaagaacgcgagagcattgccgaattagagctgtatgtgggatccaaggagacaggtctgcaggggacacagctggccagttttccggacacctgtcaaccagctagccttaacgaaagaaaaggtctctccgccgagaaaatgtccagcaaatcagatacccgcagttcgttcgaaagtcccgcccaggaccagagctggatgttcttggggcactccgaagttggagatccaagcctggacgcccgcgactctggcccagggtggtcagggaagaccgtggaacccttcagcgagctgggactgggcgagggaccccagctgcaaattctggaggagatgaaacccctcgaaagtctggctctggaagaggcaagcggtccagtgagccagtcccagaagagtaagtcccgcggacgggcaggaccggacgccgtaaccctccaggcggtaacccacgacaatgagtgggaaatgctgtctccccagcctgtccagaagaatatgattccagataccgagatggaagaagagacagagttcctcgaacttggtaccagaatctcaaggcccaacgggctattaagcgaggatgtgggaatggatattcctttcgaggagggagtcctgtcaccgagtgccgcagacatgcgacctgagccccccaacagcctagatctcaatgacacacaccccagacgcataaagttgaccgcccccaatatcaatctcagcctggatcagtccgaaggttctatcctgtccgacgacaatctggacagtccagacgagattgatatcaatgtggatgaactcgatactccagacgaggcagattcattcgaatataccggccacgaggaccctaccgccaataaggacagcgggcaggagagcgaatcaatacccgagtatacagcagaagaagagagggaagacaatcgcttatggagaaccgtggtgattggagaacaggaacagcgtatcgatatgaaggttatcgagccctatagaagggtgatttctcatggaggatactacggcgacggcctcaatgccatcattgtctttgccgcctgtttcctgcccgattcgtctcgcgcagattatcactacgtgatggagaacctattcttatatgtaatttccactctcgagctgatggtggctgaagattatatgattgtataccttaacggggctaccccccgtagacggatgccaggactggggtggatgaaaaagtgttaccaaatgatcgatcgtagactccgcaaaaacttgaaaagctttattattgtacaccctagctggtttattagaacaatcttggccgtcacacgcccttttatttcttccaagttctcatctaagatcaaatacgtcaatagcttaagcgagctgtccgggctgataccaatggattgcatccacatccctgagagcattataaagctcgacgaggagctcagagaagcttccgaagctgcgaagacatcttgtctgtacaatgacccagagatgagctctatggagaaggatattgatctgaaactgaaggaaaagccgtag

SEQ ID NO: 131222 - DNA, 927 bp, synthetic construct
  misc_feature 1..927: note = Description of Artificial Sequence: Synthetic coding sequence
  source 1..927: mol_type = other DNA
atgaggccggaaccgcccaattcattagacctaaacgatactcacccccggcggatcaaactgactgcccctaacatcaatctcagcctggatcagagtgagggcagtatcctgagtgatgataatttggacagccccgatgaaatcgacattaacgtcgacgagcttgacacccccgacgaggctgacagtttcgaatacacaggccatgatcctacggctaacaaagacagcgggcaggaatccgaatctattcccgaatatactgcagaagaggaaagagaagataatcgtctgtggcgcacagtggtcatcggtgagcaggagcagaggatagatatgaaagtgatagagccctaccgcagagtgatctcccacggcgggaaattgcggtattacggagatgggttgaatgcgattatcgtctttgcagcctgtttcctgcctgactcctccagggccgattaccactatgttatggaaaaccttttcttgtatgtgatctccacactggaactcatggtggcagaggattatatgattgtgtacctcaatggggctacgccgcgacgcagaatgccaggactgggttggatgaaaaagtgttaccagatgatcgaccggagattgaggaagaacctaaagtcttttataatcgtccacccgagctggttcattcgaacaatcttggcggttacccgcccatttatttcaagcaagttttcttcaaagatcaaatatgtaaactctctctctgagctgagtggcctgatcccaatggactgcatccatatccctgaatccattattaaatacgacgaagagcgtagttacaaacgctccgtacgcacttcatgtctgtataatgatcccgagatgagctctatggaaaaggatatcgatttaaagttgaaggagaagccctag

SEQ ID NO: 131223 - DNA, 1014 bp, synthetic construct
  misc_feature 1..1014: note = Description of Artificial Sequence: Synthetic coding sequence
  source 1..1014: mol_type = other DNA
atgaatggcctccgaaacaagcagctcctctccgaagacgtcggcatggacatccctttcgaggaaggagtgctgtcacccagcgccgccgacatgaggccagagccccccaactcgctcgatcttaatgacacacatccgcggagaataaagctgaccgcgcctaatataaatctgtctctggaccagtccgagggttctatcctgtctgatgacaacctcgactctcccgatgaaatagatatcaatgtggacgagctggacacaccggacgaggccgattctttcgagtataccgggcatgaccccacggctaataaagacagcgggcaggaatccgagtcgatccctgagtatactgccgaagaggagcgggaagataatcgcctgtggagaactgtggtcattggggagcaggaacagcgcatcgatatgaaggtgattgaaccttatcggcgagtcatcagtcatggaggatattacggagatggactgaatgctataatcgttttcgcagcctgcttcctgccagactcatccagggctgattatcattatgtgatggagaacctttttctgtacgtgatttctacgctcgagcttatggtggctgaggactacatgattgtgtatctgaacggtgctacccctaggagacgcatgcccggcctgggctggatgaaaaaatgctaccagatgattgatagaaggctgcgcaagaatctgaagagctttatcatcgtgcatccctcttggttcatccgtacaattctcgcagtgacccgcccatttatctcaagcaagttctcaagcaaaataaagtacgtaaattctcttagtgagttgagtggcctcattccaatggattgtatccatataccagagtctatcatcaagctggacgaggagctgcgcgaggccagcgaagccgctaaaacttcgtgtctgtacaatgatcccgagatgagctcaatggaaaaagatatcgacctgaaactgaaagaaaaaccgtag

SEQ ID NO: 131224 - DNA, 1155 bp, synthetic construct
  misc_feature 1..1155: note = Description of Artificial Sequence: Synthetic coding sequence
  source 1..1155: mol_type = other DNA
atggctgggaacgcagaaccccctcccgccggcgcggcttgccctcaagacagaaggtcctgtagtggccgcgctgggggggacagagtgtgggaagacggggagcaccctgcaaagaagctgaagagtggcggtgatgaagagaggcgggagaagccccccaaacgcaagatcgtcctgctgatggcttactcaggcaaggggtatcatggcatgcagcgcaacgtgggctcatcacaattcaaaaccatagaggatgatctggtgagtgccctggtgaggtccgggtgtatcccggagaaccacggggaggacatgagaaagatgtctttccagaggtgcgccaggaccgacaagggggtctcagctgcgggtcaggttgtgtcacttaaagtttggctgatcgacgatatcctcgagaagatcaacagtcatctcccgagtcatatcagaatcctcggtctgaagcgtgttactggagggttcaattctaaaaacagatgcgacgcacgtacatactgctacctgcttcctactttcgctttcgcccataaggaccgggatgtacaggatgaaacgtaccgcctgtccgcagaaactctccagcaggtcaaccggttgctggcatgttacaaaggcacgcacaactttcataactttaccagccagaagggccctcaggaccctagcgcctgtaggtacatattagaaatgtattgcgaagagccctttgtccgggagggtctcgagtttgcagtcattcgcgtgaagggccagagttttatgatgcaccagatcagaaaaatggtggggctggtggttgccatcgttaaaggctatgctccagagtcagtgttggaacgctcctggggcacagaaaaagtcgacgtccccaaggcccccggactgggcctggtgctggagcgtgtccacttcgagaagtacaaccagaggtttggaaacgatgggctccatgagcccctagattgggcccaggaggaaggcaaagtagctgcgttcaaggaggaacacatttatcctacaatcattggcactgagagagatgaacgtagcatggctcaatggttgagcactctgccaattcacaatttcagtgccacagcccttacagccgggggcaccggggctaaatag

SEQ ID NO: 131225 - DNA, 1284 bp, synthetic construct
  misc_feature 1..1284: note = Description of Artificial Sequence: Synthetic coding sequence
  source 1..1284: mol_type = other DNA
atgggactgcagctgagggccttactcggtgccttcggcagatggaccctaaggttagggcctcgacccagctgttctccgcggatggcaggcaacgctgagcccccccctgcaggagccgcgtgtccccaggatcgtagatcatgctccggtcgtgccggcggcgatagagtatgggaggatggggaacatcctgccaagaagctgaaaagcggcggcgacgaagaaagacgagaaaagcccccaaagcgcaagattgtcctactaatggcctattcgggtaagggctaccatggcatgcagcggaatgtaggtagttctcaattcaaaaccatagaagacgatctggtgtccgcccttgttagatccggctgcatccccgagaaccatggcgaggatatgcggaagatgtcgttccagcgctgtgctcgcacggacaagggcgtgtcagcagcgggacaggtcgtgagcctgaaagtgtggctgatcgacgatatcctggaaaaaataaatagccatctgccaagccatatccgaatattgggacttaaacgcgttacaggcggctttaactccaaaaaccgttgcgatgctagaacttactgctacctgctgcccacatttgccttcgcccacaaagaccgcgacgtgcaggacgaaacatatcgactgtccgccgagactctgcaacaggtcaatagactgctcgcctgttataagggcacccacaacttccacaacttcacttcacagaagggaccacaggaccccagtgcctgtagatacatcttagagatgtactgtgaagaaccatttgtgcgagaagggttagagttcgccgtaataagggtcaaaggtcagtccttcatgatgcaccagatcaggaagatggtggggctggtagttgccattgtgaagggctatgcacccgaatcagtcctggagagatcttggggaactgagaaagtggatgttcctaaagcgcctgggttgggcctggtacttgagcgggtgcacttcgagaaatacaatcagcggttcggcaacgatggactgcacgagcctctcgactgggcccaggaggaaggaaaagtggccgctttcaaagaggagcacatttatcccactattatcgggaccgagagagatgaacgcagtatggcccagtggctatcgactttacccatccacaactttagcgcgacagccctgaccgccggtggcaccggtgccaaagtcccttcaccactggagggaagcgagggtgatggagacacagattag

SEQ ID NO: 131226 - DNA, 1200 bp, synthetic construct
  misc_feature 1..1200: note = Description of Artificial Sequence: Synthetic coding sequence
  source 1..1200: mol_type = other DNA
atggccggaaacgccgaacctcctccagcgggagcggcctgtccacaggaccggaggagttgtagcggtagagctggtggggacagagtgtgggaggatggagagcatcccgccaagaaactcaagtctggcggggatgaggaacggcgggagaagcctccaaagagaaaaatcgtactgttaatggcgtactccgggaagggctaccacgggatgcagcgcaacgtgggctcttcccagtttaaaacgattgaggatgacctcgtttctgccttagtcaggagcgggtgcatccccgaaaaccatggagaagatatgcggaagatgtcgttccagcgatgtgctcgaaccgacaagggagttagcgccgctgggcaagtcgtcagcctcaaggtgtggctgattgatgacatccttgagaagattaattcacacctccctagtcatattaggatattaggcctgaagagagtgactggagggttcaatagcaaaaatcgctgcgatgcacgtacgtactgttacctcctgccaacatttgctttcgcacacaaggatcgggatgtgcaagatgagacttacagactgagcgctgagacgctgcagcaggttaatcgactgctagcttgctacaagggaacccacaactttcataatttcacttcgcagaagggaccccaggaccctagcgcttgccgatacattctggaaatgtactgtgaagaaccatttgtaagggagggactggagttcgcggtaatcagggtgaagggccagtcattcatgatgcatcaaattaggaagatggtgggtcttgtcgtcgctatcgtgaagggctacgcccccgagtcagtgttagagaggtcttggggtactgagaaagtggacgtgccaaaggcacctggtctcggcctggtcctggagagggtgcactttgaaaagtataatcaacgcttcggtaacgatggcctccacgaacccctggattgggcacaggaggaaggcaaagtcgcagccttcaaagaggaacacatctacccaacaattataggaaccgagagagatgagcggtccatggctcagtggctttcaactctgccaattcataattttagtgcaacagccctcacagccggtggcacgggagccaaggtaccttctcctctcgaggggagcgaaggagacggggacaccgattag

SEQ ID NO: 131227 - DNA, 1200 bp, synthetic construct
  misc_feature 1..1200: note = Description of Artificial Sequence: Synthetic coding sequence
  source 1..1200: mol_type = other DNA
atggcggggaatgcagaacccccccctgccggtgctgcctgtccacaggaccggcgctcgtgctccggacgggcgggaggtgatcgagtctgggaggacggggagcaccccgcaaaaaaactgaagtccggaggagatgaagagcgaagggaaaagccaccgaagcgaaagatcgtcctgttgatggcctactcggggaagggctatcacggcatgcaacgtaacgtcggttcttctcagttcaagacaattgaggacgatcttgtcagcgcattggtgcgctccgggtgtattcctgagaaccacggggaggatatgcggaagatgagctttcagcgatgcgccagaaccgataaaggggtgagcgctgctgggcaggtggtgagtctaaaggtgtggcttatcgatgacatacttgaaaagataaacagtcatctgcctagccacattcggatactgggtctaaagcgggtgactggcggtttcaacagtaaaaatcgatgcgatgcaagaacttactgctatctccttcctacattcgcttttgcacacaaagatcgggatgtgcaggatgagacttataggctgtctgcggagacactgcagcaagtgaatcggctactagcctgttataaaggaacccataatttccacaacttcactagtcagaagggtccacaggatcccagcgcttgtaggtacatcttagaaatgtactgtgaggagccttttgtgcgcgaagggctggagtttgccgtgattcgcgttaaggggcagtcattcatgatgcaccagattaggaaaatggtaggtctcgtagtggccattgtcaagggctacgccccagagtctgtgttggagcggtcatggggaaccgagaaggtagacgtccctaaggctcccggtctaggcctggtgctcgagcgggtgcacttcgagaaatacaaccagagattcgggaacgacgggctccacgaaccattagattgggctcaggaggagggaaaagtggccgcatttaaagaggagcacatctaccccacaattatcggtactgagcgagatgagcgctctatggcccagtggctgtctactttgcccatccacaatttcagcgctaccgccctgacagccgggggcaccggtgctaaagtacccagccctctcgaggggtctgaaggcgatggcgacaccgactag

SEQ ID NO: 131228 - DNA, 465 bp, synthetic construct
  misc_feature 1..465: note = Description of Artificial Sequence: Synthetic coding sequence
  source 1..465: mol_type = other DNA
atggccggtaatgctgagcccccacccgcaggcgccgcctgcccacaggacagaagatcatgtagtgggcgtgccgggggtgatcgggtctgggaagacggcgagcatcccgcaaagaaattaaagtcaggcggggatgaagaacgaagagagaaaccacccaagcgcaagattgtactgttaatggcctactccggaaagggatatcatggaatgcagagaaatgtcggaagttcccagtttaagactatcgaagacgacctggtcagtgcactggtccgcagcggctgtatccccgagaatcatggtgaagatatgaggaaaatgagctttcaaaggtgtgcaaggacagacaaaggcgttagtgcagcagggcaggtggtgtccctcaaggtctggctgattgatgacatcctggaaaagattaactcacatcttcctagccacatcaggatactaggatag

SEQ ID NO: 131229 - DNA, 618 bp, synthetic construct
  misc_feature 1..618: note = Description of Artificial Sequence: Synthetic coding sequence
  source 1..618: mol_type = other DNA
atgagcaaaggccgggccgaggccgcagccggcgctgccgggattctcctgagatatcttcaggagcagaaccggccttatagttcccaggatgtttttggcaacctgcagagagagcacggcctcgggaaagccgtcgtggtgaaaacgctggagcagctggctcaacaggggaaaatcaaggagaaaatgtatggcaagcaaaagatctacttcgctgaccaggatcagtttgatatggtttctgacgccgatctacaggtactggacggtaagatcgtggcacttacggctaaagtgcagtcactccagcaatcatgtcgatatatggaagctgagatgcaaaaggagattcaagaacttaaaaaggagtgcgccggttacagagagagacttaagaacattaaagccgcaacaaatcacgtcacccctgaagagaaggaacaggtgtatcgcgagcggcagaagtactgtaaggagtggcgtaagaggaaacgaatggcaaccgaattgagtgatgctatcctggaaggctaccctaaatcgaagaaacaattcttcgaagaagttgggatcgaaaccgatgaggactataatgtgaccctccccgatccctag

SEQ ID NO: 131230 - DNA, 654 bp, synthetic construct
  misc_feature 1..654: note = Description of Artificial Sequence: Synthetic coding sequence
  source 1..654: mol_type = other DNA
atgtctaaaggccgagccgaggcagccgctggagcggccggcatcctcctgaggtatttacaagagcagaatagaccctactctagccaagacgttttcgggaatttacagagggaacacggtcttggaaaggcagtggtggttaagaccctagaacagttggctcagcaaggaaagatcaaagagaaaatgtacggcaagcagaagatctattttgctgaccaggaccaattcgatatggtctctgatgctgacctgcaggtactggacggtaagattgtcgctctgacagcaaaggttcaatccctgcaacagagctgcagatacatggaggctgaacttaaggaactcagttctgctctgactacacccgaaatgcaaaaagaaatacaagaactaaagaaagagtgtgctgggtatagggaaagactgaagaatatcaaggctgctacgaaccacgtgacccctgaggagaaggagcaagtgtatcgagaacgccagaagtactgcaaagagtggaggaagcggaaacgtatggccaccgagctcagcgatgcgatcctcgaagggtaccccaaatccaaaaagcagttctttgaggaagtgggaattgagacagatgaggattacaacgttacactcccggacccctag

SEQ ID NO: 131231 - DNA, 465 bp, synthetic construct
  misc_feature 1..465: note = Description of Artificial Sequence: Synthetic coding sequence
  source 1..465: mol_type = other DNA
atgtatggcaagcaaaaaatctacttcgctgaccaggatcagtttgacatggtctctgacgcagatttgcaagtgttagacggaaaaatcgttgctttgaccgccaaggtgcagtctctgcagcaatcttgtcggtatatggaggccgaactgaaggaactttcttcagcacttacgactcccgaaatgcaaaaagaaatccaggaacttaaaaaggaatgtgcgggttaccgcgaacggctcaagaacattaaggccgccaccaaccatgtaacaccagaagaaaaagaacaggtctatagagagagacagaagtattgtaaagagtggcggaagcggaaacgaatggccaccgaattgtctgatgctattctcgaaggctaccccaagtccaaaaaacagtttttcgaagaggtgggaatcgaaaccgatgaggactacaacgtcactttacccgacccttag

SEQ ID NO: 131232 - DNA, 915 bp, synthetic construct
  misc_feature 1..915: note = Description of Artificial Sequence: Synthetic coding sequence
  source 1..915: mol_type = other DNA
atgttctccgtactgtcatacggtcggctcgtggcccgggctgtgctgggcgggctgtctcagaccgacccacgggctggaggcggggggggaggagactacgggttagtaaccgccggctgtgggttcggcaaggactttaggaagggcctgctgaagaagggagcctgttacggagatgatgcctgctttgttgcccggcaccgatctgcagatgtgctgggcgtcgcagatggcgttgggggatggcgagattatggcgtggatccaagccagttcagcggtacacttatgcgtacctgtgaaagacttgtcaaggaaggaagatttgtgccatctaacccaattggcatcctcaccacctcctactgtgagttgctgcaaaacaaagtgcctctacttggatcttctacagcttgtatcgtcgtgctggatcgcacttcacacaggcttcacactgcaaatctgggggattcaggattccttgtcgtccgtggcggcgaggttgttcacaggtctgacgaacagcagcactactttaacacaccgttccaactttccatagccccccccgaagccgaaggcgtagtgctcagcgatagccccgacgctgccgatagcacttccttcgacgtgcagctgggggacatcatcctgactgctactgatggcctctttgacaacatgcccgactatatgatattgcaagagctaaaaaaattaaaaaattccaattatgagagtatacagcagaccgcccggagtatagctgaacaggcacatgaactggcgtacgacccaaattacatgtcacctttcgcacagtttgcctgcgacaatggactgaatgtgcgtggagggaaacctgacgacattacggtgctgttgagcatcgtggccgaatacaccgattag

SEQ ID NO: 131233 - DNA, 1746 bp, synthetic construct
  misc_feature 1..1746: note = Description of Artificial Sequence: Synthetic coding sequence
  source 1..1746: mol_type = other DNA
atggcagttagacaagccctcggccgtggactgcaactgggacgcgcactgttactcagatttaccggcaagcccggaagggcctatggtttgggccgccccgggccggcagcaggctgcgtacggggagaacggccaggttgggctgctgggccaggcgccgagccacggcgtgtgggtctcggtcttcctaaccgccttaggttcttccgtcaatctgtcgcagggctggctgcccggttacaaaggcagtttgtggttcgtgcatgggggtgtgctggcccttgtggtcgtgctgttttcctcgcgttcggccttggcctgggcctgatagaggaaaagcaagccgagtccaggcgcgccgtctcagcatgtcaggaaatccaagcaatcttcacccagaagtctaagccgggccctgatccattggacacccgtcgcctgcagggattcagactggaggaataccttattgggcagagcattgggaaaggctgttccgctgccgtctacgaggccacaatgcctaccctccctcaaaacctggaggtgaccaagtccactggattgctcccaggtcgaggccctgggaccagcgcgccaggggagggccaagagagagccccaggggcacccgcctttcccctggctatcaagatgatgtggaacatttctgcaggtagcagtagcgaggccattctcaatacaatgtcccaagaactagtaccagccagcagggttgctctggcgggagaatacggcgccgtcacatataggaaatcgaagagagggcccaagcagcttgctccccatcccaatatcattagagtgctgagggccttcacctcatccgtacctctactgccaggagcccttgtcgattaccccgacgtcctgcctagcaggctacatcctgagggactcggtcacggtagaaccttatttctggtgatgaagaattatccgtgcaccctgaggcagtatctttgtgtgaacactccttctcccagactggccgctatgatgctcctccaactgttagagggcgtcgaccacctcgttcagcagggaatcgcccacagagatctcaagtctgacaatatattagtcgaactcgaccctgatggctgcccctggctggtgatagccgacttcgggtgttgtttggctgacgagtcaatcggcctgcagcttccattctcctcttggtacgttgatcgtggcggtaatgggtgtctcatggctcctgaggtgtccacagcccgccccgggccacgggccgtcatcgactacagcaaggctgatgcctgggcagtaggggcaattgcttacgagatctttgggctagtgaaccccttttatggtcagggaaaggcccatttggagagtagatcctaccaggaagcacagcttccagccctccccgaaagcgtgcctcccgacgtccgccagctggtgagggcgcttttacagagggaggccagtaaacgtccaagcgcccgagttgcagcaaacgtgctccacctgagtctgtggggcgagcacatcctcgctctcaaaaaccttaaactggacaaaatggtgggctggctgctccagcaatctgcagctaccctgctcgcaaatcggctgactgagaaatgctgcgtggagaccaaaatgaagatgctcttcctagctaatctcgaatgcgaaaccctgtgccaggctgccctgctcctatgctcgtggcgtgccgccttgtag

SEQ ID NO: 131234 - DNA, 393 bp, synthetic construct
  misc_feature 1..393: note = Description of Artificial Sequence: Synthetic coding sequence
  source 1..393: mol_type = other DNA
atggccgccgttcttggtgccctgggggctacacggcggctgctcgctgccctccgtggccagagtcttggcctcgccgccatgtccagcggaacacatcgcttgaccgctgaagaacggaaccaggccatcctcgaccttaaggcagccggatggtctgaactttccgagcgcgacgccatctacaaagagttcagtttccataatttcaaccaggctttcggattcatgagcagagttgctctccaagctgaaaaaatgaatcaccatccagagtggtttaatgtttacaacaaagtgcagattactcttacctcccatgactgtggggaactgaccaaaaaagatgtgaagctggccaaatttatcgagaaggccgccgcctccgtctag

SEQ ID NO: 131235 - DNA, 393 bp, synthetic construct
  misc_feature 1..393: note = Description of Artificial Sequence: Synthetic coding sequence
  source 1..393: mol_type = other DNA
atggcagctgtgctgggagctctgggtgcaactaggagactactagctgccctgagaggacaaagtctggggttagcggcaatgagctccggcacacacaggctgaccgcggaggagaggaaccaagccatcctagatctgaaggccgctggatggtctgagttatcagagcgcgatgccatctacaaagagttctccttccataacttcaatcaggcattcggctttatgagtcgagtggcccttcaagcagaaaagatgaaccatcaccccgagtggttcaatgtgtacaataaggtgcagattacactaaccagccacgactgcggagaattgactaagaaagacgttaagctggcgaagttcatcgaaaaggcagcagcctcagtgtag

SEQ ID NO: 131236 - DNA, 1041 bp, synthetic construct
  misc_feature 1..1041: note = Description of Artificial Sequence: Synthetic coding sequence
  source 1..1041: mol_type = other DNA
atggccctgctcaaagtgaaatttgatcaaaagaagcgagtcaaactggcccaggggctatggctgatgaactggttttccgtgctcgccggcattatcattttcagcctcgggttattcctgaaaatcgaactgcggaagaggtccgatgtgatgaataattcggaatcccacttcgtgcccaacagtctaattggaatgggagtgcttagctgtgtattcaacagcttagccggcaaaatttgttatgatgctttggacccagctaagtacgcgcgatggaaaccatggctcaagccatacttggctatctgcgtgctgttcaatataatcctcttcctggtcgccttgtgttgttttctactgcgtgggagtctggaaaataccctggggcagggcctgaagaatggtatgaagtactaccgcgacacagacacccccggccggtgtttcatgaaaaaaactatcgacatgctgcagatcgaatttaagtgctgcggaaacaatggcttcagagattggttcgaaatccaatggattagtaacaggtacctcgatttcagctcaaaggaagtgaaggatcgcatcaagtcaaacgtagatgggcgatatctcgttgacggggttcccttttcttgttgtaatccttcatcaccacgcccgtgtattcagtatcagatcacaaacaacagtgcgcactatagttacgaccaccaaacagaggagttaaatctctgggtcagagggtgtagagctgccctcctgtcttactatagcagtctcatgaattccatgggggtcgtcacactcctgatctggctgttcgaggtaaccatcacaattgggctcaggtatcttcagacttcactggatggcgtttccaatcccgaagaatcagagtcagagtcccaaggatggctgttggaacggtcagtgccagaaacgtggaaggctttcttggaatccgtcaagaagctgggcaaaggcaatcaagtggaggcagagggcgctgatgcgggccaggcccccgaagccgggtag

SEQ ID NO: 131237 - DNA, 1191 bp, synthetic construct
  misc_feature 1..1191: note = Description of Artificial Sequence: Synthetic coding sequence
  source 1..1191: mol_type = other DNA
atgccgttgttcgaaccacgggtgttcactgcagggagtgaggagagagtgacgtgtttgcccccaaaagggttacccgagccttcagtctggtgggagcacgcaggcgtcagacttccaactcacggcagggtgtaccagaagggccacgagctcgtcctggccaatatcgcagagtctgacgcaggcgtgtatacgtgccacgccgctaatctggctggccaaagacgccaggacgtcaatattaccgtggcaaccgtcccaagctggctgaaaaaacctcaggacagccaactcgaggaaggaaagccgggctacctggactgtctgacacaagccactccaaaaccgaccgtcgtgtggtaccggaatcaaatgctgatttccgaggacagcaggtttgaagtgttccttgcaaaagctcagggactggaagagggcgtggcagaaacactagtgctcgtaaagtcgctgcagagcaaagacgaacagcaacagctggattttaggcgcgagctagagatgtttgggaagctgaaccatgccaacgtcgtgaggctgttggggctgtgccgcgaagcagagccccactatatggtgctcgaatatgtcgatctgggggatctgaagcagttcttgcggatctcaaaatccaaggatgagaagttgaagtcccaacccctaagcactaaacaaaaagtagcactgtgtacccaggttgcactaggcatggaacaccttagcaataacagatttgtgcataaagatttagcagcacgcaattgcctggtctctgcccagcgccaggtcaaagtgtccgctcttggactgagcaaggacgtgtacaattcagagtattatcactttcggcaagcatgggtccctctccgctggatgtccccagaggctatcctagaaggagacttcagtacaaagtcagacgtctgggcattcggtgttctcatgtgggaggtatttacgcatggcgagatgcctcatggaggccaggctgatgacgaagttttagctgatcttcaggctggcaaggctaggctacctcagcctgagggctgtccctctaaactgtatcgtctcatgcagagatgctgggctctcagccctaaggacagaccaagcttttccgagattgcgtctgcactcggcgatagcacagtagattcaaaaccctag

SEQ ID NO: 131238 - DNA, 3093 bp, synthetic construct
  misc_feature 1..3093: note = Description of Artificial Sequence: Synthetic coding sequence
  source 1..3093: mol_type = other DNA
atgggtgctgcgaggggatccccagctcggccacgacgtctccctcttctgtccgtacttctgttacctctgttgggcgggacccaaacagcaattgttttcattaaacagccgagtagtcaggatgcgttgcaaggacgacgagcactgctccgctgtgaggtagaagctccggggccagtgcacgtgtactggctgctggacggtgcccctgtccaggacacggagcgaagatttgcccaggggagctcgctgtcttttgccgccgtggatcgcctgcaggattcaggcacttttcagtgcgtagcacgcgatgacgtcactggagaggaagccaggagcgccaacgcctcctttaatatcaagtggatcgaagctggccccgtggtgctgaagcaccctgccagcgaagccgaaattcaacctcaaactcaggtcaccttgcgctgccacattgacggacacccgagaccgacatatcaatggttccgggacggaacaccattgtcagatggacagagtaatcacaccgtgtcttctaaagaacgcaatctcactttgcgtcccgccggtcctgagcactccgggctgtactcctgctgtgctcatagcgccttcggccaggcctgttccagtcagaattttacactgtcaatcgcagacgaatccttcgcgagagtggtactggccccccaggatgtcgtcgtggcccgctatgaggaggccatgttccactgccagtttagtgcccagccccctccctcactccaatggctattcgaggacgagacacccatcaccaatcggtcaaggccacctcatctcaggagggctacagtcttcgctaatggatcccttcttctgacacaagtgcgaccgcgcaatgcaggaatatataggtgcatagggcagggacagcgtggtccccctattatcctggaggcaaccctccacctcgcggaaattgaagacatgcctctctttgaaccacgcgtattcacggcgggttctgaggagagagtgacatgcttgccacctaaaggattgccggaaccttccgtttggtgggaacatgccggagtacgtttgcccacgcacgggcgggtttatcaaaaaggccatgagttagtactagcaaatattgcagagtctgacgccggcgtgtatacatgccacgcagctaatctggcagggcagaggcggcaagacgttaatatcacagtcgccactgtaccgtcctggttgaagaaacctcaagactcccagttagaggagggaaagccaggatacctggattgtctgacccaagcaacccccaagcctactgtggtgtggtacaggaatcagatgttaataagcgaagattccagattcgaggtttttaagaatggaacgttaaggataaacagcgtggaggtttatgacgggacctggtacaggtgtatgtctagcacccccgcgggctctatcgaggcacaggcccgcgtgcaggtgctcgacggttctagcttacccgagtgggtgacggataacgcaggaacgttgcacttcgctcgggtgactcgggacgacgccggtaactacacatgtatcgccagcaacggcccccagggccagatccgtgctcacgtccagctgacagtggcagtcttcattacattcaaggtggagccagaacgcacaacagtatatcagggccacacggccctcttgcagtgcgaagcccaaggggaccccaaacccctcattcagtggaaaggcaaagacagaatcctggatcccacaaaactgggaccacggatgcacatcttccaaaatggcagtcttgtcatccacgatgttgctcctgaagatagcgggcgctatacttgcatcgctggtaactcttgtaatataaagcatactgaagctcccctgtatgtagtcgataaacctgtgcctgaagaatcagaaggccccggatcgccccccccttataaaatgatccaaacaatcggacttagcgtcggtgctgccgtcgcttacattatagccgtactgggactcatgttctattgcaagaagcgatgcaaggccaagcgcttgcaaaaacagcctgagggggaggagccggagatggaatgcctcaatgggggtcctttgcagaacggccagccatctgctgagatccaggaagaggtggccctcaccagtctgggcagtggacctgcggccaccaacaaacgccactctacttcagacaaaatgcacttcccgaggtcatctttgcaaccgattactactctgggcaaatctgagttcggcgaagtcttccttgctaaggcccaaggactggaagaaggagtggccgaaacactggtgctcgtcaaaagcctgcagagtaaagatgaacagcaacagctagatttccggagagaactcgagatgtttgggaaactgaatcatgctaatgtagtgcgactcctcggactctgccgcgaggccgagcctcactatatggtgctggaatacgtggacctcggtgacctgaagcaattcctcaggatttcaaaaagcaaggatgaaaaactcaagtcccagcctctgtcaaccaaacaaaaagtggcgctatgtacccaagtggccttaggaatggagcacctgagcaacaaccggttcgtgcataaagatctggctgcccgtaactgtctcgtaagcgcccaacggcaggtcaaagttagtgcactggggttaagtaaggatgtttacaacagcgagtattaccattttcgacaagcctgggtgccactgagatggatgtccccggaggccattctggaaggggacttctccactaagagtgacgtctgggctttcggcgtactcatgtgggaggtatttacacatggtgaaatgcctcatggtggccaggccgacgacgaggtcttggccgaccttcaggctggtaaggctaggttaccccagcctgaggggtgtccctcaaaactgtatcgcctgatgcaacgatgttgggccctttctcctaaagatagacctagcttctctgagatcgctagcgccctgggagactcaactgtggattcaaaaccttag

SEQ ID NO: 131239 - DNA, 2823 bp, synthetic construct
  misc_feature 1..2823: note = Description of Artificial Sequence: Synthetic coding sequence
  source 1..2823: mol_type = other DNA
atgggggctgccagaggcagtcccgcaaggcctagaagactgccgttgttaagtgtgctgctccttcccctcctgggcggaactcagaccgccattgtgttcatcaaacaacccagcagccaggacgccttgcaaggtcgccgggccctgctgcgctgtgaagtagaagccccaggccccgttcatgtgtattggctgttggatggagccccagtacaggatactgagcgccggtttgcccaggggagctccctcagtttcgcagccgtggatagactgcaggattcaggaacatttcaatgtgtcgcgcgggatgacgtgaccggagaggaagctcggagcgcgaacgctagcttcaacattaaatggatcgaggcggggcccgtcgtgttaaagcaccccgcttccgaagccgagatccaacctcagacgcaggtgaccctaaggtgccacatagacggacacccccggcccacttatcaatggttcagggacggcacacctctaagcgatggccaatcaaaccacaccgtttcatcaaaagagcgcaatctgacgctccggccagccggacccgaacacagcggactgtactcatgttgcgcccactctgctttcgggcaagcctgttcttctcagaatttcacgctgagcatcgccgatgagtcattcgctcgggtggttctggcccctcaagacgttgtagtcgcgcgctacgaagaagccatgtttcactgccaattttctgctcagcccccaccatcactccaatggctttttgaggacgagaccccaataaccaatcgatcaaggcctcctcatctcagaagagctactgtttttgctaatggcagtttactcctcacacaggtgcggcctagaaatgctggtatttatagatgcatcggtcaggggcaacggggtcctcctataatactagaggcaaccctccacctcgcggagatcgaggacatgcctctattcgagcctcgagtgtttacggctggtagcgaggaaagggttacttgtctgcctccgaagggcctgcctgagccaagcgtttggtgggaacacgcgggcgtgaggttgcccacccatggaagagtgtaccagaaaggccacgagctggtcctggccaatatcgcagagagtgatgccggagtgtacacgtgccacgctgctaacttggccggacagagaaggcaggacgtgaacatcactgtggcgaatggttcaagcctgcctgagtgggtgacggacaacgccggcacactgcatttcgcaagagtgaccagagatgacgccggaaactatacctgcattgcttccaacgggccccagggacagatacgcgcgcatgtgcagttgacggttgccgtgtttatcacattcaaggtcgagcccgagagaacaactgtataccagggacacacggcactgctgcagtgcgaagcacagggcgatcccaaacctctcatccagtggaaaggcaaggatagaatccttgaccctacgaaactggggcctcgtatgcacatattccagaatggctcgctggtgattcacgacgttgcccctgaggattccggcaggtatacctgcatagcaggtaactcctgcaatataaagcacactgaagcccctttgtacgttgtagacaagcccgtgccagaggagtccgagggccctggcagcccgcctccttacaaaatgattcagaccatcggcctgagcgttggggcggccgtcgcctacattatcgcagtgttaggtctcatgttttattgcaagaagaggtgtaaagctaagaggctgcaaaagcagccagagggagaggaacctgaaatggagtgccttaatggaggccccttacaaaatggccaaccctccgccgagattcaggaggaggtggctttgaccagtctgggttccggccccgccgcgacaaataagcgtcattccacttccgacaaaatgcatttccctcggagcagtttacagcctattaccacactcggaaagagcgaattcggcgaggtgtttctggcaaaagcccaggggctcgaagaaggggtagcagaaactcttgtgctggtgaagagtctgcagagtaaagacgaacaacagcagctggactttcgccgggagctggaaatgttcggcaaattaaatcacgctaatgtggtgaggttgctcggactctgcagagaggccgaaccacactatatggtccttgaatacgttgaccttggggatttgaaacagtttctgaggatttcgaaatcaaaagacgaaaagctgaaatcccagccactgtcaaccaagcagaaggtcgccctgtgtacgcaggtagctctgggtatggagcacctgagtaataaccgcttcgtgcacaaagacctcgctgcacgtaactgcttggtgtcagcacagcgccaggtcaaggtttctgctcttggtctgtctaaagatgtgtataactccgaatactaccattttcgccaggcttgggtgccacttaggtggatgtcgcccgaggctatattggaaggggacttttcgaccaaatctgacgtgtgggctttcggtgtgctgatgtgggaagtattcactcacggcgagatgccacacggaggacaggccgatgatgaagtactcgccgacttgcaggcaggcaaagctcgcttgccgcagccagagggctgcccaagcaaactgtacagactgatgcagcgatgctgggccctgagtcccaaagaccggccaagcttcagcgaaatcgccagcgcactgggtgacagcaccgtggactcaaaaccttag

SEQ ID NO: 131240 - DNA, 3045 bp, synthetic construct
  misc_feature 1..3045: note = Description of Artificial Sequence: Synthetic coding sequence
  source 1..3045: mol_type = other DNA
atgggagcagcacgcggcagcccggctcgaccaagacgcctgcctctcctaagcgtattactgctgcccttattgggaggcacacagactgccatagtgtttataaaacagccctcttcgcaagatgccctccaggggcgacgggccctgttgaggtgtgaggtggaagcccccggccctgtacacgtctactggctactcgacggtgcccctgtgcaggacacagagaggcggtttgcccaaggttcctccctcagctttgcagccgtggatagattgcaggactccggcacttttcaatgtgtcgcccgagatgacgtaacaggggaagaggcgagatctgccaatgcttcttttaacatcaagtggatcgaggctgggcctgtcgtccttaaacaccccgcttcagaggccgagatccaaccccagacacaggtgactttgcggtgccatatcgacggacacccaaggccaacctaccagtggttcagagatggcacacctctttccgacggacagagcaatcacacagtgtcatcaaaagagaggaacctcacccttcgtcctgccgggcctgagcattccggcctatacagctgttgcgctcacagcgcattcggacaggcctgctcttcgcagaattttaccctgtccatcgccgatgagagctttgccagagtggtgctggccccccaggatgtagtcgtagctagatacgaggaagccatgtttcactgtcagttcagtgcccagcctcccccttctctccagtggctcttcgaggacgaaacacctattacaaaccgtagccgccctcctcacctgcgcagggcaaccgtgttcgcaaatggatctcttttgttgacccaggtccgcccaagaaatgccggcatctatcggtgcataggccagggccagcgaggtcctccaatcatcctggaggcaaccttgcacttggcggagatagaagatatgcccctgtttgagccacgggtgtttactgctggaagcgaggaacgcgtgacatgtctgccgcctaaggggctgccagagccatcggtgtggtgggaacacgctggagtgaggctgcctacacacggccgcgtctatcagaagggtcatgagctggtgttggcgaatattgccgagtccgacgccggcgtgtatacatgtcacgcagctaacctggccggccaacgcaggcaggacgtaaacatcaccgtcgctaccgttccctcctggctcaagaagccacaggactcacagctagaagaaggaaaacctggctaccttgattgcttgacacaggcaacacccaagcctactgtcgtgtggtatagaaatcagatgcttatctccgaagactccagatttgaggtgttcaagaacggcacactccggataaactcagtggaggtgtacgatggcacctggtacaggtgcatgtcttcgacgccggccggttccatagaggctcaagcgagagtgcaggtgctcgaaaaacttaagttcactcccccgccacagccccagcaatgcatggaattcgacaaggaggccaccgtcccatgtagcgccaccgggcgcgaaaagccaactatcaagtgggagcgagcagatgggtcatctctcccagagtgggtgacagataatgccggcactttgcatttcgctcgcgtgacgagggatgacgccgggaattatacctgtattgcttcaaacggcccccaggggcagattagagcgcacgtgcagctgaccgtggcagtatttatcactttcaaagttgagcctgaacgtactactgtttaccagggacacaccgcacttttgcagtgtgaggcccagggagacccaaagcctttgattcaatggaaggacaagcccgtgcctgaggagagcgaggggcccgggtccccacccccatataaaatgattcagaccatcgggctatccgtgggggccgcggtggcatatatcattgctgtgctcggcctgatgttctactgcaaaaaacgctgtaaggccaaacgcttgcagaaacagcccgaaggggaggagcctgagatggagtgtttgaacggcggccccctacagaacggacagccaagtgctgagatccaagaggaagtggcattgacatcccttggctcgggcccagcagcaactaataagcgtcatagtacctcggacaaaatgcattttcccagatcttccctgcagccaatcacaacactaggcaagtctgagtttggggaggtatttctggccaaagctcagggccttgaggagggagttgccgagactttggtgctggtcaaatctttacagagcaaagatgaacagcaacagttagattttcgcagggagttagaaatgttcggcaaactcaaccacgctaacgtggtgagactcctcggtctgtgccgcgaagctgagcctcattatatggtgctggagtatgttgacctgggtgaccttaaacagttcctcaggataagtaaatcaaaggacgagaagctgaaaagccagcccctttccaccaaacagaaggtggccctgtgcacccaggtggctcttggaatggagcatctcagcaacaataggttcgtccacaaagacctagctgctcggaactgcctggtctcggctcagcgtcaagtgaaggtgtcggccctgggcctcagtaaggacgtttacaatagcgagtattatcactttcgccaggcatgggtgccactaaggtggatgtcccctgaagccatattagaaggggacttctctacaaaatcagatgtgtgggcattcggtgtgctgatgtgggaagttttcacacatggcgaaatgccacatggcggccaggcagatgacgaggtactcgctgatctacaggctggcaaggctcgactaccccagcctgagggttgtccatctaaactctaccggctaatgcagagatgttgggcattgtcaccaaaggataggcctagcttctcggaaattgccagcgccttgggtgattccacagtggattccaagccgtag

SEQ ID NO: 131241 - DNA, 1212 bp, synthetic construct
  misc_feature 1..1212: note = Description of Artificial Sequence: Synthetic coding sequence
  source 1..1212: mol_type = other DNA
atgggtagcttccttagcggggaaaaacgaccaagcgcccctacagtcggatccgcaatggaaaaaaaagaatttcccacgcctcctggtcgagttggaccagggacccagacagcgatcgtgttcatcaagcagccctcttctcaggatgctcttcaggggcgccgcgcacttcttagatgtgaagtggaggcacccggacctgtccacgtgtattggctcctcgatggcgcccctgtacaggacactgaacgacgctttgctcagggttcgtccttatccttcgctgctgtggatcggcttcaggatagtggcacattccagtgcgtcgcccgcgatgatgttactggcgaagaggccaggagcgctaatgcgtcttttaacattaagtggattgaagccggtccggttgtcttgaaacatcccgcaagcgaggccgaaatccagccccagactcaggtgacgctcagatgtcatattgacggccatccaagaccaacgtatcagtggttccgtgacgggaccccactctctgacggacaatctaatcataccgtgagctcaaaagagcgaaatctcaccttgagaccggccggccctgagcactccggtttgtattcctgctgcgcgcatagtgccttcggccaggcttgcagttcacaaaattttaccctgagtatcgcggacgaaagttttgcgcgtgtggttctggccccgcaggatgttgtcgtggccagatacgaagaagccatgttccattgccagttttccgcccagcctccgccatccctgcagtggttgtttgaagatgaaactcccattacaaatcgatctcggcccccccatctccgccgtgcaacagtctttgctaacggaagtctgctgctcacacaggtacgaccccgaaatgccggaatttaccggtgtattggtcagggacagcggggacctcctataatcctggaggcaactctgcatctcgctgaaatcgaggatatgcctctgtttgaacctcgagtctttaccgctggatctgaggagagggtgacttgtcttcctccaatggcagggagtactcgtcgcgcaacgagttggtgttggccgatcttgttgaaagtaatgttggtcagcactcccgctacaagacccacttggctggtatcaggggatcgaatgtcaacctcgctgtggccactgtgtccccccggctag

SEQ ID NO: 131242 - DNA, 810 bp, synthetic construct
  misc_feature 1..810: note = Description of Artificial Sequence: Synthetic coding sequence
  source 1..810: mol_type = other DNA
ttctcagctcagccccctcccagtttacagtggctttttgaagacgagacccccattacaaaccgaagccgccccccacatctgaggcgagccacagttttcgccaacggtagcctactgctgacccaggtccgccctcgtaacgcagggatctaccggtgcatcggtcagggacagaggggacctccgatcatactcgaggcaactctgcacctggctgagatcgaagacatgcccttgttcgagcccagggtcttcacggccggctcagaagaacgggttacctgcctgccaccaaagggtctgccggagcccagcgtctggtgggaacatgccggagtccgcctgcccacacatggccgtgtataccaaaagggacacgagctagtactcgcgaacattgctgagtcagatgcgggtgtctatacttgccatgccgcaaatctggctggccagcgccgccaagatgtaaacattacagtggcgtcagagcatctctgccccgagggccagggggaggtggaaggaaatacaggtttgggggttatggatcgtggatttcccgccgttcccagctggctcaagaaaccccaggattcgcagctggaagagggaaagcctggctacttggactgcttgactcaagccactcccaagcctactgtcgtttggtaccggaatcagatgctcataagcgaagacagtcgcttcgaggttttcaagaacggtacactgcggattaattcagtcgaagtatatgacggaacttggtatagatgtatgtcaagcacgcctgccgggagcatttag

SEQ ID NO: 131243 - DNA, 444 bp, synthetic construct
  misc_feature 1..444: note = Description of Artificial Sequence: Synthetic coding sequence
  source 1..444: mol_type = other DNA
atgggcgcgacaggcttgggcttcttgctatcttggcgccaggataatttgaacggcacagattgtcagggttgcaatatcctgtacttttctgagactaccggcagcatgtgtagtgagctgtccctgaaccggggtctcgaagctaggcgaaaaaaggacctgaaagacagttttctgtggcgctacggaaaagtgggctgtatctctctccccttgagggagatgacagcatggatcaacccgccacaaataagcgagatatttcagggatatcatcagagagtgcacggggccgatgcactgtccctgcagaccaatagcctccggtcacgtctaagttctcaatgcctcggccaaagttttctcctgaggacgcttgagaggggccgggggttccgagcactgggagatatctgtgggcacgtgcacgaggaggactag

SEQ ID NO: 131244 - DNA, 216 bp, synthetic construct
  misc_feature 1..216: note = Description of Artificial Sequence: Synthetic coding sequence
  source 1..216: mol_type = other DNA
atgggtgccacaggtttgggttttctgctgtcctggaggcaggacaatctcaacggcaccgactgtcaaggctgtaacattctctacttcagtgaaactactggatctatgtgcagcgaactttctctcaacagaggactcgaggcccggcgcaagaaggatttaaaagatagcttcctgtggagggatggagtcagcccatgtctaccgtgctag

SEQ ID NO: 131245 - DNA, 444 bp, synthetic construct
  misc_feature 1..444: note = Description of Artificial Sequence: Synthetic coding sequence
  source 1..444: mol_type = other DNA
atgggagcgacaggactcgggttcctgttgtcttggcgccaggacaaccttaatggcacagattgtcagggctgtaatattctatattttagcgaaaccactggcagcatgtgctctgaactgtcccttaacaggggtctagaggcacgacgcaaaaaggacttgaaggattctttcctgtggagatacgggaaagtcgggtgtattagtctccctttaagggaaatgacggcctggattaacccccctcagatcagcgagatcttccagggataccaccagcgcgttcacggcgcggatgccctctccctccagacaaactccctgaggagccggctttctagccagtgtctcggtcagtctttcttgctgagaaccctagaacgcggccgcgggtttcgcgcattaggtgatatttgcggccacgtccatgaggaggactag

SEQ ID NO: 131246 - DNA, 216 bp, synthetic construct
  misc_feature 1..216: note = Description of Artificial Sequence: Synthetic coding sequence
  source 1..216: mol_type = other DNA
atgggggccaccggcctcggattcttgttaagctggaggcaggataacctcaacggcacagactgccagggttgcaacattctgtacttctccgagacgaccggttctatgtgtagcgaacttagtcttaaccgtggcctggaggcaagacgaaagaaggatctgaaggactcgttcctctggagagatggtgtgtccccctgtctcccttgctag

SEQ ID NO: 131247 - DNA, 3561 bp, synthetic construct
  misc_feature 1..3561: note = Description of Artificial Sequence: Synthetic coding sequence
  source 1..3561: mol_type = other DNA
atgtccgtggcttgcgtgttgaagagaaaagccgtgttgtggcaggatagtttttcaccacacctgaaacaccaccctcaggagcccgctaaccccaacatgcctgtagtcctgactagcggcaccggctcacaggcacagccgcagcccgctgctaatcaggcactcgctgccggaacccattcatcgcctgtacccggaagtattggcgtggcaggccgatctcaggatgacgcaatggtggattacttcttccagagacaacacggcgaacagttaggaggtggcgggtccggcggtggaggctataacaacagcaagcaccggtggcctaccggcgacaacatccacgccgagcaccaggttaggagcatggatgagttaaaccacgactttcaagctctggctcttgaaggcagggcgatgggtgaacagctgctgccagggaaaaagttttgggagactgatgaaagctcaaaagacggccccaaaggtatcttcctcggagaccaatggagagactccgcctggggcaccagcgaccactcggtgagccagcccattatggtgcaacggagacctggccagagcttccatgtaaattccgaggtaaactccgtgctttcaccccgttccgagtcaggcgggctgggcgtttctatggtggagtacgtgttatccagcagtcctggagattcatgcttgcgcaaagggggattcgggcccagagacgccgattccgatgagaacgacaagggagaaaaaaagaataaggggacgtttgacggggataaactgggcgaccttaaggaagaaggggacgtgatggacaaaacaaacggactgccagtacagaacggcatagacgccgatgttaaagattttagccgcactcccggcaattgtcagaacagcgcaaacgaagtggatcttttgggacccaatcagaacggcagcgaggggctggctcagctgacatcaacaaacggagctaagccagtggaagatttcagtaacatggagtcacagagcgtgcctctagatcctatggagcatgtgggaatggaacccctgcagtttgactactctggaacacaagtcccggtcgattccgctgccgccactgtgggcctgtttgattacaattctcagcagcagctgttccagcgaccaaacgctctggcagtgcagcaactgacagctgcccagcagcaacagtacgcattagcagcagctcaccaaccccatatcggactcgctccagcagccttcgtgccaaacccatacatcatctcagcagcccccccgggcacggacccgtataccgcaggcctagccgccgctgctacattggggccagccgtggtaccacaccaatactacggcgtaaccccatggggtgtctatcctgcttcactgtttcaacagcaggcagctgcggctgccgctgctaccaactctgccaatcagcaaacaacaccacaggctcagcagggccaacagcaggtgctgaggggcggagcctcacagagacctttaacgcccaatcagaaccagcagggccaacagactgaccctctcgtcgcggctgccgccgtgaacagcgcactggcatttggtcagggtttagcagccggcatgcccggctatcccgtcctggcgcccgctgcttactacgatcagactggggcactggtcgtcaacgctggcgccagaaatggcctgggcgcccccgtgcgcctggtggcacccgcccctgtgattattagcagttcggccgctcaggccgctgtagccgcagctgccgcctcagcaaatggagctgcgggaggcttagcaggcacaacaaacggtccatttagacccctcggtacccagcagcctcagcctcagcctcaacagcagcccaacaacaatttggcgagctcatcgttttacggcaacaatagtctgaactccaacagccagagcagttcactgttcagtcaaggtagcgcccagccagcaaacaccagccttggatttggaagcagctcaagtctgggcgctactcttggtagcgcactggggggtttcggcactgcagtggccaacagcaacacaggcagcgggagccgccgcgacagcctgacaggatcgtcagacctatataagcgaacctcatcctctcttacccctattggtcacagtttctataacggcttgtctttcagctcaagtcctgggccagttggcatgcccctgccgtcccagggtcccgggcacagtcagacccctccacctagtctctcctcccacggttctagcagtagcctgaatttaggcggattaacaaacggcagcggtaggtacatttctgcggcccccggagcggaagctaagtatagatcggcttccagcgcatcttccttgttttctccaagttctaccctgtttagctcctccagattgcgatacgggatgagcgatgtcatgccatcaggccgctcacgcctgctagaggacttccggaacaaccgttaccctaacctacagctgcgagagatcgccggccatatcatggaattctctcaggatcagcatggctcccgctttattcagctgaagctcgagagggccacacctgccgaacggcaactggtgtttaatgagattttacaggccgcgtatcagttaatggtcgatgttttcgggaattatgtcattcagaaatttttcgagtttggctctctcgagcagaaacttgccctggcagaacgcatacgaggccacgttctgagcctggccctgcagatgtacggttgtagagttatccagaaagccctagagttcattccctcagaccagcagaatgaaatggtgcgcgaactggatgggcacgtcctcaaatgcgttaaagaccagaacggcaatcacgttgtacaaaaatgcatcgagtgtgtccagcctcagtccctacaattcatcatagatgcatttaaaggccaagtcttcgcgctgagcactcacccatacggctgccgggtgatccagaggattttggaacactgcctgccagatcaaactctgcctatcctggaagagctgcaccaacatacagaacagttagtacaagatcagtacggtaattatgtgatccagcatgttctcgagcatggtcgccccgaggataaaagcaaaattgtggctgagatacgggggaacgtgttggtcctgagccagcacaagtttgcaagtaatgttgtcgaaaagtgcgtcacacatgcctctagaactgagcgcgccgttttaattgacgaggtgtgcacaatgaacgacggcccacactctgctctgtacaccatgatgaaggaccaatacgcaaactacgtggttcagaaaatgatcgatgtcgccgagcctggacagcggaagatcgtgatgcacaagattaggccgcatattgccaccctgcgaaaatatacatatggcaaacatattctggccaaactggagaagtattacatgaaaaacggcgtggatctgggccctatctgcggacccccaaacggaataatctag

SEQ ID NO: 131248 - DNA, 2781 bp, synthetic construct
  misc_feature 1..2781: note = Description of Artificial Sequence: Synthetic coding sequence
  source 1..2781: mol_type = other DNA
atgtccgtagcatgtgtgctgaaacgtaaagccgtcttgtggcaggatagctttagcccacatctaaagcaccacccacaggagcccgccaatcccaacatgcctgtggtcttaacctccgggacaggtagtcaggcacagccccaacctgctgccaaccaggctctggctgcgggtacacattcttcgccggtcccagggtcaatcggcgtggccggacggagtcaggatgacgctatggttgactacttttttcagaggcagcacggagagcagctgggtggcggaggctctggtggtggggggtacaacaacagcaaacatcggtggcccacaacagttggtttattcgattacaatagtcagcagcagttgttccagcgccctaacgcattggcagtgcagcagttgaccgccgcccagcagcagcaatacgccttagccgctgctcaccagccccacattggcctggctcccgccgctttcgttcccaatccatacattatctcagctgccccgccgggcacagatccctatactgcgggtctggctgccgccgcaactttggggcccgccgtggtgccccaccagtattatggcgtaactccgtggggagtctacccggcttcactgttccaacagcaggccgccgccgccgcagccgccacaaatagtgctaatcagcagactacacctcaggctcagcagggccaacagcaagtactgagagggggcgcttcccagcgccccctgacccctaatcagaatcagcagggccagcagacagatcctttagtcgccgccgctgctgtgaactctgccttggctttcggccaggggttagccgccggcatgcctggataccccgtccttgcaccagcagcctactacgatcagacaggcgcccttgtcgtaaacgctggggcacggaatgggctgggcgcccctgtaaggctcgtagcaccagcacctgtgattatctctagcagcgccgcccaggcggccgtggcagccgcagccgcttccgctaatggggctgctggcggtctcgcaggcacaacaaacggaccctttcggccactgggaactcagcaaccgcagccccagcctcaacaacagcctaacaacaatctggcatctagctccttttacggcaacaatagcctgaattctaacagtcaatctagcagccttttctcacagggatctgcccagccggccaacacttccctcggttttggatccagctccagcctgggggccacactggggagcgcccttggaggcttcggcactgcagttgcaaacagcaacaccggctccgggtctcgcagagatagcttaaccggatcatcagacctatataagaggacatcatcatctttgaccccgatagggcactctttctacaacggtctatccttctcatccagtcccggccctgtgggtatgcccttgccctcccaggggccaggtcacagccagacaccgcctccatctttaagctcacatggctccagttctagtttgaacctcggcggattaactaatgggtcagggaggtatatttctgccgctcccggagctgaagccaaataccggagtgcttcaagtgcctcatccctgtttagtccatcatcgaccctctttagttcctcccgcctgagatacggtatgtcagatgtaatgccttctgggaggtcccgcctccttgaggacttcagaaataaccggtacccaaacctccagctgcgcgagatcgctggccacatcatggagttctctcaggatcagcatggcagcagatttatccagctgaaactggagagagccactcccgccgagcggcagctggtctttaatgaaattcttcaggccgcctaccagctaatggttgatgtgttcggcaactacgtgatccagaagttttttgagttcggaagcttagagcagaagctcgctctagccgaacggatccgtgggcacgtgctcagtttggcactacaaatgtatgggtgtcgggtaattcagaaggccctggaatttattcctagtgatcagcaggtgattaatgaaatggttcgagaactggacggacacgtcctgaagtgtgtcaaggaccagaatggcaaccatgtggtgcagaagtgtatcgaatgcgttcagcctcagtctctgcagtttataattgacgcgtttaaaggacaggtcttcgccctctctacccatccctatggatgtcgtgtgatccaacggatcctggaacattgcctcccagatcagacactgcccatactggaagaacttcatcaacacacagagcagctggtccaggatcagtatggcaactacgtcattcagcatgtcctggagcacggacgccctgaagataaatcaaaaattgttgccgagattcgagggaatgtgcttgtcctgtctcagcataaattcgcttccaacgtggtcgagaagtgcgtgacccacgccagcaggacagagagggcagttttgatcgatgaggtttgtactatgaacgacggcccacactccgccttgtacaccatgatgaaggatcagtacgcaaattatgtcgtacagaagatgatcgacgtcgctgagcccggccagcgcaagattgtgatgcataagatccggccacatatcgcgacacttagaaaatatacttacgggaaacacatattagccaagctcgagaagtactacatgaaaaacggcgtggacctgggccctatttgtggacccccaaatgggattatttag

SEQ ID NO: 131249 - DNA, 3135 bp, synthetic construct
  misc_feature 1..3135: note = Description of Artificial Sequence: Synthetic coding sequence
  source 1..3135: mol_type = other DNA
atgagcgtggcctgtgtgttgaagagaaaggccgtcctgtggcaggattcatttagcccacatctgaagcatcacccacaagaaccagctaaccctaacatgccagttgtgctgacaagcggcacgggtagccaagcccagcctcaacccgctgcaaatcaagctcttgcagccggcacccatagcagccccgtgcctgggtccattggagtcgcaggtcggagccaggatgatgcgatggtggactacttcttccagcgccagcatggtgagcagctcggcggaggcggcagtggaggtggcggttacaacaattcaaagcacagatggcccaccggggataacatccacgccgagcatcaggttcggtctatggatgagctgaaccatgattttcaggcactagctctcgaagggcgtgccatgggagagggaccacgcgacgccgactctgacgagaacgacaagggcgagaagaagaataagggcactttcgacggggacaagctgggtgatctcaaggaagaaggagacgtcatggataaaaccaatggcttaccagtgcagaatggcatcgatgccgatgtcaaagatttcagccgtacccccggcaactgtcaaaactccgctaacgaggtcgatctcttaggacctaaccagaacgggtcagagggactggcccaactgacttctaccaacggcgctaaaccggtggaggattttagcaacatggaaagccagagcgtgcccctcgaccctatggagcacgttgggatggagcccctccagttcgactacagcggcactcaggtacccgtggattccgccgcagccacggtcggcctgttcgactataattcccaacaacaactgttccagagacccaacgctcttgccgtgcaacaattaacagccgcccagcagcagcagtacgctctggctgccgcccaccagcctcacatcggtctagccccagcggctttcgtgcccaatccttatatcatttccgcggccccacctggcacggacccctacacagcaggcctagcagccgcggctactctgggccctgcagtggtccctcaccagtactacggtgtgacaccatggggcgtgtatcctgcgtcgttgtttcaacaacaggcagctgccgccgccgctgccacgaactcagctaatcagcaaacaactcctcaggcccagcagggtcaacagcaagttctacgcgggggggctagtcagcgaccactgactccgaatcaaaatcagcaaggccaacagacagatcccctcgtagcagcagctgccgtgaacagcgcgctagccttcggtcagggcctcgctgctggaatgccagctgtcgccgccgccgccgccagcgcgaacggtgccgccggtggcctggcaggtaccacaaatggaccattccgccctctgggcacgcaacaaccccaaccccagccccagcagcagcccaacaataacttggcctcttcttctttttatggtaacaattccctgaacagcaattcccagagttcttccttgttcagtcaagggtccgcccagcccgcaaacacaagcctcggcttcggctccagtagcagcctgggcgcaactctaggatcggcattggggggattcggcacggcggtcgcaaactcgaacaccggttctggaagccgacgtgactcgctgacgggtagctcggacctctacaagaggacaagttccagtctcacaccaattggccactcattctataacggactgagcttttccagttctccaggcccagttggaatgccactgcctagtcaaggtcccgggcatagtcagaccccgccgccttccctctcaagtcacggaagttcaagctccctgaacctggggggtctgactaacggttccgggcggtatatttcagccgcaccgggagcggaagctaagtatcggtccgccagtagcgcatcttccctgtttagcccttcaagtacacttttttcctcctctcgcctccgatacggcatgtctgatgtaatgccatccgggagaagcaggctgctcgaagacttccggaacaaccggtacccaaatttgcaactgagagaaatcgctggacatatcatggagttctctcaagaccagcacggctcgcgcttcatccagctgaaactggagagggcaactcctgcagaaaggcagttggttttcaatgaaatattacaagcagcgtatcagcttatggtggacgtgtttggcaattacgtgatccagaaattcttcgagtttgggtctctggaacagaaactcgcgcttgctgagagaatcagggggcatgtgctgtctttagcgctccaaatgtacgggtgccgagtcattcagaaggccctggaatttattccaagtgaccagcaggtgattaatgaaatggtgcgcgagctggacgggcacgtcttgaagtgcgtgaaggaccagaatggcaaccacgtggtccagaagtgcattgaatgtgtacagcctcaaagtctacagtttatcatcgatgctttcaagggccaggttttcgccctctcgacccacccctacgggtgccgggtcattcagcgcattctcgaacattgtttacctgatcagacattgcctattttggaggaattgcatcaacacaccgagcagctggtgcaggatcaatacgggaactatgtcatccagcacgtcctcgagcatggcagaccagaggacaaatctaagatagtcgcggagattcgggggaacgtgttggttcttagccaacataagttcgcctctaatgtagtggaaaagtgtgtgacacacgcttcacgcacagaaagagctgttctgattgacgaggtatgcacaatgaacgacggcccccactctgccctgtacacaatgatgaaagatcagtacgctaactacgtggttcagaagatgattgacgtggcagagcccgggcagcggaaaatcgtcatgcacaaaattaggcctcatatcgcaactctaagaaagtatacatacggcaaacacatccttgcaaaattagagaagtactacatgaagaacggtgtggacctggggccgatctgtggtcctccaaacggtatcatctag

SEQ ID NO: 131250 - DNA, 3567 bp, synthetic construct
  misc_feature 1..3567: note = Description of Artificial Sequence: Synthetic coding sequence
  source 1..3567: mol_type = other DNA
atgtccgtcgcctgcgtgctgaagagaaaggctgtactctggcaggattccttttccccacacctcaagcaccacccacaggaacctgctaatccaaatatgcctgtcgtgctgactagcgggacaggctcccaggcccagccacagcctgccgccaatcaagcgctcgccgccggcactcattcaagtccagtgcccggatccatcggcgtggccgggcgatcccaagacgatgcaatggtggattatttctttcagcgccaacacggcgagcaactgggaggcggagggagtggcggtggaggatataataattcaaagcacaggtggcccactggcgataatattcacgccgaacaccaagtgcggtccatggatgagttaaaccacgattttcaagcactggccctagaagggcgcgcgatgggcgagcaactgctcccaggtaagaagttttgggagaccgatgagtccagcaaggatggtcccaaagggatttttctgggcgatcagtggagagacagcgcatggggcacaagcgaccactcggtgtcgcagcccataatggttcagaggcgtcctgggcagagtttccacgtcaattccgaagtgaattccgtcctgagtcctcggtctgaaagtggggggctcggagtctcaatggtggaatatgtgctgtcctcttcccccggagactcttgtcttcggaaaggagggtttggacccagagacgccgactctgacgagaacgacaagggagaaaaaaaaaataaaggaactttcgacggcgacaagctgggcgacctgaaagaggagggggatgtcatggataagaccaatgggttgcccgtccagaacgggatcgacgccgatgttaaggacttttccagaacacccggaaactgccagaacagcgctaatgaggttgacttattagggcctaaccagaacggaagcgagggcttggcccagctaacctcaaccaatggagcaaaacctgtggaagacttcagtaacatggagtcacagtccgttcctcttgacccgatggagcatgtcggaatggaacccctgcaatttgactattccggcacacaggtgcctgtggatagtgcagccgccacagtgggcctttttgattacaacagccaacagcagctgttccagcggcccaacgcgctcgccgtgcagcagctcacagctgcccaacagcaacagtatgcacttgctgccgcccatcagccccatatcggtctggcaccagcagcctttgtaccgaacccttacataatctcagcagcacccccgggaactgacccctataccgcaggactcgctgcagcagccactctcgggcctgccgtggtgccacatcaatattatggcgttactccatggggggtgtatcccgcaagcctcttccagcagcaggcggcagctgcagcggctgcaacaaacagcgctaatcagcagactactccccaggcccagcaggggcagcagcaggtgctgcgcggcggtgcatctcagagaccgttgacgcctaatcaaaatcagcaaggacagcagacagatcctctagtcgccgcagccgccgttaatagcgccttggcctttggacagggcttggctgccggaatgccaggatacccggtgctcgcccctgcagcctactacgaccaaaccggcgcattggtcgtcaatgccggtgccaggaacggccttggagctcctgtgagactagtcgcaccagctccagtgattatttcaagctcagccgcacaggctgcagtggctgctgcggcagcctctgctaacggcgctgccgggggattggcaggcacgactaatggcccatttcgccccctgggcacacagcagcctcagcctcagccccagcagcaaccaaacaataacctcgcatcatcctccttctatggaaacaacagtctgaattcaaatagccagtcctcctcccttttctctcagggcagcgcccaaccagccaatacctctctgggttttgggagctcatcgagcctgggtgctaccctcgggagcgccctgggtggcttcggcactgctgtggccaacagcaacaccggctctgggagccggcgggactcactaactggctcttccgacctgtacaagagaacttcctcttctcttacacccatcggccacagcttctacaatgggctcagtttttccagtagtccaggaccggtcggtatgcccctgccaagccaaggtcctggccactcccagacccctcctccttcactgtcctcacacgggtcctcgtcctcgctaaacctcgggggccttaccaatggtagcggccgctatatctcagccgccccaggcgcggaggctaagtaccgaagcgcctctagcgccagctctctgtttagtcctagctccaccctgtttagcagtagcaggctccggtatgggatgtctgatgtcatgcccagcggacggagtaggctgctggaagacttccggaataaccggtacccgaaccttcagctgcgcgaaatcgcaggacatattatggagtttagccaggatcagcacgggtctcgtttcattcagctgaagctggagcgcgccacacccgcggaacgacagctcgtcttcaacgaaatcctgcaagctgcataccaactgatggtcgacgtgttcgggaactatgtaatccagaaattcttcgaattcggttcactggagcagaaactggccttagctgaacggattagaggtcacgttcttagcctggccctccagatgtacgggtgtagagtgatccagaaagctctagaatttattccgtcagaccagcaggtcattaatgaaatggttagggagttggatggtcatgtcttgaaatgtgtcaaggaccagaatggaaaccacgtggttcagaagtgcatcgagtgcgttcagccacaaagcctgcagttcattattgacgcctttaagggacaagtgtttgccctgagcacgcacccgtatggctgccgggttatccaaagaattttagaacattgtctgccagatcagacattacctattctggaggagctgcatcagcatactgagcagctcgtccaggatcagtatggcaattacgtcatccagcacgtgctggaacatgggcgcccagaggacaagagcaagatcgtcgctgaaatcagggggaatgtgcttgtgctcagccaacataagtttgcatcgaatgtcgtggagaaatgtgtgacacacgcctctcgtaccgaacgggccgttttgatcgacgaggtgtgtaccatgaatgacggcccccattctgccctgtacaccatgatgaaggatcagtacgcaaactatgttgtccagaagatgatagacgtggcagaacctggacaaagaaagatcgtaatgcacaagatccgcccacacatcgccacgttacggaagtatacatatgggaaacatatcctagccaaactggaaaagtattacatgaagaatggggtggatctggggcccatatgcggccctccaaacggcatcatatag

SEQ ID NO: 131251 - DNA, 3489 bp, synthetic construct
  misc_feature 1..3489: note = Description of Artificial Sequence: Synthetic coding sequence
  source 1..3489: mol_type = other DNA
atgtcagttgcatgtgtccttaagaggaaggctgtcctctggcaggattcattcagcccccatctcaagcaccacccccaggaacccgccaacccaaatatgccggtagttttgactagtgggacaggatcgcaggctcagccacagccggccgcgaaccaggccctggccgcaggaacgcactcctctccagttcccggcagtattggcgtagccggtcgctcccaggacgatgcaatggtcgactatttcttccagaggcaacacggtgaacaactgggcggcggcggtagcggcgggggaggatataacaattctaagcacagatggcccacaggcgacaacattcatgccgaacatcaggtcagatccatggacgagcttaaccacgacttccaagctctcgcactggaaggcagagccatgggagagcagctgctcccaggcaaaaagttttgggaaacagacgaaagctcgaaggatggtcctaaaggcatctttctgggtgaccagtggagggatagtgcgtggggcacatccgaccatagcgtttcacagcctatcatggtgcagcggcgcccaggacagagctttcacgtgaattcagaggtgaatagtgtcctgtctcctcgaagcgagagcgggggcctcggcgtgagcatggtcgagtacgtgctctcgtctagtcctggagatagctgtttacgaaagggtggttttgggccacgggatgccgactcagacgagaacgacaaaggcgaaaagaagaacaaaggaacctttgatggtgacaagttaggcgatttgaaggaggagggcgacgttatggataagacaaacggcctgcctgtacagaacggaatagatgcggacgtgaaggacttctcacgcacccccggcaactgccaaaacagcgcaaacgaggttgacctcctgggcccaaaccagaatggctctgagggactggcacagcttaccagcaccaacggagcaaagccagtggaggacttcagcaacatggaatcccaatccgtgcccttagatcccatggagcacgtaggtatggaacctttacagttcgactacagtgggacccaggtgccagtggactcagctgccgcaactgtagggctctttgactacaactctcaacaacagctgttccaaaggcccaatgccttagctgtacagcagttaacagccgcccagcaacagcaatacgccctggcagccgcccaccagcctcacattgcaggccttgctccggcagcatttgtacccaacccgtacatcatcagtgccgccccccctggcaccgacccgtacacagctggcctggctgcagctgctaccttggggccggccgtagtacctcatcagtactatggggtgacaccttggggggtgtacccggcctcgctgttccagcagcaagctgccgccgccgcggcagcaacgaatagcgccaatcagcagaccacccctcaggcacaacagggtcagcagcaagtgctgagaggaggagcctcccagcgacctctcacaccaaatcagaatcagcagggacaacagactgatcctctggtagccgctgctgctgttaactccgccttggcttttgggcagggcctcgccgcgggcatgcctgggtatccagtgctcgcccctgccgcctactacgaccagacgggcgccttggtggtgaacgccggcgcccgaaatggactgggcgctcctgttcgcctagtggcccccgcccctgtcatcatttcttcatcagccgcccaggctggcacccaacagcctcagcctcaaccccagcaacagccgaacaataatttagcctcttccagtttctatggtaacaatagcctcaacagcaacagccagtcctcgtccttgttctcgcaggggagtgcacagcctgctaacacttctctgggcttcggttccagttcttccttgggagcaacccttggaagcgctctgggcggattcggtactgccgtggccaatagtaataccggttccggcagccggagagactctctaaccggtagctcagacttgtacaagcggacctctagttctctgactccaatcgggcattcattttataacggactcagcttttctagctcccctggccctgttggtatgcccctccctagtcaggggcccgggcactcccagacacctcccccgtccctttcttcacatggctctagcagcagcctgaacctcggaggcctgactaacggcagcggtaggtacatctccgccgcacctggggcagaagctaaatataggagcgcgtccagcgccagctccctgttctcaccaagcagcacccttttttcctccagcaggttgaggtatggaatgagcgacgttatgccatccggaagaagcagactgcttgaggattttcgcaataaccggtatcccaacctccagctccgagaaattgcaggacatatcatggagttcagccaggatcagcatggctctagattcatacagctcaaactcgaacgcgctactcccgccgaaagacaactcgttttcaacgagatattgcaggccgcttatcagctgatggtggatgtgttcggcaactatgtaatccagaagttttttgaatttggatccctggagcagaaactggccctggccgaacggatcaggggacatgtcctttcgctggccctacagatgtatggatgcagggttattcagaaggccctcgaatttattccaagcgaccagcaggttattaacgaaatggttcgcgagctcgatggtcacgtcttaaagtgtgtgaaagaccagaacgggaatcatgtggttcagaaatgtattgaatgcgtgcagccccagagcctgcagttcattatcgatgcctttaaaggacaggtgtttgcactttcaacccacccgtatggctgcagggtcatccaacgtatccttgaacactgcctgcctgatcagactctccccatcctggaagaacttcaccagcatactgaacagctggtccaagatcaatacgggaactacgtgattcagcacgtgcttgagcacggcaggcccgaagataaatcgaagatcgtcgctgagatccgggggaatgtactggtcttgtcccaacacaagtttgcctctaatgtagtggaaaaatgtgtaacccacgcctctcgcacagagcgtgctgtgctgatcgatgaggtctgtacaatgaacgatggtccccacagcgcgctttatactatgatgaaagaccagtacgctaactacgtagtacagaaaatgattgatgtcgccgagcctgggcaacgaaaaattgtgatgcacaaaattcgcccacatatagctaccttgcgtaaatatacttacggaaaacacatccttgccaaactggaaaagtactatatgaaaaacggtgtggatctcggccccatctgcgggcctcccaacggaattatttag

SEQ ID NO: 131252 - DNA, 291 bp, synthetic construct
  misc_feature 1..291: note = Description of Artificial Sequence: Synthetic coding sequence
  source 1..291: mol_type = other DNA
atgtctgttgcttgtgtactgaagcggaaggccgtgctgtggcaggacagttttagtcctcatctgaagcatcatccccaggaaccggccaaccctaacatgccagtcgttctgactagcggaaccggcagccaggctcagccacaacccgccgcaaatcaggctcttgctgccggtacccattccagccccgtgccaggctccattggcgttgctgggcgcagtcaggacgatgctatggtggattacttcttccagcggcagcatggtgagcagctgggcgggggttag

SEQ ID NO: 131253 - DNA, 1551 bp, synthetic construct
  misc_feature 1..1551: note = Description of Artificial Sequence: Synthetic coding sequence
  source 1..1551: mol_type = other DNA
atgagtgtggcatgtgtgctgaagcgcaaagcggtgctctggcaggactcctttagcccccatcttaagcaccacccacaggagcccgctaaccctaacatgcccgttgtcctgacaagcggtacaggatcacaagcgcaacctcagcctgcggccaaccaggcccttgctgccggcacacattccagtccagtgcctggatccatcggggtggccggacgctcccaggacgacgctatggtggattatttctttcagcggcaacacggcgaacagctgggcggcggaggcagcgggggcggaggatataataattccaagcacagatggcctaccggggataacattcacgcagaacatcaggtgagatccatggacgaattaaatcatgactttcaagcccttgcgctggagggccgggcgatgggggaacaactcctgccaggtaagaagttttgggagaccgacgaatcctcaaaggacggcccgaaaggcattttcctcggagaccaatggcgggactctgcctggggcacctcggatcactctgtctctcagcccattatggttcaacggaggcccggccagtcattccacgtaaattctgaggtcaattcggtgttgagtccccggtctgagtctggcggtctgggtgtaagtatggtggagtatgtcctctcatcaagccccggagactcatgcctgaggaagggcggatttgggccccgggatgcagactccgacgaaaacgataaaggggaaaagaaaaacaaaggcaccttcgacggcgacaaattaggagatctgaaggaagagggcgacgtcatggacaagactaatggccttccagtccagaacggcatcgatgcagacgtgaaagatttcagtcgcacccctggcaactgccagaattccgcaaatgaagttgacctattagggcccaatcagaatggcagcgagggattagcccagctgacatcgacaaacggagcgaaacccgtggaggatttctccaacatggagtcccagagcgtgcctcttgatccaatggagcacgtgggcatggagcccttgcaattcgattactctggtacacaagtgcctgtcgatagcgctgcagccacggtcgggctctttgactacaattcccagcagcagctgttccagagaccgaatgctttggctgttcagcagctcaccgccgcacaacagcagcagtatgcactcgcggctgctcaccagccgcatatcgggttggccccggccgcttttgttccaaacccgtacattatctccgcagcaccgccaggcaccgacccttatacggccgggctggccgcggccgccacattgggtcctgcggtagtgcctcaccagtactacggagtgacaccctggggagtttatccagccagcctgttccagcagcaggctgccgccgccgcagccgcaacaaattctgccaatcagcaaacaacgcctcaggcccagcaggggcagcagcaaaccgaattctgcttctgttgtccagggtggagcgcgatggtgtag

SEQ ID NO: 131254 - DNA, 2964 bp, synthetic construct
  misc_feature 1..2964: note = Description of Artificial Sequence: Synthetic coding sequence
  source 1..2964: mol_type = other DNA
atgaaccatgatttccaggcactggccctggagtcaaggggtatgggagaactactgccaacaaaaaagttttgggaacccgacgactccacaaaagacgggcaaaaggggatcttcctgggagacgatgagtggagggaaacagcctggggtgcctcccaccacagtatgtcccagccaatcatggtgcagaggaggtccggccagggattccacgggaattccgaggtgaatgctatactttctccgcgaagcgagtcaggagggctgggcgtgagtatggttgagtatgtgctgtcctccagcccggccgacaaattggactcaagatttcggaaaggcaattttggaacccgagatgccgagactgatgggccagaaaagggggaccagaagggcaaggcttcgcctttcgaggaagaccaaaacagagatctcaagcagggcgatgatgatgactctaaaatcaatggccggggtctgcccaatgggatggacgcagattgtaaggattttaaccggacgcccgggtcccgccaggctagccctaccgaagtcgtggagcgactgggtcccaacaccaatccgtctgaaggattaggtccactgccgaatcccaccgcgaacaaacctctagtggaggagttctctaatccggaaacccagaacctggacgctatggagcaggtgggtttggagagtctgcagttcgactaccctgggaatcaggtgccaatggacagtagcggtgccaccgttggactcttcgattacaacagtcagcaacagctctttcagcggaccaacgctcttacagtgcagcaattaaccgccgcccagcagcagcagtatgccctggctgccgcacagcaacctcacattgctggtgtgtttagcgcaggcctggccccagccgcatttgttccaaacccctacatcatttccgctgcccctcctggcacagacccatacaccgccgccggcttagcagcagctgcaaccctcgctggtccagccgtcgttcctccacagtattacggagtgccatggggcgtgtatcctgcaaacttgttccaacagcaggcagccgccgctgccaataatactgcgtcccagcaggcagcctctcaagcccagccgggacaacaacaagtcctcagggctggggccggacagagacccttaacacctaaccaaggccaacaaggacagcaggccgaatctctggcagccgctgctgctgcgaaccctacattggcctttggccagggtcttgcaacaggaatgccaggatatcaggtgctagctcccacggcatactatgatcagaccggtgcattggtcgtgggtcccggggctcgcaccggcctcggggccccagtaagactgatggcacctacaccagtgctcataagttccgccgcagcacaagctgccgctgcagcggccgccggtggtaccgcaagctccctgaccgggtctacaaatggcctgtttagacccataggcactcaaccaccacagcaacagcagcaacaaccatctacgaacctgcagtccaatagtttttacggctccagttcccttactaactcttcccagtcttcctccctgttctcccatggcccggggcagccgggctccacaagcctgggatttggctccggcaactcattgggcgccgccattggctccgctctgtccgggttcggatcctcagggggcttaaccaacggctcagggcggtacattagcgccgcacctggcgcagaggccaagtacagatcggcatcttcaacaagttcattgtttagcagcagcagccagctcttccccccttctcgcctgagatacaaccgcagtgatattatgccctcgggcaggtcccggttactggaggattttcgcaacaatcggttccccaacctgcaactgcgggatcttatcggccatatcgtagagttcagtcaggatcagcatggctccaggtttatccaacagaaactagagcgggctacaccagcggagcggcagatggtcttcaacgaaattctgcaggcagcctaccaactgatgactgacgtcttcgggaattatgtgattcagaaattctttgaatttggctccctggaccagaagctggctctggctacccggatccgtggccatgtcctgcctttggcactgcagatgtacggttgtagggttattcaaaaggcacttgagtctatctcaagcgaccagcaagttattagcgagatggtaaaggagctggatggtcacgtcctcaaatgtgttaaggaccaaaatggtaaccacgtagtgcaaaagtgtatcgagtgtgtacagccacaatcactgcagttcatcatcgacgcattcaagggacaggtcttcgtcttgagcactcatccgtatggatgccgagtcatccagaggattctggagcactgtaccgctgaacaaacattgcccatcctcgaagagctgcaccagcataccgagcaacttgtgcaggaccagtatggcaattatgtcatacaacatgtgctggagcatggtcggcctgaggataagtccaagatagtttcagagattagggggaaagtgctggccctatctcaacataagtttgcctccaacgtggttgagaaatgtgtcacgcatgcatccagggccgaaagggctctgctcatcgatgaagtgtgctgtcagaatgacggccctcactcagctctgtacacaatgatgaaggatcaatacgctaattacgttgtccaaaagatgattgatatggctgagccagcccagcgcaagattatcatgcacaagattagaccccacataaccacactgcgcaaatacacatacgggaagcacatcctggccaagctggagaagtactatttgaagaacagtcccgacctggggcccattggcgggcctcccaacgggatgctctag

SEQ ID NO: 131255 - DNA, 3195 bp, synthetic construct
  misc_feature 1..3195: note = Description of Artificial Sequence: Synthetic coding sequence
  source 1..3195: mol_type = other DNA
atgaaccatgattttcaggcactggcactcgagtccagagggatgggggaactgctccctactaagaagttctgggagccagatgactcaacaaaggatggccagaaaggaatcttcctcggagatgatgagtggcgagaaacagcatggggggccagccaccactcaatgagtcagcccatcatggtgcaaagacggagcggccagggattccacgggaatagcgaggttaacgcaatcctaagcccacgctctgagtctggcggtctgggtgtgagcatggtcgagtacgtactgtcatctagtccagcagataagctggattctaggttccggaagggtaacttcggcacaagagatgctgagactgacggcccggagaagggagatcagaaaggaaaggcgtcccctttcgaagaggaccagaaccgggatcttaagcagggggatgatgacgactccaagataaacggccgaggattacctaacggcatggacgcggactgtaaggatttcaatagaacgcctggcagtagacaggcgagccctactgaggtcgtagaaagactgggtcctaataccaacccatcagaggggctaggtccccttcctaatcctacagcaaataaacctctcgtggaggaattttcaaatcctgagacacagaatctcgatgcaatggagcaagtgggcctcgaaagtctgcagtttgattaccctggaaatcaggtccccatggattcctcgggagcgaccgtggggctgttcgattataattctcagcagcagctcttccagagaacaaacgctctaaccgttcaacagctcaccgctgcacagcagcaacagtacgcactcgctgcagcccagcaaccccatattgccggggtgtttagcgcaggacttgcccccgccgcattcgttccaaatccatatatcattagcgccgcaccccccggcaccgacccctacaccgcagcagggctggctgcggccgctacccttgcaggccccgcagttgttccaccccaatattacggggtgccctggggcgtgtatcccgcgaacctcttccagcagcaggcagcagccgcagccaacaacacagcgagccagcaggcagcatcccaggcacaacctggacagcaacaggtgctgcgagcaggcgccgggcaacggccgctaaccccaaatcagggccaacagggacagcaggctgagtccctggctgccgccgccgccgctaaccctaccctggcattcggacagggtctcgccactggaatgccaggctatcaggtgctcgctccaaccgcatactacgaccagacaggcgccctagtggttggacccggtgcccgaaccggactcggagcgccagttaggttgatggctccaacacccgtgctgatctctagcgccgctgcgcaagctgctgcagccgcagctgcgggcggcactgcctcctcactcaccgggagtaccaacgggttattcagacccatcggtacccaaccacctcagcagcagcagcagcagccgagtacaaacttgcagtcaaacagcttttacggctcatctagccttactaacagctcccagagcagctccctgttttctcatgggcccggacagcctggttccacgtctctggggtttggctccggcaatagtctaggagctgctatcgggtcagctctgtctgggttcggctcttctgttgggtcctccgcttctagtagcgctacccgccgagagagcctctccacatccagcgatctgtacaagagatcctcatccagcttggcgccaatcgggcagccattttacaacagtttggggttttcgagctccccttcaccgattgggatgcctctgcccagccagacacctggacatagtctcacacctccccccagtctgagctcccacgggtcctctagcagcctacacctggggggtctcacgaacggctcaggccgatacatcagcgcagcaccaggcgctgaggcaaaataccggagtgcctctagtacttcatctttattttcctcttcctctcagctttttccaccatctcggctacgatataataggtcggatatcatgcctagcggcagatctaggctcctggaagactttcgcaataaccggtttcctaacttacagcttcgggacctgatcgggcacatcgttgagttctctcaggaccagcacggttctcgcttcatccagcaaaaactggagagagctacacccgcagagaggcagatggtgttcaacgagattttacaggctgcgtatcagcttatgacagacgtgttcggtaactatgtaatccagaaattttttgaattcggtagcctcgatcaaaagttggctttggcaaccagaattagaggccacgtgctcccacttgctttacaaatgtatggttgtcgggtgatccagaaagcccttgagagcatatcctccgatcagcaatcagaaatggtgaaagagctggacggacatgtcctgaaatgtgtaaaggatcaaaatgggaaccacgtcgtgcagaagtgcatcgaatgcgtgcaaccccaatccctgcagtttattattgatgcattcaagggacaagtgtttgtcctgagtacacacccgtacgggtgtcgggttatccagagaatcctggaacactgtacagccgagcagactcttcccattctcgaggaactccaccagcacaccgaacagttggtgcaggaccagtatggaaactacgtgatccaacacgtgttggagcatggtaggcccgaggataagtccaagatagtgtctgagatccgaggtaaagttttggcattgagccagcataagttcgcttcaaacgtggtggaaaagtgcgtgacgcacgcttcccgcgcggagcgtgcattgctgatcgacgaggtttgctgtcagaacgatggcccacattccgctttatatactatgatgaaggatcaatacgctaattacgtggtccagaaaatgattgacatggccgagcctgcgcaacgcaagattataatgcataaaatccgacctcatatcaccaccctaaggaaatacacctatggaaagcatatccttgccaagttggaaaaatattacctcaaaaattctccggacctagggccaataggggggcccccaaacggaatgctgtag

SEQ ID NO: 131256 - DNA, 3201 bp, synthetic construct
  misc_feature 1..3201: note = Description of Artificial Sequence: Synthetic coding sequence
  source 1..3201: mol_type = other DNA
atgaatcacgatttccaggcactggctttggaatctcgggggatgggcgaattactgcccacaaagaagttctgggagcctgatgattctaccaaggacggtcaaaaggggatattccttggcgacgacgaatggcgggaaactgcttggggcgccagtcaccactccatgagtcagccgatcatggtgcaacggcgtagtggtcagggctttcacggaaattctgaagtcaacgcgattttgtctccccgcagcgagtctggcgggctgggggtgagcatggtagagtacgtgctttcttccagtcccgctgataaacttgacagtaggttccgtaagggcaattttggcacaagagacgctgagaccgacggacccgagaagggtgaccagaagggcaaagcaagcccatttgaggaggaccagaaccgggacctgaagcagggagatgatgacgactctaagattaatggacgggggttgcctaacggaatggacgccgattgtaaggactttaaccgcactcctgggagccgccaggctagccctacggaagtcgttgaacgattgggtccgaatactaatcctagcgagggactaggcccgctgcccaatcctaccgccaacaagcccctagtcgaggaattctctaatccggaaacacagaatctggacgcaatggaacaagtcggactagagtccctgcagtttgactatccaggcaaccaggttcctatggactcttcaggggctactgtcggcctctttgactataacagtcaacagcagctgtttcagcgcaccaacgctctcaccgtgcagcagctgactgcagctcagcagcagcagtatgcactcgctgctgcacagcagccacacatcgccggggtattttccgcagggttggcgcctgcggcctttgtaccaaacccatatattatctctgccgcacctcccggcacagatccatataccgctgctggactcgccgcagccgcaaccttggctgggcctgccgttgtaccaccgcagtattacggagtgccatggggagtgtatcctgcaaatttgtttcaacagcaagctgctgcagcagctaacaatacagcttcccaacaggccgcctcacaggcacagcccgggcagcagcaggtcctgcgtgctggggctggtcagaggcccctaacgccaaatcagggacaacaggggcagcaggcagaatcactggctgcggcggcagcggcgaatccaactctggcgttcgggcaaggattagccaccggaatgcccggctatcaggttctggcaccaacagcctattacgaccaaacaggagctttggtggtggggcccggagcccgaaccggcctgggcgctccagtgcgacttatggcccctacacccgtgttaatcagcagcgcagcagcccaggctgccgccgctgcggcagccggtggcaccgcgtcttcccttaccgggagcacgaatggattgttccgtcctatcgggacccagccccctcagcagcaacaacagcagccgagtaccaatttacaatcaaactctttctacgggagctcatccttgactaactctagccagagctcttcactgtttagtcacggcccaggccaacctggctctacgagcctcggcttcgggtcgggcaatagtctgggagcagctattggcagcgcactgtccggatttggtagttccgtgggatcttctgcttcatcttctgccactcggcgagaaagcctgtccacctcgagtgacctgtacaaacgcagcagtagtagccttgcacctattgggcaaccattttacaactcattaggtttctcttcctccccaagcccaatcggaatgccactgcctagccagactcccggacattccctcacaccccccccctccctgagttcacacgggtcatcctccagtttacacttgggaggcctaactaacggaagcgggcgttacatttctgcggccccaggagctgaagcgaagtaccgatcagcatcctcaacaagctctctgttttcgagttcctcgcagcttttcccaccaagcaggctgagatataatcgaagcgatatcatgccttctgggaggtcgcggcttctggaagatttcaggaacaataggtttcctaatctgcagctgcgcgacctgattgggcacatcgtggagttttctcaggatcagcatggcagccggttcattcagcagaagctcgaaagagccacacccgccgagcgccagatggtttttaacgaaatcttgcaggccgcgtaccagcttatgacagacgtttttggaaactacgtcatccagaagttttttgaatttggctcattggatcagaaactggcactcgccacacggattcgcggccacgtcctcccactggccttacagatgtacggttgtcgtgttatccaaaaggccctggagtctattagttccgaccagcaggtgatctcagagatggtgaaagaactcgacgggcacgtcctaaagtgcgtgaaggaccaaaacggaaaccacgtggtacaaaaatgcattgaatgcgtgcagccacagtcactgcagttcatcatcgatgccttcaaaggtcaggttttcgtgctgtcgacccatccctatgggtgtagggtcattcagcgcatcctcgaacactgtactgcggaacagacgttaccaatccttgaagagcttcatcagcacactgagcagctcgtgcaagaccagtatggcaactacgttatacaacatgtcttggagcacggacgtccagaagataaatccaaaattgtcagtgagatcaggggcaaagtgctggctctaagccaacacaaattcgcatccaacgtcgttgaaaagtgcgtgacccacgcaagtagggcagagcgagccctacttattgacgaagtttgctgccagaacgatggacctcacagcgcgttatacacaatgatgaaagatcaatacgccaattacgtggtgcagaaaatgattgatatggccgaaccggcacagcgcaagatcattatgcataaaattcggccgcacatcactaccctgcgcaaatacacctatggtaagcatatattggcaaagctggaaaagtactatcttaagaatagccccgacctcggacccataggcggccctccaaatggtatgctgtag

SEQ ID NO: 131257 - DNA, 3195 bp, synthetic construct
  misc_feature 1..3195: note = Description of Artificial Sequence: Synthetic coding sequence
  source 1..3195: mol_type = other DNA
atgaaccatgacttccaggcgctcgcactggagagcagaggaatgggcgaactgctgccgacgaagaaattctgggagccagatgactccacaaaggatggacagaaagggatcttcctgggcgacgatgagtggcgggagacagcgtggggggccagtcatcatagcatgagccagccaattatggttcagagacgctccggacaggggttccatggcaatagcgaggtcaacgcgatactgtcccctcgctccgaaagcggcggcctgggggtgtccatggtggagtatgtcctcagcagctcgcccgccgataagctagattcccggttcaggaagggaaacttcggcaccagggatgccgagactgacggcccggagaagggtgaccagaagggaaaggcttcgcctttcgaggaagaccagaaccgggacctcaagcagggcgatgacgatgactctaaaattaatggaaggggcctgccaaatggaatggatgctgactgtaaggactttaatagaacacctggctccaggcaggcatcaccaacagaagtggtagaaaggctcggcccaaacaccaatccatccgaggggctgggtccgctgcccaatcctaccgctaataagccactggtggaggagttctccaaccccgagactcagaacctggatgcgatggagcaagtaggactcgaatcccttcagttcgattatcctggaaaccaggtgcccatggacagttctggcgccacggtggggctattcgactataattcccagcaacagctctttcagcggacgaacgcattaaccgtgcagcagctcacagctgcccagcagcagcagtatgctttggctgccgcccaacagcctcatattgccggggtattttccgcagggcttgcaccggccgcgttcgtgccaaatccctacatcatcagcgctgctccacccggaacggatccttataccgcagccggcctggcagctgctgccactcttgctggccccgcggtcgtgccaccccagtattacggggtaccatggggggtgtaccctgcaaacctgtttcagcagcaggctgctgcagcagccaacaatacagcttcccagcaggccgcctctcaggcccagccaggacagcaacaggtcctgagagctggagctgggcagagacccctaacaccgaatcagggacagcagggccagcaagctgagtctcttgcagctgcggcagcagccaaccccactcttgccttcgggcagggactagcaactggcatgcctggctatcaagtgttggccccaacagcttactatgaccagacaggagcgctagttgtggggcccggagcccggacgggcctcggagcgcctgtaagacttatggctccaacccccgtgctgattagctcggctgctgcccaggcagccgccgccgcagcagccggcgggacagcttcctctctaacaggaagcacgaacggcctattccgcccaataggaacacagccaccccagcagcagcagcagcaaccatcaactaacctgcagagtaacagcttttacggcagtagctcattgacgaactcctcccagtcttcctcacttttcagccatggcccagggcagcccggatcaacatctctgggcttcggctctggaaacagtctaggagctgccattggatcagctcttagcgggttcggatcatccgtgggttcttcagcatccagcagtgccacccgtcgagaaagcctttcaacgagcagcgatctgtacaaacgctctagtagcagcctggctcccatcggccagccattctacaatagcttgggtttcagcagcagcccctcccctattggcatgccactacccagccagacccctggccattccctgactcctcccccaagtctgagctcacacgggtcctcctcctccctgcatctcgggggtctgaccaacggcagtggtaggtatattagcgccgcgccaggagccgaggccaaatacagaagcgcatcttccacttcatctctcttctcctccagcagtcaactgttcccaccgtcacgtctgcggtataatagatctgatattatgccctcaggccgatcacgcctgctggaggacttcaggaacaatagatttcccaacctccagcttcgggacttaataggccacattgttgaattttcccaggatcaacacggctctcgattcatccagcagaagctggagcgtgccacaccagcagagcgccagatggtgttcaatgaaatactccaggctgcttatcaattgatgactgatgtgtttggaaattacgtcatccagaaattctttgagtttgggtctcttgaccaaaagctagctctggcaacgaggatccggggccacgtgttacccctggccctccaaatgtatggatgccgcgtcatccagaaagcactcgaatctatctcatctgatcagcagagcgaaatggttaaggaattagatggacacgtcttaaaatgcgtgaaggaccagaacggaaaccatgtcgtccaaaagtgcattgagtgcgtacagcctcaatcattgcaattcatcattgatgcgttcaaggggcaggtgtttgtcctttctacacacccttatggttgtagagtgattcaacgtattctggaacactgcactgccgaacaaacactgccaatcctggaggagctgcaccaacatacagagcagcttgtccaggaccagtatggtaactatgtcatccagcacgtgctggaacatggccggcctgaagataaaagcaagattgtgtccgaaataaggggtaaagtgcttgcgctaagtcagcacaaattcgcgagcaacgtggtcgagaaatgtgttacgcacgctagccgagcagagcgcgcattattaattgatgaagtatgttgtcagaatgacggcccacattctgccctatatacaatgatgaaggatcagtatgccaattatgtggtacaaaagatgattgacatggcggagccagcccaaaggaaaatcatcatgcacaaaattcgaccacatatcaccacactgaggaaatacacttacggtaaacacatcctggccaaactagaaaagtactacttaaagaatagcccagatttgggcccaatcggaggccccccaaatggaatgctgtag

SEQ ID NO: 131258 - DNA, 105 bp, synthetic construct
  misc_feature 1..105: note = Description of Artificial Sequence: Synthetic coding sequence
  source 1..105: mol_type = other DNA
atgaatcacgattttcaagctttagctcttgaatctcgcggcatgggggaattgcttccaactaaaaaattttgggagcccgacgactccacaaaggacgggtag

SEQ ID NO: 131259 - DNA, 882 bp, synthetic construct
  misc_feature 1..882: note = Description of Artificial Sequence: Synthetic coding sequence
  source 1..882: mol_type = other DNA
atgaaccatgacttccaggccctggctctggagtcacggggcatgggggaacttctccccacaaagaaattttgggaaccagatgacagtaccaaggacgggcaaaagggtatcttcctgggtgatgacgagtggcgtgagaccgcttggggggcctcccaccattctatgtcccagcctatcatggttcagcgacggtccggacaaggctttcacggcaatagtgaggtgaatgccattttatcgcccagatctgaaagcggagggctgggggtcagcatggtagagtacgtgttaagttccagtccagccgacaagctagacagccgtttcaggaagggcaactttggcacccgggatgccgaaacagacggccccgagaaaggggaccaaaagggaaaggcctcaccattcgaagaggaccaaaaccgcgatctcaagcagggcgatgatgatgatagcaaaatcaacggacggggcctgccaaatggcatggacgccgattgcaaagactttaatagaacccctggtagtcgccaggcaagtcctacagaggtagttgaaagacttggccccaatacaaatccatccgagggcctcggtcccttacccaaccccaccgccaacaaacccctcgttgaggaattctcaaatcccgagacgcagaaccttgacgctatggagcaggtcggactggagtcactacagtttgactatcctgggaaccaagttcctatggacagttccggggcaacggtcgggctgttcgattataacagccagcaacagctgttccagaggactaacgctctgacagtgcaacagctgaccgcagcacaacagcagcagtatgcactggccgcagctcagcagcctcattag

SEQ ID NO: 131260 - DNA, 3027 bp, synthetic construct
  misc_feature 1..3027: note = Description of Artificial Sequence: Synthetic coding sequence
  source 1..3027: mol_type = other DNA
atgtcccagcccattatggttcagcggaggagcggccaggggtttcatggcaactccgaagtgaatgcgattctgtctccccgaagtgagtcggggggactgggggtatcgatggtggaatatgttctgtccagcagcccggctgacaagttagatagccgtttcagaaaggggaattttggcactcgcgatgctgagacagatggtcctgaaaaaggcgatcagaaggggaaggcgtcaccctttgaagaagaccagaaccgcgaccttaagcagggcgatgacgatgactctaaaataaatggtcgcgggctgcccaatggaatggacgctgactgcaaagactttaatcgcactccagggagcagacaggcaagcccaactgaagtggtggagcgcctggggccaaatacaaacccgtctgaggggcttgggccactgcccaacccgacagccaataagccactcgttgaggaattctccaatcccgagacgcaaaatctggatgccatggaacaggtcggtctggagagcctgcagtttgattatcccggaaatcaggtacctatggactcctctggtgctacagttggcctctttgactataattcgcaacaacagctgttccagcgaaccaatgcactgaccgtgcagcagttgaccgcagctcagcaacaacagtacgctctggccgccgcacagcagcctcatatcgctggggtattttcagcaggcctcgctccggcagcattcgtccccaacccctatattatcagcgctgcccctccggggaccgacccctatactgccgccgggctcgccgcggctgctacgcttgctggacccgccgtcgtacctccccaatactacggcgtcccctggggcgtgtatcctgcgaacttgtttcaacagcaggcagccgctgcagccaacaacaccgcatcacagcaagctgcctctcaggctcagcccggccaacagcaggtgctgcgcgcaggcgctggtcaacgacccctgacccccaaccaggggcagcaggggcaacaggcggaatcactggccgcagccgctgctgctaatccaaccctggccttcggccaggggctcgcaaccggtatgcccggctatcaggtgttggctcccacagcctattatgatcaaacgggtgccctcgtggttgggccaggcgctagaaccggcctgggagcccctgtcaggctgatggcccctaccccggtgctcatctcttccgccgccgcccaggctgccgccgcagccgcagcagggggaaccgccagctccctgactggctccacaaacggactgttcaggcccataggaactcaaccaccgcaacagcagcagcaacagcccagcacaaaccttcagtcaaactctttttatgggtcttcttctcttacaaatagctcgcagtcaagttccctatttagtcacgggccaggtcaaccaggctccacttccctcggtttcgggagcggtaatagcttaggagcagccattggatctgcgctgtcagggtttggtagcagcgtcggcagcagcgccagttcttcggctactagaagggagtccttgagcacatctagtgatctctacaagagatcttcctccagtctagcaccaatcggacagcctttttataatagtctgggttttagttccagtccgagccctatcggcatgccactcccctctcagacacccggtcactctcttacaccacctccaagcctgagttcgcatgggtcctcttcctcactccacctcggggggctcaccaacggatccgggaggtacatttctgctgccccaggcgccgaagcgaaataccggtcagcaagttctacatcctccctgtttagcagctcttctcagttgttccctccgtcccgcctaaggtataacagaagcgatattatgccaagtggacgcagtcggctgttagaagattttcgaaacaatcgttttcctaatctccagctgcgcgacctcattggacatattgtggaattcagccaggatcagcatggtagccgctttatccagcaaaaacttgaaagagcaacccctgccgagcgtcagatggtctttaacgagattctccaagccgcgtatcagctcatgactgatgtctttggaaactatgtcatccagaagttttttgagtttgggtccctggaccaaaagctggccctggcaactcgcattagagggcatgttttaccactggcacttcagatgtacgggtgccgcgtgatccagaaggcactggaaagtatttccagcgatcagcagtcagaaatggttaaagaattagatggccacgtgctgaaatgtgtgaaggaccagaacggcaatcatgtggtgcagaaatgtatcgagtgcgtgcaaccacagtctctgcagtttatcatcgacgcattcaaaggccaggtgttcgtgcttagtacccatccatacggctgccgggtcattcagcgaattttggaacattgcacagccgagcagaccctgccaatcttagaggagcttcaccagcacaccgagcagctcgtccaagaccagtacggaaactacgtaatacaacacgttctggaacacgggcgaccagaggataagagcaaaatcgtctctgaaattaggggcaaagttctggcactgagccagcataagttcgcgtctaacgttgtggagaaatgcgttactcacgcctctagggctgagagagccctcctcattgatgaagtttgctgtcaaaacgatgggccacactctgccttgtatacgatgatgaaggatcagtacgccaattacgtcgtgcaaaagatgattgacatggctgagcctgctcaacgcaagatcattatgcacaaaatacgtcctcacattactaccctccggaagtacacctacggcaagcacatacttgctaagctggagaaatattatttaaaaaacagtccagacctaggacccattggggggcccccgaatggtatgctgtag

SEQ ID NO: 131261 - DNA, 870 bp, synthetic construct
  misc_feature 1..870: note = Description of Artificial Sequence: Synthetic coding sequence
  source 1..870: mol_type = other DNA
atggagaatggctacacctatgaagactataaaaatacggctgagtggctactcagccacacgaagcaccgcccacaagttgccattatctgtggatctggcctggggggtttaaccgacaaactaacccaggcgcagatttttgattacggggagattcccaactttcctcggtctaccgtcccagggcacgctggacgcctggtgtttggctttcttaacggaagggcttgcgtgatgatgcaggggagattccacatgtacgagggatacccactgtggaaggtgacatttccagtgcgcgtatttcacctgctgggtgttgacacgttggtagtgactaatgccgccggagggctgaatcccaagttcgaagtgggcgatatcatgctcattcgggatcacatcaatcttcccgggtttagcggccaaaatcccctccgcggccctaacgacgagcgattcggagataggttcccagctatgtcagatgcttacgatcgcacgatgagacagcgggcgctgagtacctggaaacagatgggagagcaaagagagctgcaggaaggcacttatgtaatggtagctggcccttccttcgagaccgtggcagaatgtcgtgttttgcagaagctgggggctgacgccgtggggatgtctacagtgccagaggtgatcgtcgcccgccactgtggcctgagggtatttgggttcagtttgattacaaacaaggtgatcatggattacgagagcctggagaaagctaatcacgaagaggtactggcggctggcaaacaggccgcccaaaaactcgagcaatttgtctctattttaatggctagcatccctcttccggacaaagcgtcttag

SEQ ID NO: 131262 - DNA, 282 bp, synthetic construct
  misc_feature 1..282: note = Description of Artificial Sequence: Synthetic coding sequence
  source 1..282: mol_type = other DNA
atggagaatggttatacttacgaagactataaaaatactgcggagtggctactctcacacaccaagcatcgcccacaagtggcaataatttgtgggagcggcttgggcggcttgacagataagcttacacaggcacagatatttgactacggagagattccaaactttccacgctccactgtcccgggtcatgcagggcgactcgtatttggctttctaaatggacgagcatgcgtgatgatgcaggggcgtttccatatgtacgagggctaccccttgtag

SEQ ID NO: 131263 - DNA, 375 bp, synthetic construct
  misc_feature 1..375: note = Description of Artificial Sequence: Synthetic coding sequence
  source 1..375: mol_type = other DNA
atgtcgtatattcccgggcaacctgtgactgccgtggtgcagcgggtcgagatacacaagctacgccagggcgaaaacttgattctcggctttagcattgggggggggatcgaccaggacccctctcagaatcctttcagtgaagataagactgacaaagggatctacgtcacgcgggtttctgaggggggcccagctgagattgctggactccaaatcggggataaaatcatgcaggtcaatgggtgggatatgacaatggtgactcacgaccaagctcgaaagaggttgacaaagcgctccgaggaagtggtgaggctcctggtgactagacagagcctgcagaaagccgttcagcagtcaatgttgtcctag

SEQ ID NO: 131264 - DNA, 1194 bp, synthetic construct
  misc_feature 1..1194: note = Description of Artificial Sequence: Synthetic coding sequence
  source 1..1194: mol_type = other DNA
atgaactgtatcagcgacttttttacctacgagactacaaaatccgttgtcgttaagagctggactatcgggatcattaaccgcgtggtgcagttgttaatcatttcctattttgtggggtgggtgttcctgcacgagaaagcataccaggtgcgagataccgctattgagtcatccgtcgtgacaaaagtgaagggttctggtctgtacgccaatcgcgtcatggacgtgtcggattacgtgacaccccctcagggaacatctgtgttcgtgattatcactaaaatgattgtgactgaaaaccagatgcaagggttctgtcccgagtcagaagagaagtatagatgcgtgtccgacagccagtgtggtccagaacgtctgccaggagggggtatcctcaccggcagatgcgtgaactacagctctgtgctgagaacatgcgaaatccagggatggtgccccaccgaggtagatacagtcgagacccctattatgatggaagccgagaactttacgattttcatcaaaaactcaatcagattccctctgttcaatttcgaaaaagggaacctcctcccaaatctcaccgcccgcgacatgaagacgtgccgcttccaccccgataaagatccattttgtcctattttgcgcgtgggagacgttgtgaagttcgccggtcaggattttgcaaaactcgctcgaacagggggggtgctggggattaaaatcggctgggtatgcgacttggataaggcctgggaccagtgtatcccaaagtacagcttcacgcgcctagactcagtatctgaaaagtcatcagtgtctcctgggtataacttcaggttcgcaaaatattataaaatggagaacgggagcgaatacaggactctactgaaggccttcggaattcgtttcgatgttctagtgtacggcaacgccggtaagttcaacattatccctactatcatcagctcagttgccgcctttacttccgtcggggttggtaccgtcttatgtgacattatcctgctgaattttctgaagggagctgatcaatataaagcaaaaaagtttgaagaggtcaacgagacgaccttgaaaatcgccgcactcacgaaccctgtatatccatcagaccagaccaccgccgagaaacagtcaactgattcgggcgccttctctatcggccactag

SEQ ID NO: 131265 - DNA, 1191 bp, synthetic construct
  misc_feature 1..1191: note = Description of Artificial Sequence: Synthetic coding sequence
  source 1..1191: mol_type = other DNA
atgaattgcatttccgatttttttacatacgaaaccacgaagtccgtggtggtcaagagctggacgatcggcatcatcaatagggtagtccagttgctgattatttcttatttcgtaggatgggtttttctccatgagaaggcatatcaggtccgcgacacggctattgagtcgagcgttgtcactaaggtcaagggctccgggctctacgccaaccgtgttatggacgtatctgactatgtgaccccaccacaggggacatctgtgtttgtcatcattaccaaaatgatcgtaaccgaaaatcagatgcaaggcttctgtccagaatccgaggagaaatacagatgcgtatccgattcccagtgcggtcccgaaaggctaccgggcggcggtatcctcacaggcaggtgcgttaactacagtagtgtccttcgaacgtgcgaaatccagggctggtgtccaacagaagtagacactgtggaaacccccatcatgatggaggcagagaattttacaatattcatcaaaaacagcatcagattcccgcttttcaattttgaaaagggtaacctactacctaatctgactgcccgggacatgaaaacctgtagattccacccggacaaggatcctttctgtccaatactgcgggtgggggacgtcgtcaaatttgctgggcaggattttgctaagttagctaggactggcggtgttttgggcataaagatagggtgggtgtgtgacctggacaaggcatgggaccagtgcataccaaagtactccttcactaggctggatagcgtgtcagaaaaaagttccgtgtccccaggctacaatttcaggtttgcaaagtattacaaaatggagaacggatcagaataccgcactctgctgaaagcctttggaatccgcttcgacgtgctatatacgggcgcagggaagttcaatatcataccaaccataatttcgtccgttgccgcattcactagcgttggcgtgggcaccgttctctgcgacatcattcttttaaacttcctgaagggggcagatcagtacaaggccaaaaaatttgaagaggtgaatgaaacaaccttgaagattgccgcacttactaaccctgtgtacccttccgaccagaccaccgcggagaagcagtcgactgactccggcgctttctctatcggacattag

SEQ ID NO: 131266 - DNA, 1167 bp, synthetic construct
  misc_feature 1..1167: note = Description of Artificial Sequence: Synthetic coding sequence
  source 1..1167: mol_type = other DNA
atggccggctgctgcgcagccctggctgcttttttgtttgagtacgacacaccccgtatagtgttaatcagatccagaaaagtgggcctgatgaacagggcagtgcagctactcatcttagcctacgtcataggttgggtatttgtctgggagaaaggatatcaggagacagacagtgttgtttcatccgttaccactaaagtgaagggtgtagctgtcactaacacctccaaactgggcttcaggatatgggacgtggcagattatgtgatccccgctcaggaggaaaatagcctatttgtgatgactaacgttatccttactatgaatcaaacacaaggactttgtccagagattcccgacgctactaccgtatgcaaatctgatgcctcttgtacggccgggtccgcgggtactcatagtaatggcgtgtctactggaagatgtgtggctttcaacggatccgtgaaaacatgcgaagtggccgcctggtgcccagtggaagatgatacacatgtgccgcagcctgcttttctcaaggccgcagaaaactttactctcctggttaaaaacaacatttggtatcccaagtttaacttttcaaaacgcaacatcctgcccaacatcaccacgacgtatctcaagagctgcatctatgacgccaagacagaccccttctgtccaatcttccgccttggcaaaattgtggagaacgccgggcacagtttccaggatatggctgttgaggggggaatcatgggaattcaggtcaactgggactgtaacctcgaccgtgcagcatcactctgcctgccgaggtactcctttagacggctcgatacccgcgatgtcgaacacaacgtctcgccaggatacaacttccgctttgcgaaatactatagggacctcgcaggcaatgaacagcgcacactgatcaaagcatacgggataaggtttgatatcatagtgtttggtaaagcagggaagttcgacattatccccaccatgatcaacatagggtccgggctggctctgctgggcatggctacagttctctgcgacataatcgtgctttactgcatgaagaagaggctgtattatagagaaaagaagtacaagtacgtggaggattatgagcagggcttggcatcagaactggatcagtag

SEQ ID NO: 131267 - DNA, 1215 bp, synthetic construct
  misc_feature 1..1215: note = Description of Artificial Sequence: Synthetic coding sequence
  source 1..1215: mol_type = other DNA
atggctgggtgctgcgctgctttggccgcctttcttttcgagtacgacacaccgaggatcgtcttgatccgatcccggaaggtaggcttgatgaatagagcagttcagctgctaattctcgcctacgtgatcggctgctaccatcctcatttagcagaggttgagatggaaagccctaggcgctgggtgttcgtatgggaaaaaggctatcaagagaccgacagtgtggtgtcttctgtgacaacgaaggtgaaaggagtggctgttactaatacgtccaaactcggattccgtatttgggacgtggcggattacgtgattcccgcccaggaggagaactctctcttcgtgatgactaatgtcatcttaacgatgaaccagacgcagggcctgtgtccagaaattcctgacgctaccacagtttgtaaatctgatgcctcttgtaccgctggatctgcgggaactcactccaacggggtttctactgggcggtgcgtcgctttcaatggaagcgtgaagacctgtgaagtcgctgcatggtgccccgtcgaagacgacactcacgtcccacagcctgccttcctcaaggcggccgagaacttcaccctcctggtgaagaacaacatttggtatcccaagttcaacttcagcaagcggaatatactgccaaatatcaccaccacttatctcaaatcttgcatctatgacgccaagacagatcctttttgccccatattccgtctgggaaaaatcgtggagaacgctggccactcttttcaggacatggccgtagagggcggcatcatgggtattcaagtcaactgggattgtaacctcgacagagccgctagcctttgcctccccaggtactcctttcgccggctggacactcgagatgttgagcacaatgtaagccccggctacaattttcggttcgccaagtactatcgcgacttagcaggaaacgagcagcgaactcttatcaaagcctacgggatccggtttgacatcattgtatttggtaaggccggaaagtttgatattatccccactatgatcaacattgggagcgggctcgccctactgggcatggccactgtattatgtgacatcattgtgctgtattgtatgaagaagcgcctttattacagggagaaaaaatacaagtatgttgaggattatgaacaaggactcgcctccgagctggaccagtag

SEQ ID NO: 131268 - DNA, 441 bp, synthetic construct
  misc_feature 1..441: note = Description of Artificial Sequence: Synthetic coding sequence
  source 1..441: mol_type = other DNA
atggcagggtgctgcgccgcacttgcagcatttttgttcgaatacgatactccccgaatcgtcctcattagatctcggaaggttgggctgatgaatagggccgtccagctgttgatcctggcctacgtgataggctgggtgtttgtgtgggaaaagggttatcaggagactgatagtgtggtcagttctgtaaccaccaaagtcaagggagtcgcagtcaccaatacatctaaattgggatttcggatctgggacgtggcagattatgtgattcctgcccaggaggagaactcacttttcgtgatgaccaacgtgatactaactatgaaccaaacacaaggcttatgccctgaaattccagatgccacaacggtgtgtaagtcagacgcgagctgcaccgccggctccgccggcacccactctaatgacctgctcttttag

SEQ ID NO: 131269 - DNA, 1086 bp, synthetic construct
  misc_feature 1..1086: note = Description of Artificial Sequence: Synthetic coding sequence
  source 1..1086: mol_type = other DNA
atggccggatgttgtgctgctctggccgcttttctgtttgaatatgacacaccgcgaatcgtgctgatacggagccggaaagtcggtctaatgaatcgcgccgtccagctcttaatcctggcctatgtgattggctgggtgtttgtatgggaaaaggggtatcaggagaccgattcagtcgtcagtagtgtgactactaaggtgaaaggagtggccgtcaccaacacctctaaactggggttcaggatctgggacgtggccgactacgtaatccccgcccaggaggagaatagtctcttcgtgatgactaacgtgatcctgacaatgaatcagactcaagggttatgtcccgagattcctgacgcaacgactgtatgcaagtccgacgcctcttgcaccgctggttcagccggcacacattccaacggggtgtctactggtcggccagccttccttaaggccgctgagaacttcaccctgctagttaaaaacaacatttggtaccccaagttcaacttctctaaaagaaatatactcccgaatatcacaactacttacttgaaaagctgtatttatgatgccaagacagaccccttctgccctattttccgccttggtaagattgttgaaaatgctgggcactcgttccaggatatggccgtggagggagggattatgggaatccaggttaattgggactgcaatctagacagggctgccagcctgtgtcttcctaggtattccttcaggcgcctggatacgcgagatgtagaacacaatgtctcccctgggtataacttccgcttcgcaaagtactatcgagatttggcagggaatgaacaaagaaccctgatcaaggcgtacgggatcagatttgacatcatcgtgtttgggaaggccggaaaattcgacatcatcccaactatgattaatattggatctggccttgctttactaggcatggcaacagtgctttgtgacattatcgttctgtattgtatgaaaaaacgactctactatagggagaagaagtataaatacgttgaagattatgaacaggggctggcgagtgaactcgatcagtag

SEQ ID NO: 131270 - DNA, 864 bp, synthetic construct
  misc_feature 1..864: note = Description of Artificial Sequence: Synthetic coding sequence
  source 1..864: mol_type = other DNA
atgaccaatgtaatcttaactatgaaccaaacacagggcttgtgcccggaaatacctgacgcaaccactgtgtgtaaatcagacgcatcgtgtacggctggcagcgccgggactcattctaatggagtttctacagggagatgtgtggccttcaatgggagtgttaagacgtgtgaagtagccgcatggtgtcccgtcgaggatgatacgcatgttccccagcccgcctttctgaaggcagctgagaactttacactgctggtaaaaaataacatatggtaccccaaatttaattttagcaagaggaatatcttgccaaacattaccacaacctatctgaagtcttgtatatacgatgcaaagactgaccccttttgtccgatcttccgattgggcaagatcgttgagaacgctggccattcctttcaggatatggcagtggaaggcggcattatggggatccaagtgaactgggactgcaatctggatcgcgcagccagcttgtgcctgcccagatatagttttcgtcgcctggacactcgcgacgtggaacacaatgtgagtccaggctataacttccgtttcgctaagtactacagagacttagctggcaacgaacagcgaacgctgattaaggcttatgggatccgatttgatattatcgtcttcggtaaagcaggcaagtttgatattatccccaccatgattaatattgggtccggattagccttactgggcatggccaccgtgctgtgcgatatcatcgtcctatactgcatgaagaaacggctctactatagagagaagaagtataaatatgtggaggactatgagcagggcctggccagcgaactcgatcaatag

SEQ ID NO: 131271 - DNA, 1278 bp, synthetic construct
  misc_feature 1..1278: note = Description of Artificial Sequence: Synthetic coding sequence
  source 1..1278: mol_type = other DNA
atggatggccccgccgagcagcgcccggcactgctcaattccgccgaaaactttaccgtcctcataaagaataatattgattttccaggacataattatactactagaaatatcctccctgggctgaacattacgtgcacctttcacaagacacagaatcctcagtgtccaattttccggttgggggacatcttccgtgagaccggggacaatttctcagatgtagctattcagggtggcatcatgggaattgagatctactgggactgcaatctagaccgctggtttcatcattgtcgcccgaaatatagttttagaaggctcgatgataaaactacgaacgtaagcctctaccccggttataattttagatacgccaaatattataaggagaataatgtagagaaaaggacattgatcaaggtgtttggtatcagatttgatattctcgttttcggcactggtgggaagttcgatattatacagctggtggtttacataggcagcactctgtcatacttcggtttagccgctgtgttcatcgactttttgattgacacgtattccagcaactgctgcaggagccacatctacccttggtgcaagtgttgtcagccttgcgtcgtcaacgagtattactacaggaaaaagtgcgagagtatcgtagagcctaaaccaacactgaagtacgtgagttttgtggatgaaagtcatattcggatggtcaatcagcagctgttagggagaagcttgcaggatgtgaaaggacaggaagtgccacgcccagccatggactttactgacctgtctcgtctccctcttgcccttcacgacacccctccgatcccaggtcagcccgaagaaatccagctgctaagaaaagaagccaccccaagaagtagagattcaccagtttggtgtcaatgcggcagctgccttccatctcagctcccagagtcacacagatgcttagaagaattgtgttgtcgcaagaaacccggagcttgtatcacgacctccgagttgtttcggaaattagtcctgagcaggcacgtgcttcagtttctgctgttgtaccaggaaccactcctggcattggacgtcgactccaccaacagtcgcctgcgtcactgtgcataccggtgttatgccacctggaggtttgggtcccaggatatggcagattttgcgaatctgcctagctgctgccggtggcgtattcgcaaggaatttccgaagtctgagggccagtattcagggtttaaatccccctactag

SEQ ID NO: 131272 - DNA, 828 bp, synthetic construct
  misc_feature 1..828: note = Description of Artificial Sequence: Synthetic coding sequence
  source 1..828: mol_type = other DNA
atgcctgcttgctgcagctgtagcgacgtctttcagtatgaaacaaataaagtgactaggatccagagcatgaactatggcactatcaaatggttttttcatgtcattattttcagctacgtgtgctttgccttggtgtctgacaagctctaccagcgtaaagaaccagttatcagctctgtgcacacaaaggttaaaggaattgccgaggtaaaagaagaaatcgtcgagaatggagtgaagaagttggtccactccgtatttgataccgcagactacactttcccactgcaagggaattcattctttgtgatgaccaattttctgaagactgagggccaggagcagcgcctctgccccgagtaccctacacgccgcaccctgtgtagctccgatcgaggctgcaagaagggttggatggacccccaatctaagggtattcagacgggtagatgcgtagtgtatgaaggcaaccagaaaacgtgtgaagtctcagcatggtgtccaattgaggctgtcgaggaagctcctcgtcccgccctcctcaattctgcagagaactttacggtgctgatcaagaacaatatcgactttccaggacacaactatacaacatatgcgaaatattataaagagaacaacgtcgaaaagcggacccttattaaagttttcggcattcggttcgatatactggtgtttggcactggtggcaagtttgacatcattcaactggtcgtatacatcggttctacactgagttatttcggcctcgtgcgggacagcctgttccacgcacttgggaaatggttcggtgagggctccgactag

SEQ ID NO: 131273 - DNA, 1518 bp, synthetic construct
  misc_feature 1..1518: note = Description of Artificial Sequence: Synthetic coding sequence
  source 1..1518: mol_type = other DNA
atgactcctggagatcactcgtggggtaattctttttttgtgatgaccaactttttgaagacagagggtcaggagcagcggctctgcccggaatacccgactcgccgcaccctgtgttcatctgacagaggttgtaagaagggctggatggatccacaaagcaaaggcatacagacaggcagatgcgtggtgtatgagggaaaccagaagacttgcgaggtaagcgcatggtgccctattgaagccgtggaggaagcaccccgccctgccctgttaaacagtgcagagaacttcaccgtgttgattaagaacaatattgactttcccggccacaattacaccacccgtaacatcttgcctggcctgaacatcacatgcacctttcataaaacacaaaaccctcagtgccccatctttaggctgggcgacatttttcgggagacgggggataatttctctgatgtggcaattcagggcggcattatgggcattgaaatctactgggattgcaatttggaccgatggttccatcactgccgtcccaaatattcttttcgccggctggatgataagaccactaatgtgtccctatacccagggtataacttcaggtacgccaaatactacaaagaaaacaatgtcgaaaagcggaccctgattaaagtgttcgggatacggtttgatattctggtttttggtactggcggcaagtttgatatcatccagctggtcgtttacatcgggtccaccttatcttatttcggtctagctgcggttttcatcgacttccttatcgacacatattctagtaattgctgccgctcccatatttatccctggtgtaaatgctgtcagccatgcgttgttaacgaatactattaccggaagaagtgtgaatcaatagtggagccaaaaccaaccctgaaatacgtcagttttgtggacgaaagccacatccggatggtgaaccagcagctcctcgggcgctcactacaggacgtgaaaggtcaagaagtaccccgcccagccatggattttacagacttgtcccgcctgccattagcactccacgatacccctccgatccccggccagcctgaggagatccagctcttgcgcaaggaggcgacgccccgctccagagattcgccagtatggtgtcaatgcggctcttgcttacctagtcagcttcccgaaagtcatcggtgtctggaagaactgtgctgtagaaaaaaaccaggtgcctgcatcaccacaagtgagctgttcagaaaattggttctttctcggcacgtgctgcagttcctgcttctttaccaggagccactgctagccctcgacgtcgactccactaattcccggctgaggcattgtgcctatagatgctatgctacctggagattcggaagccaagatatggctgattttgccaatctgcccagttgttgccggtggaggattcggaaagagttccccaaaagcgaagggcagtatagcggattcaagtcaccctactag

SEQ ID NO: 131274 - DNA, 387 bp, synthetic construct
  misc_feature 1..387: note = Description of Artificial Sequence: Synthetic coding sequence
  source 1..387: mol_type = other DNA
atgccagcctgttgcagttgctctgatgtttttcagtacgagaccaataaagtgacaagaatccagtcaatgaactatgggacgatcaaatggttttttcatgtgatcatcttcagctatgtctgttttgccttggtgtcggataagctgtatcagcggaaggagccagtgattagctctgtgcatactaaggttaaggggatcgcagaagtcaaagaggaaattgtagaaaatggtgtcaaaaaactcgttcattccgtgttcgataccgcagattatacctttcccctccagggcaattcatttttcgtaatgacaaacttcttaaagaccgaaggacaggagcagagactgtgtcctgaagagttccggcctgagggggtctag

SEQ ID NO: 131275 - DNA, 921 bp, synthetic construct
  misc_feature 1..921: note = Description of Artificial Sequence: Synthetic coding sequence
  source 1..921: mol_type = other DNA
atgtggcagtttaggtacgcgaagtattataaagaaaacaacgtggagaagagaactttgattaaggtcttcggcatcagatttgacattctggtgttcggcactggaggaaaatttgatatcatccagctcgtcgtctacattggaagcaccctaagttactttggccttgccgcagtgttcattgactttcttattgacacctactcctcaaattgttgtcgctctcatatctatccatggtgtaaatgttgtcaaccctgcgtagtaaacgaatactattacaggaagaagtgtgagtccatagtggaacccaagccgactctcaaatacgtctcgttcgtggacgagtcgcacataaggatggtgaatcagcagcttttgggcaggtccctccaggacgtgaaaggccaagaggtaccgcgccctgctatggactttactgacctgagtaggttgccactggcccttcatgatacaccaccaattccaggacaaccagaagagatacaactgctgagaaaggaggcaacaccaagatctcgtgactctccggtttggtgccaatgtggcagctgcctgccatcacagcttcctgagagccacagatgtcttgaagagctctgctgtcgaaaaaaacctggcgcctgtattaccacgtccgaacttttccgcaaactggtcttgtcccggcatgtgctgcagttcctgctcttgtatcaggagcccctcctggctctggacgtcgattcaactaattcgaggctgagacattgtgcgtaccgttgctacgccacttggcgatttgggtcccaagacatggctgatttcgccaatctgccatcctgctgcaggtggcgcatacggaaggaattccccaaatctgaggggcaatatagtggcttcaagagcccctactag

SEQ ID NO: 131276 - DNA, 387 bp, synthetic construct
  misc_feature 1..387: note = Description of Artificial Sequence: Synthetic coding sequence
  source 1..387: mol_type = other DNA
atgccagcctgctgcagctgcagcgatgtctttcaatacgaaactaataaggttacaagaatacagagtatgaactatggtaccatcaaatggttctttcacgtgatcatcttcagctatgtgtgctttgctctcgtctccgacaaactgtaccagagaaaggaaccagtgataagttctgtgcatacgaaggtcaagggcatagccgaagtaaaagaggagatcgtcgagaacggtgtgaaaaaattagtgcattctgtgtttgataccgctgattatacttttccactgcagggaaactcattctttgtcatgaccaacttcctaaagaccgaaggccaggagcagagactgtgcccggaagagttccgtccagagggtgtgtag

SEQ ID NO: 131277 - DNA, 1788 bp, synthetic construct
  misc_feature 1..1788: note = Description of Artificial Sequence: Synthetic coding sequence
  source 1..1788: mol_type = other DNA
atgcctgcatgttgcagctgctccgacgtctttcagtatgagactaataaggtgaccaggatacagtcgatgaactacgggaccatcaaatggttttttcacgtcatcatattctcgtatgtgtgctttgccttggtgagcgacaaactctaccagcggaaggagccagtcatttctagtgtgcatactaaagtcaagggcatcgccgaggtaaaagaagagatcgtggagaatggggtaaaaaagttggtgcatagtgtctttgacactgccgactacacgttcccgctccagggcaacagcttcttcgtcatgacaaactttctgaagactgaggggcaggaacagcgtctttgccccgaataccctaccagacggactttgtgcagcagcgatagaggatgtaagaagggctggatggatccccagtcaaagggcattcaaacagggagatgtgttgtatacgaagggaaccagaagacttgcgaggtgagcgcatggtgcccaattgaggcggttgaggaggcaccacggcctgcgttgctgaatagtgccgaaaatttcacagtgcttatcaagaacaacatcgattttcccggccacaactacacgacgcgcaacattctccccggtctgaatatcacttgcacttttcacaagactcagaatcctcagtgtccaattttccgtctgggagacatatttcgggagacaggcgacaatttcagtgacgtagctattcagggagggatcatggggatcgagatctactgggattgtaacctggaccggtggttccaccactgcagacccaagtactccttccgtcgtctggacgacaagaccaccaacgtatccctgtaccccggctataactttcgatatgctaagtactacaaagagaataatgtggagaagcgcacccttatcaaagtctttggcatcagattcgatatccttgtattcgggaccgggggaaaatttgatatcatccaattggtggtttacattggctctaccctttcctattttgggctggcagctgtcttcatcgacttcctgattgatacgtacagcagcaattgctgtcgttcccacatttacccatggtgcaagtgttgccagccttgcgtggtgaatgagtattattaccggaaaaaatgcgagagcattgtcgaacccaagcccacactgaaatacgtgtcgtttgtggacgagtcacacattaggatggtgaaccagcaactcctggggcgctcactgcaggatgtgaagggacaagaagttccaaggccggccatggattttaccgacctaagtagactcccactcgccttgcacgatactcctccgattccaggccagcccgaggagatccaacttttacgaaaagaagctacaccaagatcgcgggacagcccggtgtggtgccagtgcgggtcctgtctgccttcccaattgcccgaatctcatagatgtcttgaggagctttgttgtcgcaaaaaacccggagcctgtatcacaacctctgaactcttccgtaagcttgtgctgtccaggcatgttctgcagttcctgctgctgtaccaggaacccctgctggccttggatgtcgactcaacaaacagtcggctacggcactgtgcctaccgctgctacgcaacatggagattcggatcccaggatatggccgactttgcaaatctgcccagctgctgccggtggagaatcagaaaagagttccccaaatcagaaggacagtactccggctttaaatcaccctattag

SEQ ID NO: 131278 - DNA, 1122 bp, synthetic construct
  misc_feature 1..1122: note = Description of Artificial Sequence: Synthetic coding sequence
  source 1..1122: mol_type = other DNA
atgactgaggttttatggccggctgttcccaacgggacagatgctgccttcctggccggacccgggtcgtcctgggggaactcaaccgtagcgtctactgctgccgtcagttcaagcttcaagtgtgccctgactaagacggggtttcagttttattacctgccagctgtgtacatcctggtgttcattattggtttcttgggtaacagcgttgctatttggatgtttgttttccatatgaagccctggagcggaatcagcgtctatatgttcaacctggctctggccgattttctctacgtgctgacactgcctgctctcattttttactactttaacaagacggattggatttttggtgacgccatgtgcaagctgcagagatttattttccacgtgaatctctacggttcgatcctattcttaacatgtatttctgcacacagatatagcggcgtggtgtatcccctcaaatcactgggtcgacttaagaaaaagaacgctatttgcatcagcgtgcttgtatggctgattgttgtcgtggcgattagccctattctgttttactctggcaccggagttcgtaagaacaaaactataacctgctatgacactacttcagacgaatatctccgcagttatttcatttactcaatgtgcaccactgtcgctatgttctgtgtgcctctggttctgattctgggctgttacggactaattgtcagagcactcatatacaaggacctggataatagtcccctgagaaggaagtctatatatctggtaattatcgtcttaaccgtctttgctgtgtcatatattccgtttcatgtcatgaaaaccatgaacctaagagcacggctggatttccagacccccgcaatgtgcgccttcaacgaccgtgtctacgccacgtatcaagtcacaaggggtttagcatccctaaactcatgcgtggatcctatactttattttctggccggcgataccttccgcaggcgactctctcgagctacaagaaaagcctctagacgcagcgaagcgaacctccagtcaaaatccgaggacatgaccctgaatatattacccgaatttaaacagaacggagatacatctctgtag

SEQ ID NO: 131279 - DNA, 1125 bp, synthetic construct
  misc_feature 1..1125: note = Description of Artificial Sequence: Synthetic coding sequence
  source 1..1125: mol_type = other DNA
atggctgcaaacgtgagcggggcaaaatcttgccccgccaactttctagctgctgctgacgacaagctcagtggattccagggagactttctctggcccatactagtggtagaatttctagttgccgtagcctccaatggactcgccctctatcgcttttctatccgtaaacagagaccatggcaccctgccgtggtttttagcgtccagctcgctgtctccgacttactatgcgccttaacactaccccctcttgcagcatacttgtaccctccaaaacattggcgctatggagaagctgcctgcaggctggaacgcttcctgttcacctgtaatctcctgggatcagtgatctttattacctgtatttctctgaaccgctatcttggtattgtgcatcccttctttgcaaggtctcatctccggcctaagcacgcctgggctgtgtccgccgctggatgggttttagccgctctactcgctatgccaactttgagtttctcacatctgaagcgcccacaacaaggggcaggcaattgctcagttgcccgtcccgaggcctgtatcaagtgcctcgggacagcagatcacggtctggctgcttaccgggcatacagcctggttctagcaggcctcgggtgcgggttaccgctgctccttaccctggctgcctatggcgccctgggcagggctgtcctgcgctccccaggtatgaccgttgctgagaaactgagggtggcagcactagtggctagtggggtggccctgtacgcatcatcctacgtgccttaccatattatgcgcgtgctcaacgtggacgcccggaggcgctggagcacccgatgtccgtcgttcgcagacatcgcacaggctacagccgcgctggaacttggaccctacgttgggtatcaggttatgaggggactgatgcccctcgctttctgtgtccatccattactgtacatggccgctgttccatccctaggctgctgctgccgccattgtccgggctacagggattcctggaaccctgaagatgcaaagagcacgggccaggcccttccactgaacgccacggctgctccaaaaccgtccgagccacagtctcgagagctgtcccagtag

SEQ ID NO: 131280 - DNA, 1029 bp, synthetic construct
  misc_feature 1..1029: note = Description of Artificial Sequence: Synthetic coding sequence
  source 1..1029: mol_type = other DNA
atgcaggctgtagataacctcacatctgccccggggaatacttccttgtgcacaagagattataagataacacaggttctgttccccctactctacacagttctgttctttgtgggattaatcaccaatgggctagcaatgagaatattctttcagattcggtctaaaagcaacttcatcattttcttgaaaaacacggtgatctcagacctgctgatgattctgacattcccgtttaaaatcctgtccgatgccaaacttgggacagggcctctcaggactttcgtatgtcaggttaccagcgtgatcttctactttaccatgtacatcagcatttcttttctgggtctaatcactattgataggtaccaaaagaccacccgaccgtttaagacatcgaatccaaaaaatctactcggcgctaaaatcctctccgtagtgatctgggctttcatgttcctgttaagtcttcccaacatgattctgaccaacagacagcctcgggacaagaacgtgaagaagtgttccttcttgaagtcggagttcggactcgtgtggcacgaaatcgttaactatatttgtcaggttatcttctggatcaacttcttgatcgtgatcgtttgttacaccctaattacgaaagagctttaccggagctacgtgcggaccaggggggtcggaaaggtgcctcgcaagaaggtcaatgtaaaggtgttcataattattgccgtcttctttatttgctttgtgcccttccatttcgcacgcatcccgtacacactgagccagacaagggacgtatttgattgcaccgctgaaaacacactgttctatgtcaaggagtccaccctttggctaacgtcactgaatgcatgcctcgatccatttatttacttctttctgtgcaagtcattccgaaactcactcatttcgatgctcaagtgtccaaatagcgcgacttccctctcacaggacaacagaaaaaaggagcaggatggaggtgaccctaacgaggagacaccaatgtag

SEQ ID NO: 131281 - DNA, 738 bp, synthetic construct
  misc_feature 1..738: note = Description of Artificial Sequence: Synthetic coding sequence
  source 1..738: mol_type = other DNA
atgcaggccgtcgacaaccttacaagtgctcccggaaatacatctctgtgcaccagagactacaagatcactcaggtcctgtttccactgctgtacaccgtgttgttttttgtggggctcataaccaacgggctagccatgaggatcttctttcagattcgctctaagagcaacttcattatatttctgaaaaatactgtcatctccgatttgttgatgatactgaccttcccttttaagattctctccgatgccaagttgggaactggtcccttgagaacctttgtgtgtcaagttatattttggatcaactttttaatcgtgattgtttgctataccctcatcactaaggagctctataggtcctatgttaggactcggggcgtcggtaaagttccgcgaaagaaggtgaatgtaaaagtgtttatcattatagccgtgttctttatttgcttcgtcccgttccactttgcaagaatcccctatactcttagccagacaagagatgtcttcgactgtaccgctgagaacaccctattctatgtcaaagagtctactctctggctgacctccctgaacgcctgtcttgatccctttatttacttcttcttgtgcaagagtttcagaaactcccttatttccatgttaaagtgcccaaattccgcgacctctttatcacaggataaccgtaaaaaggagcaggatggaggagatcctaatgaggagactcccatgtag

SEQ ID NO: 131282 - DNA, 1134 bp, synthetic construct
  misc_feature 1..1134: note = Description of Artificial Sequence: Synthetic coding sequence
  source 1..1134: mol_type = other DNA
atggccgcagacctgggcccctggaatgatacaattaacgggacatgggatggggacgaacttgggtatagatgtagatttaatgaggatttcaagtacgtcttgctgccagtatcctatggagtcgtgtgcgttcctgggttatgcttaaatgctgtggccctttacatcttcctttgtagattaaaaacttggaatgcgagcactacatacatgttccatctggcagtatccgacgctctctacgctgcgtctctcccgttacttgtgtactattacgccagaggagatcattggcccttcagcactgttctctgtaaattagttcggttcctcttctacacaaacctttactgctccattttatttttgacgtgtatttccgtgcacagatgcctcggcgtgctgcgccctctacgaagccttcgctggggacgcgcgcgatatgcaagaagggtggctggcgccgtttgggtcctcgtgctggcctgccaggcccccgtgctatattttgttactacgtctgcaaggggggggagggtgacatgtcacgacaccagtgccccagagctgttcagtcgatttgtcgcctattctagcgttatgctcggactcctcttcgcagtaccattcgccgtgattctggtgtgttacgtattgatggcccggaggctgctgaagcctgcttatggaacgtccggagggctccctcgtgcaaaaagaaagagtgtccggactattgccgtggtactggccgtttttgccctttgcttcttaccctttcacgtgacccgcactctgtactactcatttagatctctagacttatcttgccataccctgaatgctatcaacatggcgtataaagtaacaagaccactggcgtccgccaatagttgcctggatccggtgctgtatttcctagccggccagaggcttgtcaggtttgcccgcgacgcaaaaccccccaccggtccatcaccggccacccctgcaagacgacggttagggctgcgcaggtctgataggaccgatatgcagagaattgaagatgtacttggatcatcagaagattccaggcgaacagagagcactcctgcaggatctgagaatacaaaagatatcaggttgtag

SEQ ID NO: 131283 - DNA, 1134 bp, synthetic construct
  misc_feature 1..1134: note = Description of Artificial Sequence: Synthetic coding sequence
  source 1..1134: mol_type = other DNA
atggcagcggaccttggaccctggaacgatacgatcaatgggacctgggacggcgacgagctcggttaccggtgcagattcaatgaggatttcaaatatgtactcctcccagtatcatacggcgtcgtgtgcgtgcccggcctgtgtctgaacgccgtggcactctatatctttctgtgcagactcaaaacgtggaacgcttcgacgacatacatgttccacctggccgtgtccgatgcactgtacgcggcatctctccctcttctggtgtattactacgcacgtggagaccactggccctttagcactgttctttgtaaactggtgcggtttctgttctatactaacctctactgcagtatcctttttctaacttgcattagcgttcaccgctgtctgggcgttctaagaccgttgcgatccttgcgctggggacgtgctcgttatgcccgccgtgtggcaggcgcagtatgggtcctggtgcttgcttgtcaagcccccgtgctgtactttgtgactacctctgcccgcggggggagagtgacgtgtcatgacacctccgccccagagctctttagcaggttcgtggcttattctagcgtgatgcttggcctactcttcgcagtgcccttcgccgtgatcctggtttgctatgttctgatggctcgccggttgctgaaacctgcatatggcacctccggcggcttgccaagggccaaacgcaaatcagtcaggactatcgccgtggtcctggcagtgtttgctctctgctttctgccctttcacgtcacaaggactctgtactattcttttcgatctctggacctgtcatgccacacccttaacgctatcaacatggcctataaggtgaccagaccgctggcttctgcaaatagctgtctggaccctgtgttgtatttcctcgcagggcaaaggcttgtacgatttgctcgggatgcaaagcccccgaccggtccgtcacctgccaccccagccagaaggagactgggactgcggcggtcggacagaaccgatatgcaacggattgaggacgtcctcggctccagcgaagacagccggcgaacagaatcaactcccgcggggtctgagaatacgaaggacattaggttgtag

SEQ ID NO: 131284 - DNA, 1134 bp, synthetic construct
  misc_feature 1..1134: note = Description of Artificial Sequence: Synthetic coding sequence
  source 1..1134: mol_type = other DNA
atggctgccgatctaggaccttggaacgatacaattaatggcacatgggatggcgacgagttaggatatcggtgcaggtttaacgaagattttaaatacgtgttactgcccgtgagctacggcgtcgtctgcgttcctggactgtgccttaatgccgtggctttatatatcttcctatgcaggcttaagacttggaacgctagtaccacttatatgtttcatctggcagtcagtgatgccctgtatgcggcatccttaccattgctggtctactactatgctcgtggcgatcattggccattctccactgtcttatgcaagctcgtccgattcctattttataccaacctgtattgttcgatcctcttcctgacttgcatctctgtccaccgttgcctcggggtgctgcggcctctgcgatcacttaggtggggcagggctagatatgcgcgtcgagtagccggagcggtctgggtgctcgtgctggcctgccaggctcccgtcctttattttgttaccacctctgcaaggggggggagggtgacttgccatgacacctccgcccccgagttattctctagatttgtcgcttactcgtccgtgatgctgggacttctctttgctgtcccttttgccgtcatcctggtttgctatgttctaatggcccgcaggcttctgaagcccgcctacggcacatctggaggattgccccgggctaagagaaagagtgtgagaacgatagcagtggtgttagcagtgttcgccctgtgtttcctgcccttccatgttacccggaccctgtactactccttccgctctttggatctgagttgtcacaccctgaacgcaataaacatggcatataaggtgacccgcccactggcctcagcaaattcttgtctcgatcctgtgctctactttcttgccggacagagactagtcagattcgcacgagacgccaaacctcctacaggaccttcaccagcaactccggccaggagaagactgggactgagaagaagtgaccgcactgatatgcagcggatagaagacgtgctagggtcgagtgaagactcaagacgcaccgagtcgacgcccgcaggatctgagaacacgaaggacattcggctgtag

SEQ ID NO: 131285 - DNA, 1080 bp, synthetic construct
  misc_feature 1..1080: note = Description of Artificial Sequence: Synthetic coding sequence
  source 1..1080: mol_type = other DNA
atgcaggtgccaaacagtaccggcccagacaacgctaccctgcagatgctgcggaaccccgcgattgcagttgccttgcctgtggtctatagtctcgttgccgccgtgagcattcccgggaaccttttctctctctgggttctgtgtcgccggatgggtcctcgctctcctagcgtgatctttatgatcaatctgtccgtgaccgacctaatgctggcatccgtgctgccctttcagatttattaccactgcaatagacatcactgggtgtttggagtgctactgtgcaatgttgtgacagtagctttctatgcaaatatgtactcctctattcttactatgacctgtatatctgtggaaaggttcctaggtgtcctttacccgctgtctagtaagaggtggaggaggcgacggtacgcggtcgcagcatgcgccggtacctggttgcttctacttacggcactttctccccttgcgcgcacagaccttacctatcctgtgcatgcactgggaattatcacttgtttcgacgtgctgaagtggacgatgctaccttccgtggccatgtgggctgtgttcctgttcactatctttattctgctgttcctgatcccattcgtgataacagtggcctgctacacagctaccatcctgaaactcctcaggaccgaggaagcacacggaagagaacagcggcgtagagctgtcggtttggccgcagtggttcttctggcattcgtgacgtgctttgctcccaataatttcgtgctgctggctcatatcgtctcacgcttgttctacggtaaatcttactaccatgtgtacaagctcacactgtgcctgagctgcctcaataattgtcttgacccattcgtgtactattttgcatcacgggaattccagctccgtcttcgagagtacttgggctgtcgacgcgtaccacgagacaccctggatacgcgccgagagtctctcttctccgctcgtacaacaagtgtcagaagtgaggccggggctcatcctgagggaatggagggcgcaactcgtcctggcctgcaacggcaagagagcgtgttctag

SEQ ID NO: 131286 - DNA, 189 bp, synthetic construct
  misc_feature 1..189: note = Description of Artificial Sequence: Synthetic coding sequence
  source 1..189: mol_type = other DNA
atgagtgagaggcaaggagcaggtgccaccaacggtaaggataagactagcggcgagaacgatggacagaagaaagtccaggaggaatttgatattgacatggacgccccagagacagagcgggccgccgttgccattcaatctcaattccgcaagttccagaagaagaaggccgggtctcagagttag

SEQ ID NO: 131287 - DNA, 1914 bp, synthetic construct
  misc_feature 1..1914: note = Description of Artificial Sequence: Synthetic coding sequence
  source 1..1914: mol_type = other DNA
atggcttcaaacgagagagatgctatctcctggtatcagaagaagataggagcttacgaccagcagatatgggagaaaagtatagaacagacccaaattaagggattgaagaacaagcctaagaaaatggggcacatcaaacccgatttgatcgacgttgacctgattcgcgggtcgaccttcgcgaaggctaagccagagatcccttggacgtctcttactaggaaggggctagtgcgcgtcgtcttctttcccctttttagcaattggtggatccaggttacatcactcagaatctttgtttggttactactgctttattttatgcaagtgatcgctatagtgctttatctgatgatgcctattgtgaatatctctgaggtcctgggcccactctgtcttatgctcctcatggggaccgtccattgtcagattgtgtctactcagattactcggccctcaggcaataatggcaatagaagaagacggaaactgcgcaaaacagtaaacggagatggcagccgggagaacggtaataactctagtgataaggttaggggtatcgaaacactcgagtcagtgcccataattgggggtttctgggagaccatattcggcaaccggatcaaacgcgtcaaattaatctcgaataaaggtactgagaccgacaacgatccttcgtgcgtgcatccgatcatcaaaagacgccagtgccggcctgaaattaggatgtggcagacgcgggagaaggccaaattttcagatggcgagaagtgcaggcgtgaagcgttcaggaggctgggcaatggagtgtccgatgatttgtcctccgaggaagatggagaggcccgcacacaaatgatcctcctgcgcaggagtgtggagggtgcaagctccgacaacggatgcgaggtgaagaataggaaatccatactctcccgacacctgaacagccaggtgaagaaaacaactacacgatggtgtcacatcgttcgagactctgactccctagctgaatccgaattcgagagtgcagccttcagccaggggagccgaagcggggtgagtggcgggagccgaagcttgaacatgagccgaagagactccgaaagcacacgacatgattctgaaaccgaagatatgctctgggacgacctcctgcacggacctgaatgccggagttcagtcacctcagattctgaaggagcccatgtcaataccttacatagcggcacaaagcgggatcccaaggaggacgtgttccagcagaatcacttgttttggctgcagaatagtagcccctcctccgatagggtgagcgccattatatgggagggcaacgagtgcaaaaaaatggatatgtcggtcttggagatttctgggatcattatgtctcgggtcaacgcgtaccagcaaggagtaggttatcagatgctgggcaatgttgtgaccattggcctggccttttttccattcctgcatcggctcttcagagagaagagtctggaccaactgaagtctatttctgcggaggagattcttacactgttctgtggcgcacccccggtaacgcctattatagttctctccatcattaacttcttcgagcggctgtgtctcacatggatgttcttctttatgatgtgtgtagccgagcgcacctataagcagcgctttctatttgctaagttgttttcacatatcacatccgctagaaaggccagaaagtatgaaataccacacttcagattaaagaaagtggagaacattaaaatatggctctcgctgcgaagctatctgaagagacgcggaccacaacgcagtgtggacgtggttgtctcttcggtgttcctgttaaccttgagcatcgctttcatttgttgcgcccaggtgaaagtcagccacttgctgtag

SEQ ID NO: 131288 - DNA, 2130 bp, synthetic construct
  misc_feature 1..2130: note = Description of Artificial Sequence: Synthetic coding sequence
  source 1..2130: mol_type = other DNA
atggctagcaatgagagagacgccatttcatggtaccaaaaaaaaatcggggcctatgatcagcagatttgggaaaaaagtattgagcagacacagatcaaagggcttaaaaacaagcccaagaaaatgggtcatatcaagccggatcttatcgatgtagacttgatacgcgtcattgccattgtgttgtatctgatgatgccgatagtcaatataagcgaggtcttggggcccctgtgtctcatgctcttgatggggaccgttcattgccaaattgtgagtacccaaattacccgtccttccggcaacaacggtaatcgcagacgtaggaaattgagaaagactgtgaatggcgatgggagcagggagaatggaaacaatagctccgacaaagtgcgaggcatcgagaccctcgagtccgtgccaatcattggtgggttctgggaaaccatctttggtaaccggatcaagcgcgtgaaattgatatctaataaagggactgaaaccgataatgatccaagctgcgtccatcctatcatcaaacggcgccagtgtcgcccggagattagaatgtggcagactagagagaaggctaaatttagcgatggtgagaagtgccggcgagaagctttcagacggttggggaacggagtcagtgacgatctctcaagtgaggaggatggcgaggccaggactcagatgatcttgttgaggcgatcggtggagggtgcatccagcgacaacggctgcgaggtgaaaaacagaaagtccattctgagcaggcacttaaacagccaagtgaagaaaactactacacgatggtgtcatatcgtccgtgactctgactctcttgctgagagcgagttcgagtctgccgcgttttctcaagggagcagaagcggagtttctggaggttcgcggtccctgaatatgtctagacgtgactccgaatcaacccggcacgactcagagactgaagatatgctttgggatgacttactgcacggacccgagtgtcgcagctctgtgacatccgattctgagggtgcccacgtgaataccctgcattctggtaccaaacgcgatcccaaagaggacgttttccagcagaatcacctgttctggctgcagaactcaagcccgtcgagtgatcgtgtatccgcaattatctgggagggtaacgagtgtaagaaaatggacatgagcgtcctagaaatctccggcatcatcatgtcacgcgtgaatgcttaccaacagggcgtgggatatcagatgctgggcaatgtggtgaccatcggactcgcattctttccattcctccatcgattgttccgcgaaaaaagccttgaccagctgaaatcgatcagcgcagaggagatccttacactcttctgtggagctccgcctgtgacgcctattattgtactgtccatcattaacttttttgagagattgtgtcttacctggatgttttttttcatgatgtgtgtggcagaaagaacgtataaacagcgattcttgttcgccaagctgttcagtcatattacgagtgcaagaaaagctcgcaaatatgagatcccacatttccgactcaagaaggtcgaaaatatcaagatttggctttcattacggtcatatttgaagagaaggggtccacaaaggtctgtggacgtggtagtcagctcagtgttcctactaacactgtccattgcatttatttgctgtgcacaggtgctccaggggcataagacctttctgaatgatgcctataattgggagtttttgatatgggaaacggccctgctgctcttcttgctgcgtctcgctagcctcggcagcgagactaataaaaaatacagcaacgtgagcatcctgctcactgagcagatcaatctctatctgaagatggagaaaaaacctaataagaaggaacagctgacactcgtgaataacgtgctgaaactgtccacgaaactgctgaaagagctggacacaccgtttcggctgtacgggctaacaatgaacccgctcatttacaacattacaagggtggtgattttgagcgccgtgagcggagtgatctcagacttgttaggattcaatatccggctctggaagatcaaatcttag

SEQ ID NO: 131289 - DNA, 2154 bp, synthetic construct
  misc_feature 1..2154: note = Description of Artificial Sequence: Synthetic coding sequence
  source 1..2154: mol_type = other DNA
atggcctctaatgagcgagatgctatctcctggtaccagaaaaaaataggcgcctatgatcagcaaatttgggagaagagcatcgaacagactcagattaagggactgaaaaacaagccaaagaagatgggacatattaagccagacttgattgatgtggatctaattagaggctccacattcgctaaagcaaagcctgagataccatggacctctttgacaaggaagggactcgtgagagttgtcttcttcccactcttttctaattggtggattcaggtcacatcattaaggatcttcgtctggctgttactgctgtacttcatgcaggtgatagcaatcgtcttgtatcttatgatgccaatcgtaaacatttccgaagtgctgggtcctctgtgcctgatgctgctgatgggtaccgtgcactgccaaattgtcagcacccaaattacgagaccttccggcaacaacggcaatcggaggcgacggataaagagagtaaaactaatctctaacaagggcaccgagactgacaacgatcctagctgtgtgcacccaattattaaacgcaggcagtgccggcctgaaatcaggatgtggcagactagggagaaggccaagttcagcgacggagagaaatgcaggcgcgaggccttcagacgcctagggaatggagtttccgatgatttatcttccgaggaagatggcgaggcacgcacccagatgattctcctaagaaggagcgtggagggagcaagttcagacaacggttgcgaagtgaagaaccgcaaaagcatactgtcgcgtcacctgaactctcaggtcaaaaaaacaaccactcgctggtgccacatcgtgcgtgactccgattctttggcagaatctgagtttgagagtgccgctttttcccagggctctaggtcaggtgtttccggggggtctcgttcactgaacatgtctagacgcgattctgaaagtacccggcatgatagcgaaactgaggatatgctgtgggatgatcttctgcacggccccgaatgcaggagttccgtcacttcggactctgagggtgctcacgtaaacactctgcatagcggcacaaaaagagatccaaaagaggatgttttccaacagaatcaccttttctggcttcagaactctagtcccagttctgaccgcgtgagcgccattatttgggagggtaacgagtgcaagaaaatggatatgtctgtcctcgaaatcagcggcataatcatgagcagagttaatgcttaccagcaaggagtcggctaccagatgttaggcaacgtggtcactataggcctagcattctttcctttcctccacaggctcttccgcgaaaagtccttggatcaactgaaaagtatttcagcagaggaaatactgactctgttttgtggagcccccccagttactccaatcattgttctcagtataatcaacttcttcgaacgcctctgtctgacctggatgttttttttcatgatgtgcgtagctgagcgcacttacaaacagcgtttcttatttgcaaagctgttcagtcacataacctcagcccgtaaggcgagaaagtacgagataccacattttcggctcaagaaagtggaaaacattaagatatggttgagcttacgcagctatcttaaacgtcgggggcctcaacgcagcgtggatgtggtggtgagcagtgtgttccttctcactctgtcaatcgctttcatttgctgtgcacaggtcctgcagggacataaaaccttcctcaatgacgcctataactgggagttccttatttgggagacggccctcctactcttcctactgaggctggctagcctcggttctgaaacgaataagaagtacagcaatgtcagcattctacttaccgagcagattaatctgtacctgaaaatggaaaagaagcccaataaaaaggaacagctaactttggtaaataacgtgctgaagcttagcacaaagctcctgaaagaactcgatactccctttcgactgtatggtctgactatgaatcccctcatttacaacattacgcgggtagtcatactgtccgcagtaagcggggtgatcagcgacctgctgggtttcaatattagaatttggaagcactccagctag

SEQ ID NO: 131290 - DNA, 2154 bp, synthetic construct
  misc_feature 1..2154: note = Description of Artificial Sequence: Synthetic coding sequence
  source 1..2154: mol_type = other DNA
atggcttctaacgagcgcgatgccatcagctggtatcaaaaaaaaatcggggcatatgaccagcagatctgggaaaaaagcatcgagcagacccagatcaaaggcttgaagaataagcccaagaaaatggggcacattaagcctgatctgatcgacgtggacctgatcagaggttctaccttcgccaaagctaagcccgagatcccttggacttcccttaccaggaaggggctggtacgggtggtgtttttccccctgttcagcaactggtggattcaggtgacttctctgcggatctttgtttggctgttacttctctactttatgcaggtcatcgcaatcgtcctctatctgatgatgcctatcgtgaacataagtgaggtgctggggcccctctgtctcatgctgctgatgggtactgtgcactgtcaaatcgtgagtacacagataacaagaccgtcaggcaacaacggtaaccgacgccgtaggatcaagagagtgaagcttatcagtaacaagggaacagaaactgacaatgatccctcatgcgtccaccccatcattaagcgacggcagtgtagacctgagatccgcatgtggcagactcgggaaaaagcgaagtttagtgatggtgagaaatgcagaagagaagctttccgtaggcttggtaatggcgttagtgatgatctgagctctgaggaggacggcgaggctcggacacagatgattctgctgcgtaggagcgtcgaaggagcctcttcagataacggatgtgaggtgaaaaataggaagagcatactgagtcgccatcttaacagtcaggttaagaagactaccactcgatggtgtcacatagtgagggattctgacagcttggctgaatctgaatttgagtccgccgcattctcccagggatctaggagtggcgtgagcggcggaagccgctctcttaatatgtctaggcgcgactccgaatccacaaggcatgattctgagacagaggatatgttgtgggacgatctgctgcatggcccagagtgtcgctcctcggttacaagcgattccgagggtgcccacgtgaacactcttcattcaggcacaaagagggaccccaaggaggacgtgtttcagcagaaccacctattctggctgcagaacagttccccatcaagcgaccgggtgagtgcaatcatctgggaaggcaacgagtgtaagaagatggacatgtccgtactcgagatatcaggcattatcatgagcagggtgaacgcataccagcaaggcgtaggctaccagatgctcggtaatgtcgttacaattggccttgccttttttccattcctgcaccgactctttagagaaaagtccctcgatcaactgaagtctatcagcgctgaggagattctgactctattttgtggcgcaccacctgtcactcctatcatagtgctgtcgattatcaattttttcgaaaggctgtgcctgacttggatgttttttttcatgatgtgcgtggctgaaaggacatacaagcagcgctttctcttcgctaaactgttttcacatattactagtgcaagaaaggcccgcaagtatgaaatacctcatttccgccttaaaaaggttgagaacatcaaaatttggctgtccctgcgaagttatttgaagagaagaggtccgcaaaggtcagtcgacgtggtggtgagcagtgtttttctgctgaccctgtcgatcgcctttatttgttgcgcacaagtgttgcagggtcacaagacgttcctaaacgatgcctataactgggagtttctaatctgggagacggccctcctcctgtttctactgagactggcctcactgggaagtgagaccaacaaaaaatatagcaacgtgagtatcctgctcactgagcagatcaacctgtacctcaaaatggaaaagaagccaaataagaaggagcagctgacgcttgtgaacaacgtattaaagttgtcaacaaagcttctgaaagagctggatacaccattccggttatatgggctgacaatgaatcccctgatttacaacatcacaagggtggtcattttgagcgccgtcagcggggttatttcggatctgctggggttcaacatcaggctgtggaagataaaatcatag

SEQ ID NO: 131291 - DNA, 2130 bp, synthetic construct
  misc_feature 1..2130: note = Description of Artificial Sequence: Synthetic coding sequence
  source 1..2130: mol_type = other DNA
atggcatcaaacgaacgagacgccatctcttggtatcagaagaagataggcgcgtatgaccagcagatctgggaaaaaagtatagaacagacccagataaaaggtctgaagaataagcctaagaaaatgggtcatattaagccagatctgattgacgtggatctgatccgagtgattgctattgtgctgtatctgatgatgcccattgtgaacatatctgaagttttgggtcccctctgtctgatgcttttgatgggtactgtccattgccagatagtctccacacagattacaaggcccagcggcaataatggcaataggcgccgccggaaactgcgcaagactgtgaacggcgatggctcccgagagaacgggaacaactcaagcgacaaggttagaggtattgagacgctggaatctgtgcccatcattggaggtttctgggagactatttttgggaatagaatcaaacgcgtcaaattgatttccaataaagggaccgaaactgataacgatcccagttgtgtccatccgatcattaagagacgccagtgccgccccgaaattaggatgtggcagacacgagaaaaggcgaagttttctgatggggaaaagtgtagacgggaagcgtttcgcagattgggtaacggcgtttctgatgacctttcctccgaggaagatggtgaagcgagaacccagatgatactgctgcgcagaagcgtggaaggggcctctagcgataatgggtgtgaggtaaaaaacagaaagagtattttgagcagacacttgaactcccaggtgaaaaagaccacaacccgctggtgtcacatcgtgcgcgacagtgacagcctagcagaatccgagtttgaatctgccgcttttagtcaaggcagccggtctggcgtgtccggcggatcaagatccctgaatatgtctcggagggacagcgagtccacacgccatgatagcgaaacggaagatatgctgtgggacgatctcctgcacggccccgaatgtcgatcctccgttacaagcgacagcgaaggagcccacgttaacactctgcacagcggtactaagagggacccaaaagaagacgtgttccagcaaaatcatctgttttggttgcagaacagctcaccttcttccgatagagtttccgcaatcatttgggaagggaacgaatgtaaaaaaatggatatgtctgtactggaaattagcggtattatcatgtctagagtgaacgcataccagcagggcgtgggctaccagatgcttggaaatgtcgtcaccatcggcttagctttctttccctttctgcatcgactctttagagagaagtccctggaccaactgaagtcaattagcgctgaggaaattctcaccctcttctgcggggcccctcctgtcacccccataatcgttttgagcataattaacttcttcgagagactctgtctgacttggatgttcttttttatgatgtgcgtggctgaaaggacctataagcagcggttccttttcgctaagcttttctctcatattacaagcgcacgcaaggcacgtaaatatgagatcccgcacttccgactaaaaaaggtcgagaacattaagatttggcttagcctgagaagctatctgaagcggagaggaccccagaggtccgtggatgtggtcgtatcctcggtattcctcctgaccttgtccattgcttttatttgttgcgctcaggtcctgcagggccataagaccttcttgaacgatgcctataattgggaattcctcatttgggaaaccgctctcctccttttcctgctgagactggccagtttgggaagtgagactaataagaagtacagcaacgtgtccatcctgcttaccgagcaaattaacctttacctgaagatggagaagaagcctaataagaaggagcagttgacactggtgaacaacgtgctcaagctgagtaccaagctgctgaaggagctggatacacccttccgcctctatgggcttacgatgaatccactcatttataatatcacgcgcgtagtaatactcagcgcggtatcaggagttatatccgacctgctgggattcaatatccgcctatggaagatcaagagctag

SEQ ID NO: 131292 - DNA, 2289 bp, synthetic construct
  misc_feature 1..2289: note = Description of Artificial Sequence: Synthetic coding sequence
  source 1..2289: mol_type = other DNA
atggcctccaacgagcgggatgcaatcagttggtaccagaaaaaaattggcgcatacgatcagcagatatgggaaaaatcgattgaacagactcaaataaaaggactcaagaacaagccaaagaagatgggccacatcaagccagatcttatagatgttgacctcatacgtggaagtaccttcgccaaagcaaaaccagagatcccttggacttctctgacgcgcaagggtctagtgagagttgtattttttccgttgttttcaaactggtggatccaggtgaccagcctacgaattttcgtgtggctgctcttactgtacttcatgcaggtgatcgctattgtcctgtacttaatgatgccaatcgttaatatttcagaggttcttgggcctctctgcctcatgctactgatgggtaccgttcactgccagatagtaagtacacagatcacaagaccatcagggaacaatggcaacaggcgtcgtagaaagttacgtaagactgtgaatggagatggctctagggagaacgggaacaacagttctgataaagtgaggggcattgaaacacttgagtctgtgcccataattggtgggttttgggaaacaatatttgggaatcgcatcaaaagggtgaagctaatttctaacaagggaacggaaaccgataacgatccctcgtgtgtgcaccccatcatcaagagaaggcagtgtagacccgagataaggatgtggcagaccagagagaaggccaagtttagtgatggggagaagtgccgacgagaggccttccggagactggggaacggagttagcgatgatttgagttctgaagaggacggagaagccagaacacaaatgatcctgctaagaaggagcgtcgagggtgcctcctcagacaatgggtgcgaggtgaagaatcgaaaatccattctttcccgccaccttaacagtcaggtgaagaaaacgaccacccgttggtgtcacatcgtcagagattccgactcactcgctgagagtgagtttgagtcagcagccttctcgcaaggaagtcggagtggggtcagcggaggaagccgatcacttaatatgtcccgaagagactctgaatctacgcgtcacgacagcgagacagaggatatgttgtgggatgacttgctgcacggccccgagtgcagaagctctgtcacaagcgactctgaaggcgcgcacgtgaataccttgcacagcgggacaaagcgtgatcctaaggaagatgtgtttcagcaaaatcacctgttttggctgcaaaattcaagtccttcaagtgatcgcgtgagtgccatcatctgggagggaaatgagtgcaaaaagatggacatgtcagtgctagaaattagcgggatcataatgtcgagggtgaacgcctaccagcagggtgtgggttatcagatgctgggaaatgtggtgacaatcggcttggctttctttcctttcttgcacagattgtttagggagaagagcctggatcagctgaagtccatatcagcggaggagattttgacccttttctgcggggctccccctgttactcccattatcgtattaagtatcattaacttcttcgagcgcctttgcctcacctggatgttctttttcatgatgtgcgtggcagaacgaacctataaacagcgatttctgtttgccaaactgttctcacacattacttccgcacggaaagctagaaaatatgaaattccccattttaggctgaaaaaagttgaaaatattaagatctggctgagcctgcgatcatacctgaaaagacgcgggccacaacgctcagtggacgttgtggtgagtagcgtgttcctgctgaccctgtccattgcttttatatgctgcgcccaagtgctccagggccacaaaaccttcctgaatgacgcttacaattgggagttcttgatttgggagacagctctgctgttgtttcttctcagactagcatcattaggctccgagaccaataaaaaatactccaacgtcagtattctgctcacggagcagattaacctttaccttaagatggagaaaaagcccaacaagaaagagcaactgaccctggtcaataacgtgctaaagctgagcacaaaactgcttaaagaactcgataccccctttcgtttatacgggcttacaatgaatccactgatatataatatcacacgcgtcgtaatcttgtcagctgtaagcggcgttattagcgatttgctgggcttcaatatccgcctgtggaaaatcaagtcctag

SEQ ID NO: 131293 - DNA, 2289 bp, synthetic construct
  misc_feature 1..2289: note = Description of Artificial Sequence: Synthetic coding sequence
  source 1..2289: mol_type = other DNA
atggcaagtaatgagagagacgccatcagttggtaccagaaaaagataggcgcttatgaccagcaaatttgggagaagtccatcgagcaaactcagataaaaggcctgaaaaataagcctaagaaaatgggtcacatcaagccagatttgatagacgtcgacttgattcgtggctcaactttcgctaaagctaagcccgagatcccatggacaagtctcacaagaaaaggactggtcagagtggtcttcttcccccttttctccaattggtggattcaggtaacaagcctacgaatcttcgtctggctccttcttttgtacttcatgcaggtgattgctattgtgctttaccttatgatgcccatcgtcaacatctctgaggttctcgggcctttgtgtttgatgctcctgatggggaccgtgcactgccagatcgtttccacacagattacccgcccgtctggcaacaatggcaatagaagaagacgcaagctgaggaaaactgtgaacggcgacggaagtcgagaaaacgggaataacagctccgataaggttcgcggcattgaaactctggagagcgtgccaatcatcgggggattttgggagaccattttcggcaaccgcataaaaagagttaagctgatctccaataagggaaccgagactgacaacgatccttcttgcgtccatcccattattaagcgcagacagtgtagacctgagatccgcatgtggcagaccagggagaaggctaaattttctgatggggagaaatgcaggagagaagccttccgaaggctgggcaatggcgtttccgacgatctgtcctccgaggaggacggtgaggcgcgaacccagatgatcctcctacgaagaagcgtggagggggcttcttcggacaacggctgtgaggtaaaaaaccggaaaagtatcctgagtcgccatctcaactcgcaggtgaagaaaaccacaactcgctggtgccatatagtgcgggattcggacagcttggccgagtccgagtttgaatcagcagcattcagccaaggatctagaagcggggtcagcggagggtcccgaagcctcaacatgtctagaagagattccgagtctacaaggcacgactccgaaacagaggacatgctttgggatgatctccttcacggacctgagtgtagatctagtgtaacgagcgatagtgagggggctcatgtgaataccctgcacagcgggaccaagagagatccaaaggaggatgtcttccagcaaaatcacctgttttggctccaaaattccagccctagttccgatagagtttctgcaatcatatgggagggcaatgagtgtaaaaaaatggatatgtccgtgctggagataagtggaattataatgtcccgggtaaatgcgtaccaacagggggtgggatatcagatgttgggcaatgtcgtaacaatcggcttggcgttctttccatttctacatcgtctgttcagggagaagagtcttgaccagcttaagtcaatatccgccgaggagattctcacgctgttctgtggagccccaccggtcactcccattatcgtgctgagtatcataaatttcttcgagcgcctttgtcttacctggatgtttttttttatgatgtgcgttgccgaaagaacttacaagcaacgatttttattcgcgaaattattcagccacattacgtccgccagaaaagccagaaaatatgaaattcctcacttccgattgaaaaaggttgagaacatcaagatctggctctccctgagaagctatctgaaacgtagaggtcctcagcgaagcgtagacgtcgtggtatcttctgtctttctcctgaccctgagtatagcattcatatgctgcgctcaggtccttcagggccacaagaccttccttaatgacgcctataactgggagttcctgatctgggagaccgccctgctgttatttttgctccgcctcgcatccctgggttcagagacaaacaagaagtattccaatgtatccatactcctgaccgaacaaattaacctgtacctgaaaatggagaagaagccaaacaagaaagaacagctgacgctggtaaacaatgttctgaaactgtctacgaaattattgaaggaacttgatactccttttcgactctatggcctcaccatgaacccactgatctacaatataactcgcgtggtcatcctgtccgcagtatctggcgttatttctgatctgttggggtttaacattaggctctggaagatcaaatcttag

SEQ ID NO: 131294 - DNA, 996 bp, synthetic construct
  misc_feature 1..996: note = Description of Artificial Sequence: Synthetic coding sequence
  source 1..996: mol_type = other DNA
taacaaactcgggagaaagctaaatttagcgatggcgaaaaatgtagaagggaagccttcaggagactgggtaatggagtgtccgacgatctttctagtgaggaagatggggaggcccgtacccaaatgattttactgcggagatcggtggagggcgctagctctgacaatggatgtgaggtcaagaaccgaaaatccatcctgagcaggcacctgaactctcaggtcaagaagaccaccacgcggtggtgccatatcgtgagagacagcgattccctggctgagtccgaatttgaatccgcggcatttagccagggctcacggtccggcgtttcgggaggatctagaagcctgaatatgagtcgcagggacagcgagtctactcgacacgacagtgaaaccgaagatatgttatgggatgacctgctgcatggtcctgaatgtagatcatccgtcaccagcgactccgagggcgcccacgtcaataccctgcactccggcacgaaaagagatcccaaagaggatgtgtttcaacagaaccatttgttttggctgcaaaattcatctccctcttctgacagggtgagcgccataatttgggagggcaatgaatgcaagaaaatggatatgagcgtgttagagatatctggtattataatgtccagagtcaacgcttaccaacaaggcgtgggctaccagatgctgggaaacgtggttaccattggcttggccttctttccctttttgcaccggctgttccgggagaagtcactggatcagctcaagtctatctcagccgaagagattttaacacttttttgcggagctccccccgtaacgcccatcatcgtcctgtccattatcaacttctttgagcggctgtgtcttacttggatgttctttttcatgatgtgtgtggccgagcggacttacaagcaggtgtctggcgaaattagaaagattttctatttgttcctgtatatgatctttcattag

SEQ ID NO: 131295 - DNA, 318 bp, synthetic construct
  misc_feature 1..318: note = Description of Artificial Sequence: Synthetic coding sequence
  source 1..318: mol_type = other DNA
atggccagcaatgaacgcgacgctatctcgtggtatcagaagaagataggggcctacgaccagcagatctgggagaagtcaattgagcaaacgcagatcaagggacttaaaaataagcccaaaaaaatggggcatataaagccagatctgatcgacgttgacctgatcaggggttctacctttgcgaaggctaaaccagaaatcccttggactagtctcaccagaaaaggactagtgagggtggtttttttcccactcttttcaaattggtggattcaagtcacctccttgcgcatatttgtgtggttactgctgtag

SEQ ID NO: 131296 - DNA, 702 bp, synthetic construct
  misc_feature 1..702: note = Description of Artificial Sequence: Synthetic coding sequence
  source 1..702: mol_type = other DNA
atggcatccaacgagagagacgcaatttcctggtaccagaagaagataggagcctacgatcagcagatctgggagaagtcgattgaacagacccagataaaagggctgaagaacaagccaaagaaaatggggcacataaagccggatctgatcgatgttgacctgataaggggcagcacctttgccaaggcaaagccagagatcccttggacttcactgaccaggaaagggctggtgagggtcgtgtttttccctctctttagcaattggtggatccaggtgacttcactccgcatcttcgtctggctcttgctgttgtatttcatgcaagttatcgcaatagtcctctacctgatgatgcctatcgttaatatcagtgaagtgctaggacccctgtgtttgatgctcctgatgggcaccgtgcactgccagatcgttagtacacagattacccgaccctctggcaataacggtaaccgtcgtaggcgaaagctgaggaagacggtaaatggagacggcagtcgagagaacggcaataacagctccgataaggtcaggggaatcgagacgctcgagtcagtgcccatcatcggcggcttctgggaaaccatcttcggaaatcggcgcctgctgggagtgtgggtgatgggctgtctgatgacttgtcaggtcaaaaaaatggtgaaacacggccataggtag

SEQ ID NO: 131297 - DNA, 2760 bp, synthetic construct
  misc_feature 1..2760: note = Description of Artificial Sequence: Synthetic coding sequence
  source 1..2760: mol_type = other DNA
atgaaattcgcctaccggttctctaacctgcttgggaccgtttacagacgaggtaacttgaattttacctgcgacggtaatagcgtcattagtccggtgggcaacagagtgacagtgttcgacctaaagaacaacaagagtgataccctgcccctggcaactcggtacaacgtaaagtgtgtgggcctcagtcccgacggacgattagccattatagtggatgagggtggtgacgcccttctagtaagtctggtctgccgtagtgtattacaccactttcacttcaaaggcagcgtgcacagtgtgtccttcagcccggatggtcggaaattcgttgttactaaaggaaatattgctcagatgtaccacgcccccgggaaaaagagggagtttaatgcttttgtcctggacaaaacctacttcgggccttacgatgagaccacatgcatcgactggacggacgacagcagatgctttgtggttgggtctaaggacatgtcgacctgggtctttggcgctgagcggtgggataacttgatctactatgcactaggcggccacaaagacgcaatcgtcgcatgctttttcgaatccaattcccttgacctttacagtttatcccaggatggcgtgttgtgtatgtggcaatgcgatacaccacccgaggggcttaggctaaaacctccggcgggatggaaagctgacctgctgcagcgcgaagaggaggaagaggaagaagaggatcaggaaggcgaccgcgaaacaaccataagaggaaaggccacacccgcagaagaagagaagacagggaaggtgaagtattcccgtttagccaagtatttcttcaacaaggagggagattttaataacctgaccgctgcagccttccacaagaagagtcacctccttgtgaccgggtttgcatctggaatctttcacctgcacgagctaccagagttcaacctgattcattccctttctatctcagatcagagtatagccagtgtggcaattaactctagcggagactggattgcatttggatgttctggcctggggcagctccttgtatgggagtggcagtccgaaagttatgtgctgaagcagcagggccactttaatagcatggtggcgctggcctattcaccagacggtcagtacatcgtgacaggcggcgatgatggcaaggttaaggtgtggaatactctgagcgggttttgcttcgttaccttcacagagcactcatcaggtgtcaccggcgtcacctttaccgctacgggctatgtggttgtgaccagcagcatggacgggaccgtaagggcattcgatctgcaccggtataggaatttccgaacttttacatccccccggcctactcaatttagctgcgttgccgttgacgcctccggggaaatcgttagtgcgggggcgcaggactcgtttgaaatttttgtctggagcatgcaaacaggccgcctcctggacgtgttgtctggacacgaggggcccatcagtgggctgtgcttcaaccctatgaaatccgtgctcgcaagcgcctcctgggacaagactgttagactgtgggacatgtttgacagttggcgtacaaaagaaaccttagcgctgacttccgacgcactagcagtaacatttcgacctgacggggccgaactcgccgttgcaaccttgaactctcagataaccttttgggatccggaaaacgctgtgcagaccggaagcatcgagggtagacacgacctcaagacgggtcgaaaggagctcgacaaaattactgccaagcatgccgctaaggggaaagccttcacagccctctgctactccgctgacggtcactctatccttgccggcggaatgagcaagtttgtctgtatataccatgtgagggagcaaatcctgatgaagaggttcgagatctcttgcaacctgtccctcgacgccatggaggagtttcttaatcgccggaaaatgacggaattcggcaatttagctttgattgaccaggacgcaggtcaggaggacggcgtggctataccactgcctggtgtcaggaaaggcgacatgtcttcccgccacttcaaacccgagatcagggttaccagtctcagatttagcccaactgggagatgctgggcagccaccactaccgagggtctgttaatttactcccttgacacccgtgtgctgttcgaccctttcgagctggacacttcagtgactccgggtagggtgagagaggctctgaggcagcaggatttcacacgggctattctgatggcactccggcttaatgaatctaaactggtgcaggaggccctggaggctgtgcccagaggcgaaatcgaagttgtgacttcttctctcccggaactgtatgtagaaaaggtgcttgagttcttagcctctagcttcgaggtgagtagacacttggagttctatctgctctggacccacaaacttctgatgctgcacggccagaaactcaagtcccgcgccgggaccctgctcccagtcatccagttccttcagaaatctatccagcggcacttagacgacctgtcaaaactgtgctcctggaaccactacaacatgcaatatgctctggccgtcagcaaacagagggggactaagagatctctggatcccttaggcagcgaagaggaagccgaagccagtgaggacgattcactgcatctgctggggggcggtggcagagactcagaggaggagatgctcgcctag

SEQ ID NO: 131298 - DNA, 1686 bp, synthetic construct
  misc_feature 1..1686: note = Description of Artificial Sequence: Synthetic coding sequence
  source 1..1686: mol_type = other DNA
atggcattcatggagaaaccacccgcgggaaaggtgctgcttgatgacaccgttccactgactgccgccattgaggcttcccagtcgctccaatcacataccattgtgaggaggtattccgattttgatctccttaataattcgctacagattgctgggttgtccttgcccctgcccccaaagaaactcattggaaatatggatagggagttcattgcggagaggcaaaagggcctgcagaactacctcaacgtgatcaccacaaatcacatcctgagtaattgcgaactcgtgaagaagttcctggatccaaataactacagcgctaattacacagagatcgctttacaacaagtcagcatgttcttcaggtctgaacccaagtgggaagtggttgaaccactcaaagacatcggttggcgcatacggaagaaatactttctgatgaagataaaaaatcagcctaaggagcgcctggtcctgtcatgggccgatctggggcccgacaaatatctttccgacaaggatttccagtgtttgatcaagttgttgcctagttgtctgcacccctacatttatcgtgtgacctttgcaacagctaatgaaagctctgccttgctgatccgaatgtttaacgaaaaggggactctgaaggatctcatttacaaagccaaacctaaggatccattcctaaagaagtactgcaatcctaagaaaattcaaggacttgagctgcaacagatcaagacctacgggcggcagatacttgaagttcttaagttccttcatgataaaggattcccatacgggcacctccatgcctctaatgtaatgttagatggcgatacttgccgactgctggacctcgaaaacagtctcctgggcctaccctcgttctaccggagctacttttcacaattccggaagatcaacacccttgagtccgtggatgtgcattgctttggccatcttctctacgaaatgacctacggaagacccccagactccgtgcctgtggactctttcccaccagctccatctatggctgtagtggcagtgctagaatcaactctgagttgcgaggcttgcaagaacggcatgccaaccatctcacgcctgcttcagatgcccttattcagtgacgtactcctcaccacatctgagaagcctcagtttaagattcctaccaagttgaaagaagcgctgcgtatcgctaaagaatgcattgagaagcggttgatagaagagcagaaacagattcatcaacatcgtaggctgaccagagcccagtcacaccacggttcagaggaagaacgcaaaaaaagaaaaatcctggcgcgaaaaaaatcaaaacggtcagccttggagaacagtgaggagcattccgcgaagtatagcaattccaacaactcggcagggtcaggagcctcttcgcctctgacttccccctccagccctactcccccctccacgtcagggatatctgctcttcctccaccccccccaccaccaccacctccagcagctccgctaccgccagcatccaccgaagcgccagcacagctgtccagtcaggcagtgaacgggatgagtcggggcgccctgctgtctagcatccaaaattttcagaaaggaactctccgtaaagcaaagacctgtgatcactccgcacccaagataggctag

SEQ ID NO: 131299 - DNA, 1737 bp, synthetic construct
  misc_feature 1..1737: note = Description of Artificial Sequence: Synthetic coding sequence
  source 1..1737: mol_type = other DNA
atggctttcatggaaaagccaccggctggcaaggtgctgttggatgacactgtgcctctgaccgcagccatagaagcatcacagtcgttgcagagtcatacagagtacatcattagagtgcaacgaggaataagcgtggaaaatagctggcaaatcgtccgtcgctacagcgactttgatctgctgaacaattctctccagatcgcaggcctctctctcccactcccaccgaaaaagctcattggaaatatggacagagagtttatcgctgagcggcagaaaggcctccagaactatttgaacgtcataactaccaaccacattcttagcaattgcgagttggtaaagaagttcttagatcccaacaattactcagccaattacaccgagatcgcactgcagcaggtttctatgttttttagatcagagcccaaatgggaagttgtcgagccactgaaagatatcggctggcgcatcagaaagaagtactttctcatgaaaattaagaaccagccaaaagagcgtttggtgttatcctgggctgacctcggaccagacaaatacctgagcgacaaagattttcagtgcctcattaagttactgccaagctgtttacacccctacatatatagagtcaccttcgctaccgccaatgaaagctcagcgttattgattcgcatgtttaacgaaaaagggaccttgaaagacctgatctacaaggctaagcctaaggacccgtttttgaaaaagtactgtaaccccaaaaagattcagggccttgagcttcagcaaattaagacctatggaagacaaatcctggaggtgttaaagttcctccacgacaaggggttcccctatggacatctgcacgccagcaacgtcatgctggacggggacacctgtagactgctggacctagagaactcccttctgggcctccctagcttctaccggagctattttagccagtttagaaagattaacaccctggaatctgttgacgtccattgttttggacacctgctttatgagatgacctatggcaggcccccagattccgttccggtggactcatttcccccggctccttccatggccgtggttgctgtgctcgagagcacgctctcctgcgaggcatgcaagaatggcatgccgacaatctccagattgcttcagatgccacttttctccgatgtcctcctgactacaagcgagaagccccagtttaaaatccccacgaagcttaaggaagcactccgcatagccaaggaatgcattgaaaaaaggctgattgaagagcagaaacagatacaccagcataggcggttgactagagcacaatctcatcacgggtccgaagaggagcggaagaagagaaagattttggctcgcaagaagtccaagcgaagcgccctggaaaactccgaggagcattccgccaagtattcgaactcaaataatagtgctggctctggggcttcaagccccctgacttcaccgtcttctccaactccacccagcacttctggcatttccgccctgcctccgccaccgccccctccaccacctcctgccgctccattaccgccagcatcaacagaagccccagcccagctctcctctcaggcagtgaacgggatgtccagaggtgcccttctgagctctattcagaacttccaaaaaggcaccctgcggaaagccaagacctgcgatcactcggctccaaagatcggatag

SEQ ID NO: 131300 - DNA, 1638 bp, synthetic construct
  misc_feature 1..1638: note = Description of Artificial Sequence: Synthetic coding sequence
  source 1..1638: mol_type = other DNA
atggcctttatggagaagccccccgcaggaaaggtcctgctagacgacacagtgccactcacagcagctattgaggcgagccagagcctccagagtcacaccattgcgggactgtccttgcccctgccacctaagaagctgatcggcaatatggacagagaatttattgctgagcggcagaagggcctccaaaattatcttaacgtgatcaccactaaccacatactgagcaactgtgaactggtgaagaagttcctcgacccaaacaattattctgcaaactatacggagatagccctccagcaggtctcaatgttctttcgtagcgagccgaaatgggaggtagtggagcctctcaaagacatagggtggaggatcagaaagaaatacttcctgatgaagattaaaaatcagcccaaagagcgacttgtcctgtcttgggcggacctgggacccgacaaatacctgtcagacaaggatttccagtgtttaataaaactactcccctcttgtcttcacccatacatctaccgcgttacgttcgcaaccgctaacgagagtagcgcactattaatcagaatgtttaacgagaagggtacactgaaagatctgatttataaagccaaacccaaggacccattcttgaagaagtactgtaatccaaagaagatccagggactggaacttcagcaaatcaagacctatgggcgccagattttggaagtgcttaaatttttgcatgataaggggttcccctacggtcatctccatgcttcgaatgttatgctcgacggcgacacatgtaggttgctggaccttgaaaatagccttcttgggctgccctcattctaccgctcctacttcagccagttccggaaaatcaacaccctcgagtcagtggacgtgcactgctttgggcacctcctgtatgagatgacttatggccgacccccggattccgtccctgtagacagcttccccccagctcctagcatggccgttgtggccgtacttgaatcaaccctatcttgcgaggcctgcaagaatggcatgcccacgatctctcgcctgctgcagatgcccctgtttagcgacgtgttactgacaacaagcgaaaaaccacagttcaagatccctactaaactcaaagaagcccttagaatcgcaaaggaatgtatagagaagagactgatcgaggagcagaagcagattcaccagcatcgacgacttacccgggcacagtctcaccacggctcagaggaagaacgcaaaaagagaaagatccttgcaagaaagaaatcgaagcgttctgccctcgagaactccgaagaacactccgccaaatattcgaactctaacaatagcgccggttctggtgcttccagtccattgacaagcccttcttcccctactccaccctccacctccggcatatcagcactcccaccgccccccccacctccccctccgccagctgccccattgccccctgctagtactgaagctcctgcccaactgtcctcacaggccgtcaacgggatgtcccgcggagctctccttagcagcattcagaacttccaaaaaggcactttgaggaaagccaagacgtgcgatcactctgctcccaagattggatag

SEQ ID NO: 131301 - DNA, 1548 bp, synthetic construct
  misc_feature 1..1548: note = Description of Artificial Sequence: Synthetic coding sequence
  source 1..1548: mol_type = other DNA
atggctttcatggagaagcccccagcggggaaagtcctgctggacgacacggtgccactgactgccgcaatcgaggcctcccagagcttacagtcccatactgaatacatcattcgcgttcagcgtggaattagtgtggaaaactcatggcagattgttcgccgatattccgatttcgacctgttgaataacagtctccagatcgcaggtctgtccctccctctgccacccaagaagctaatcggaaacatggaccgggagtttattgccgagagacaaaaaggcctgcagaattacctgaacgtgatcaccacaaaccacatactttccaattgtgagctggttaagaaattcttggatccaaacaattactctgcaaattatacagaaatcgccctgcagcaggtcagcatgttttttcgaagtgagcccaagtgggaagtggtggaaccactgaaagatattggttggcgcatccggaaaaagtattttttgatgaagatcaaaaaccagcccaaggagagactggttctcagctgggccgaccttgggcccgataagtatctctccgacaaagattttcaatgtttgatcaagctcctcccctcttgtctgcacccctacatctaccgggtgacatttgctaccgcaaatgagagttctgccttgttaatccgcatgttcaacgagaagggcacactgaaagatctaatttataaggcaaagccaaaagatccttttttgaaaaaatattgtaaccccaagaagattcagggtctggagttgcagcaaataaagacgtacggaagacaaatattggaagtgctgaagttcctacacgataaaggctttccctatggtcacctgcacgcctctaatgtgatgctggatggagacacctgccgcctgctcgacctggaaaactctttgcttgggctcccaagtttctataggtcatatttcagccagttccgtaagatcaacacactagagtccgttgacgtgcattgcttcgggcacctgttgtacgaaatgacctacggccgcccgcctgacagtgttccagtggatagcttccctcccgcacctagtatggctgtggtagctgtcctggaaagcacgctgagttgtgaagcttgtaagaatggcatgcccaccattagcaggctcctccagatgcctttgttttcggatgtgttgctcacaacgtcagaaaaacctcagtttaagataccaactaagctgaaagaggctcttcgaattgcaaaagagtgcatcgaaaaacgtctgatagaggaacagaagcaaatccaccaacacaggcgccttacgagggctcagtcgcaccatgggagcgaagaagagcgaaagaagaggaagatcctcgcaaggaagaaatccaagcgcagcgctctggagaactccgaggaacactctgccaaatattccaactcaaacaattcagctgggtccggcgcttcttcacctcttacctcgccttcctcgcccacgcctccgagcacctccgttgagcacgcacccttttag

SEQ ID NO: 131302 - DNA, 1326 bp, synthetic construct
  misc_feature 1..1326: note = Description of Artificial Sequence: Synthetic coding sequence
  source 1..1326: mol_type = other DNA
atgttcttccgctccgagccgaaatgggaggtcgtggagccactgaaggacatcgggtggaggattcgcaaaaagtactttcttatgaagatcaagaaccagccgaaagaacgcttggtcctcagttgggctgacttaggcccagacaaatatttgtctgacaaagattttcagtgtctaatcaagcttttaccaagctgcctccacccatacatttatcgggtgaccttcgctacggcaaacgaatctagcgctctgttaatcagaatgttcaatgagaaaggcactctgaaggacctcatctacaaagctaaaccaaaggaccccttcctgaaaaagtactgtaaccccaagaaaatccagggcctcgagctacagcagattaagacgtatggccgccaaattcttgaggttttaaagtttctgcacgacaagggcttcccctatggccacctccacgctagcaatgtgatgctggatggcgacacatgtcgacttctggatttagagaactctctgcttgggctgccgagtttctaccggtcttacttttcgcagtttcgcaagatcaacaccctcgaatctgtggacgtacactgttttgggcacctgctgtacgagatgacgtacgggcgaccccccgactcagtgccagttgacagctttccgccagctccgagtatggctgtggtggctgttttggagtccacactgagttgcgaagcctgcaaaaatggcatgcccactatttcaagactgctgcagatgcctctgttctcggatgtgctcctgactacttcggagaaaccgcagttcaagattccaacgaagctgaaagaggcccttcgcatagccaaagaatgcatagagaaaagactcattgaagagcagaagcagatccatcagcatcggaggcttactagagcccagagccaccatggctccgaagaagaacgaaaaaagcgcaaaatcctagcgcgcaagaagtcaaagcgcagcgccctagagaactccgaagaacattcagccaagtactccaacagtaataattccgctggctccggggcttcctctcctctcacatctcccagctcccctacaccgccgtctaccagcggtatcagcgccctgcccccccctcccccacctcctccccctccagccgctcctctgccacctgcatccaccgaagctcccgcacagttgtctagccaggcagtgaatggtatgtctcgcggggcactactatcctctatccagaacttccagaagggcaccctcaggaaagcaaagacatgtgaccatagtgccccaaaaatagggtag

SEQ ID NO: 131303 - DNA, 1005 bp, synthetic construct
  misc_feature 1..1005: note = Description of Artificial Sequence: Synthetic coding sequence
  source 1..1005: mol_type = other DNA
atgtttttcaggtctgaaccaaagtgggaggtggttgagcctctcaaggacatcggctggagaatacggaaaaaatatttcctgatgaaaataaaaaaccaacctaaggagagactggttctttcatgggctgacctaggaccggacaaatacctctccgacaaggacttccaatgtctgataaaactgctgccttcatgccttcacccctatatctacagggtgactttcgcaaccgctaatgagtcctctgcgttgctgataaggatgttcaatgagaaaggaactctcaaggacctgatctataaggcaaagccaaaagatcccttcctgaagaagtactgcaatcctaagaaaatccagggtctagagcttcagcagatcaaaacctatggccgtcagatccttgaggttctgaaattcctgcacgacaaaggcttcccgtacggtcacctacacgctagtaacgtgatgcttgacggcgacacatgtagactcctcgacctggaaaattctctgctaggactgccttctttctatcgatcttatttctcacagttccgtaagataaacactcttgaatccgttgatgtccactgttttggacatctactgtatgagatgacttatggaagaccgcccgattcagttcctgtggactccttccccccggccccatcaatggctgtggtggccgttctagagtcaacactcagttgtgaggcgtgcaagaatgggatgccaacgatttctagactgctccagatgcctctgttcagcgatgtgctgctgaccacgtccgagaaaccacagttcaaaatccccactaaactgaaagaggcgcttaggatcgcaaaagagtgcatcgaaaaaaggctgatcgaagagcagaagcagatccaccaacatcggaggctgacccgagcacaaagtcatcacggctcggaagaggagcgcaagaaaaaagatttcagcagcaaggaagtgaagacaatttgctcctag

SEQ ID NO: 131304 - DNA, 1110 bp, synthetic construct
  misc_feature 1..1110: note = Description of Artificial Sequence: Synthetic coding sequence
  source 1..1110: mol_type = other DNA
atgaaatcccctgaaaagaagcggcggaagagtaacacacagggacccgcctattcacacctgaccgagtttgctccacctcccaccccaatggtggatcacttggtagcatcaaacccatttgaagatgattttggggccccgaaagtgggagtagccgctccaccattcctcggctcccctgtgccattcggcgggttcagagtgcagggaggcatggcagggcaggtcccccctggctacagtacaggtggcggcggcgggccccagcctctgcgccggcagccacctccattccctccgaatcccatggggcccgccttcaatatgcctccacagggtccaggctacccccccccaggtaacatgaatttcccaagtcaacccttcaaccaaccattagggcaaaacttcagtcctccatctggccagatgatgcccgggcccgtaggcgggttcgggcccatgatatctcccactatgggccagccccccagagctgagttggggccccccagcttgtcccagcgctttgcccagccaggagccccatttgggccttccccgctgcagcgaccaggtcaaggactgcctagcctgccacctaacacatcaccctttcctgggccggatcccgggttcccaggccccggaggcgaggacgggggtaagcccttgaatccccccgcatctacagccttcccccaggagccacacagcggctctccggcagctgcggtgaatggcaatcagccaagcttcccccccaactcttccggtcggggcggcgggacaccagatgctaattctttggcacctcctggcaaggccggcggcggatccggaccccagcctcccccgggactagtgtacccctgtggtgcttgccgttccgaggtgaacgacgaccaggacgccattctgtgtgaggcttcatgccaaaaatggttccaccgcgagtgtacgggcatgactgagagcgcttatggattactgaccactgaagcctcagctgtgtgggcttgcgacctgtgtctaaagacaaaggagatccagtcagtgtatattcgtgagggaatggggcagcttgtcgctgccaacgacggctag

SEQ ID NO: 131305 - DNA, 1221 bp, synthetic construct
  misc_feature 1..1221: note = Description of Artificial Sequence: Synthetic coding sequence
  source 1..1221: mol_type = other DNA
atggccgcttctgcacctccaccacccgacaagctggaaggcggcggtggccctgccccaccacctgctccaccttccacaggacggaagcagggcaaggcaggcctgcagatgaaaagccccgagaagaaaaggaggaaaagcaacacacaggggcctgcttatagtcacctgacggagtttgcgcccccccccaccccaatggttgatcatcttgtcgcctctaacccctttgaggatgacttcggggctcctaaggtcggcgtggcagcaccaccctttctgggatccccagtcccgttcgggggattccgcgttcagggcggcatggcgggacaggtgccaccgggctactctacaggaggtggaggaggaccccaacctctacggcgccagccccctccatttcctcccaaccctatgggaccagccttcaatatgccacctcagggcccaggctatccgccccccggcaatatgaatttcccatcccagcccttcaaccaacctttggggcaaaacttctctccgcctagcggccaaatgatgcccggtccggtggggggatttgggcccatgattagccccacgatgggacagccccctagagccgagctgggcccaccttcactaagccaacggtttgcacagcccggcgcaccgttcggtccctcacccctccagaggccgggccaagggcttccttcgctcccacctaacacctcgccctttcccggcccagacccagggtttccggggcccgggggggaggatggcggtaagccgttgaacccccctgctagtaccgcctttccgcaggagccccacagcggtagtcctgccgctgccgtcaatgggaatcagcccagctttcctcctaactcttccgggagaggcggaggaacgccggatgcaaatagcctggctcccccggggaaagccggaggaggatcggggccccagccaccccctggcttagtctacccttgcggcgcctgtcgaagtgaggttaacgacgatcaagacgccattttgtgtgaagcctcctgtcagaagtggttccatagagaatgcactggtatgacggaatcagcctacggccttctgacgacggaagccagcgcagtctgggcctgtgatttgtgcctgaagactaaagagatccagagtgtctacattagagaggggatgggacagctcgtggctgccaacgacggttag

SEQ ID NO: 131306 - DNA, 939 bp, synthetic construct
  misc_feature 1..939: note = Description of Artificial Sequence: Synthetic coding sequence
  source 1..939: mol_type = other DNA
atggaagaggaatgcagggttctgtccattcagtcacatgtgataagaggctacgtcggtaaccgcgcggccaccttccctctccaagtgctcgggtttgaaattgatgccgtgaatagcgtccaattcagcaatcacaccgggtacgcacattggaagggccaggtgcttaatagcgacgagctccaggagctgtatgaaggtcttaggcttaacaacatgaacaaatatgactatgtcctcacaggttatactagagacaagagctttttggccatggtggtggacatagtgcaggaattgaagcaacagaatcctaggcttgtgtacgtgtgcgaccccgtgctgggcgacaagtgggatggagagggatccatgtacgtgcctgaagacttgctccctgtgtacaaagagaaagtcgtccccctggctgatataattacacccaatcagttcgaggcggagctcctgtctggccgtaagattcacagccaagaggaggcgctaagggttatggatatgctccactctatgggccccgataccgttgttattacttcaagcgatctgccaagccctcaaggaagcaattatctcatcgttcttggttcgcagcggcgcaggaacccggccggaagcgtggttatggaacggatcaggatggatatacggaaagtcgacgccgtgttcgtagggactggtgacctgttcgctgccatgcttctcgcttggacccacaagcaccccaataatttaaaggtggcttgcgagaaaaccgtgtcaactctgcatcatgtgctgcagcggacaattcaatgcgcgaaggcccaggccggcgagggcgttagaccgagtccaatgcagcttgaactgcgtatggtgcagagcaagcgagatattgaagaccctgaaatcgtagtgcaggcaaccgttctgtag

SEQ ID NO: 131307 - DNA, 855 bp, synthetic construct
  misc_feature 1..855: note = Description of Artificial Sequence: Synthetic coding sequence
  source 1..855: mol_type = other DNA
atggaggaggaatgtcgcgtgctgtcaatacagtcccacgtcatccgaggctatgtgggaaaccgcgcggccactttccctctacaggtgctgggctttgagatcgatgccgtgaactctgttcagttttcaaaccacaccggatacgctcattggaagggccaggtgttgaactccgatgagctgcaggaactgtatgaggggcttcggttgaacaatatgaataagtatgactacgtcttgaccgtgtgcgaccctgtgctcggggacaagtgggatggtgaagggtctatgtatgtcccagaggacttgctgccagtctacaaggagaaggtggttccgttggccgacatcatcaccccaaatcagttcgaggcagagctgctgagcggtcgaaagatccacagccaggaagaagctctgcgtgtgatggacatgctgcactcaatgggtccggacaccgtggtgattacttcaagcgacctgccatcccctcagggttcaaactatctgatcgttctaggttcccaacgaagacggaaccccgccgggagcgtggtgatggagcggataagaatggatattcgcaaagtcgacgcggtattcgtgggaaccggagacttgttcgcagcgatgctcttagcttggacccacaagcacccaaataacctgaaagttgcttgcgagaagacagtgtcaactctgcatcacgtcctgcagaggacgatacagtgtgcgaaagcccaggcaggtgaaggcgtgagaccctcaccgatgcaactggaactcaggatggtgcaatctaagcgagatatagaggatccagaaatcgtagtgcaggcgacagtcctgtag

SEQ ID NO: 131308 - DNA, 2322 bp, synthetic construct
  misc_feature 1..2322: note = Description of Artificial Sequence: Synthetic coding sequence
  source 1..2322: mol_type = other DNA
atgggcaagaaccttaaagaagcggtcaaaatgttggaggattcccagcgcaggactgaggaggaaaatggtaagaaactaatttctggtgacatccctggacccctgcaggggtcaggccaagatatggtctcaatcctgcagctagtgcaaaacttgatgcacggcgatgaagatgaagagccccagagtccccggatccagaatatcggagaacaggggcacatggccctccttggtcactccctgggggcttacattagcacattggacaaggaaaagttgagaaaactcactacaaggatattatccgataccacgttatggctctgtcgcatcttcaggtatgagaacggttgcgcctatttccacgaggaggagagggaagggctcgctaagatttgtcggctggccatccactcccgctacgaggactttgtggtggacgggttcaatgtgctgtataacaaaaagccagtgatttatttatctgccgccgcacgccccggactgggccagtatctttgcaaccagctggggctgccattcccctgcctgtgccgggtgccctgcaacactgtgtttggcagccagcaccaaatggatgtggccttccttgagaaattgattaaggacgacattgaacgtgggcgcctgccactcctgctggtggccaatgctgggactgccgctgtgggacacacagacaagataggcagattaaaagagctgtgtgaacaatacggcatctggctgcatgtagagggagtcaatctggcaactctggccctcggatatgtttcaagcagtgtcctggctgcggcgaaatgtgatagtatgaccatgacacctgggccctggctgggactccccgctgttcctgcagtaaccctgtataaacacgacgatccagccctgactttagttgcagggctgacttcgaacaaacccactgataagctgagggccctgccactgtggctgtccttgcagtacctgggccttgatgggtttgtcgaaaggatcaagcacgcctgccagctgagtcagcgattgcaggaaagcctgaaaaaggttaattatattaaaattctagtcgaggatgaactgtctagcccagtcgtcgtgtttcgattttttcaggaactgcccggctcggacccagtgttcaaagcagtgcccgtccccaacatgactcccagcggggttggacgggagcgccattcatgcgatgcgctcaaccggtggctgggcgaacaactcaagcagttagttcctgctagtggtctaactgtaatggaccttgaggctgaggggacttgtctgcgttttagtccgctgatgacggccgcagttcttggaacccgtggcgaggatgtcgaccagctggtcgcctgcatcgagagtaagctgcccgtgctgtgttgcaccctacagctccgagaggaatttaagcaagaggtcgaagcaaccgcgggcctcctgtatgtcgacgatccaaactggtctggaatcggcgtggtgaggtatgagcatgcgaacgacgataagagcagcctgaagtccgacccggagggggagaacatccacgccgggctcttgaagaagctgaatgagcttgagtcagatttaaccttcaagatcggccctgagtataaaagcatgaaatcgtgcctttacgtgggtatggcatccgacaatgtggatgcagcggaacttgtagagaccatcgctgcaaccgcccgagagattgaagaaaattcgagattgttagagaatatgacggaggtggtaaggaaggggatccaagaagctcaggtggagcttcaaaaagctagtgaggaacgcctccttgaagagggagtactccggcagattccagtggtgggaagtgtgctgaactggttcagccctgtacaggcactgcaaaagggtaggactttcaatttgactgcagggagcctggaatctacagaacccatctacgtctataaagctcagggcgccggagtaaccttgccacccacccccagcgggtcccggaccaagcagcgcctgccaggccaaaaaccatttaagcgatccctgcgaggttctgatgccctgtctgagacctcatccgtttcccatattgaagacttggaaaaggtggagaggctgagtagtggacctgaacagattacactcgaggcctccagcacggaggggcatccaggagcaccttctccacagcacacagatcagacagaggcttttcagaagggcgtgcctcatcctgaagacgaccatagtcaagtcgaagggcccgaaagcctccgctag

SEQ ID NO: 131309 - DNA, 2367 bp, synthetic construct
  misc_feature 1..2367: note = Description of Artificial Sequence: Synthetic coding sequence
  source 1..2367: mol_type = other DNA
atggatgcgtccttagaaaaaatcgccgaccctacactggcggagatgggcaaaaacctcaaggaggctgttaaaatgttggaagactcacagagacgaactgaagaggaaaacggcaaaaagctgatttccggagacattccaggccccttacagggctcaggacaggacatggtaagtatcttgcagcttgtgcagaacctgatgcacggggatgaagacgaggaaccgcagtcccctcgtatccagaatattggagaacagggtcacatggctctgctggggcactcactcggcgcatacattagcacactggataaagaaaagctgcggaaacttactaccaggattctgtcagacacaactctgtggctttgcagaatcttcaggtatgagaacggctgcgcctacttccacgaagaggagcgagagggcctcgccaaaatctgtaggcttgccattcacagtcggtatgaagactttgtcgtggacggatttaatgtcctctataacaagaagcccgtgatatatctcagcgccgccgccaggcccggactggggcaatacctctgcaaccaattgggcctaccctttccttgtctgtgcagggttccttgcaacaccgtttttggtagccagcaccaaatggacgtggccttcctggaaaagcttatcaaggatgacattgaacgcggccgcttacctctgcttctcgtggctaacgccggcaccgctgcggtcggtcacacagacaagataggaagactgaaagagttgtgtgaacagtatggtatatggctgcacgtggaaggagtgaatctcgccacactggccctcgggtacgtctcatcgtctgtgttagccgcagcaaaatgtgatagtatgaccatgactcctggtccctggctggggctgcccgcggtccctgcggtgactttgtataaacacgatgacccagccctgactctggtagctggcctgacgagtaacaaacccacggataaattaagagccttacccctctggctgtctctacaatacctcggcctggacggctttgtggagagaattaagcacgcttgtcagctcagccagaggctgcaagagagcctgaaaaaggttaactatataaaaatccttgtggaggacgagttgagctcccccgtagtggtctttagattttttcaggagctgcccggcagcgatcccgtgttcaaggctgtgcccgtgccaaatatgacccccagcggcgtgggcagagagagacatagttgtgacgcactcaaccggtggctaggggagcagctcaaacagctggtccctgctagtggactgactgtgatggatctggaggctgagggaacctgtttgagattcagcccgcttatgaccgcggccgtgctgggaacacgcggcgaagacgtggaccagctggtagcttgtatcgagagcaaactcccggtgctctgctgtaccctgcaactgcgtgaggagtttaaacaggaggtggaagccactgcaggccttctatatgtcgacgatcccaattggtccgggataggtgtggtgcggtacgaacatgccaacgacgacaaatcttctctcaaaagcgaccctgagggagaaaatatacacgctggactgttgaagaagcttaatgagcttgaatccgatcttaccttcaagattgggcctgagtataagtctatgaaatcttgcctctacgtgggcatggcctctgataacgtcgacgctgctgaattggtcgagacgatagcagctactgcaagggaaatagaagagaattcaagactgctggagaatatgacagaggtggtcagaaaaggtattcaggaggcccaagtcgaactgcagaaagcgagcgaagagagactgcttgaagagggcgtcctgcgacaaatcccagtcgttggctctgtccttaactggtttagccccgtgcaggccctccaaaagggaaggacttttaatctgaccgccgggagcttggagtccacagaacccatttacgtctataaggcccaaggcgcaggtgtgacactacctcccacaccttcagggagtaggacaaaacagcggttacccggacaaaagccttttaaaagatcactgcgcggcagcgatgccctgagcgagacatcaagcgtgagtcacatcgaggatctggaaaaggtcgaaagactaagctctggtccggagcagattacactggaggcttcatccacggaagggcatcccggcgctccctccccacagcatactgaccaaactgaagcttttcaaaagggggttccacaccccgaggatgaccatagccaagtggagggaccagaatctcttcgctag

SEQ ID NO: 131310 - DNA, 2094 bp, synthetic construct
  misc_feature 1..2094: note = Description of Artificial Sequence: Synthetic coding sequence
  source 1..2094: mol_type = other DNA
atgggcaaaaatcttaaagaggcggtgaagatgctcgaagattcgcagcgtcgcaccgaggaagagaatggcaagaagctcatctccggagatatccccggcccacttcaagggagatacgaaaatggctgcgcctattttcacgaggaagagcgcgagggccttgcgaagatttgccggttagcaattcactcacggtatgaagattttgttgtggatgggttcaatgtgctgtacaataagaagccagtcatttacctttccgcagccgcaaggcctggcttaggccagtatttgtgcaaccagctcgggctcccttttccttgtctttgtcgcgtaccctgcaatacagtgtttgggagtcagcaccaaatggacgtggcatttttagagaagctgatcaaggacgatatagagcgcgggagattgcctctgctgctggttgcaaacgctggcacagcagccgttggacacacagacaaaattgggaggcttaaagagctgtgtgaacagtatggcatctggctgcatgttgagggcgtaaaccttgccactctggccttgggatatgttagttcttcagtgctggccgccgctaagtgcgacagtatgactatgacccctggtccgtggctgggcctgcccgctgtgcctgccgttactttgtacaaacatgatgacccagcactgaccctggtggcggggctgacatcaaataagcctacggataagctgagggccctgcctctctggctgtcgctgcagtaccttggcttggatggctttgtcgagcggatcaagcacgcatgtcagctctctcagagattacaggagtccctgaaaaaagtcaattatatcaaaatcttggtggaggatgagctgagcagcccggtggtggtgtttcgcttctttcaagaactgcctgggtccgaccctgtgttcaaggcagtccctgtgcctaatatgaccccctcaggcgtggggcgagaaagacactcatgtgacgccttaaaccggtggctgggggagcagttgaagcaattggtacctgcctccggcctcacagttatggatctggaagcggaagggacctgcctgcgctttagccccctgatgaccgcagctgtgttgggcacaagaggcgaggacgtggaccagctggtggcctgtatagagagcaaactccctgttctgtgctgtacgctacaattgagagaggaattcaaacaggaagtggaggctaccgcgggattgctgtacgtcgatgatcccaattggtcaggaattggcgtggtccggtatgaacacgctaatgacgataaatcgtccctcaagagcgacccagagggtgaaaatatccacgctggactgttgaagaaactaaatgaactcgaaagcgaccttacctttaagatcggccccgagtacaagtctatgaagtcttgcctgtacgtgggcatggcttctgataacgtggatgcagccgaattagtggagaccatagctgccaccgccagagagatcgaggaaaactctaggctcttggagaacatgacggaagttgtgcggaagggcatccaggaggcacaggtcgaattgcagaaggccagcgaggagagactccttgaggagggcgttctgcggcagatacctgtcgtcggttcagttctcaattggttttctcccgttcaggcgttgcagaaagggcggacttttaacctgaccgcaggctccttagagagcaccgagccaatatatgtgtataaggcacagggggccggggttaccttgcccccgacccctagcggaagccgaacaaaacagaggctgccagggcaaaaacctttcaaaaggagccttcgtggctcagacgccctttctgagacctcaagcgtctctcacatagaggatctggaaaaagtggagagactttcttctggaccagagcagattacccttgaagcctcctcaacagaagggcacccgggcgctccttcgccgcagcacacagaccagaccgaggcctttcagaaaggcgttccacatcccgaggacgatcacagccaggtggaaggccctgaatccctgagatag

SEQ ID NO: 131311 - DNA, 2283 bp, synthetic construct
  misc_feature 1..2283: note = Description of Artificial Sequence: Synthetic coding sequence
  source 1..2283: mol_type = other DNA
atggacgcaagcctggagaaaattgccgatcctactctggctgagatggggaaaaacctgaaggaggcagtgaagatgctggaagatagccagcgcaccgaagaggagaatggtaaaaaactgatctccggcgatatccccgggccgctccagggccgcattcagaatatcggcgaacaagggcacatggccctcctgggccacagtttgggcgcttacatatctaccctggataaagaaaaactccggaaattgaccacccggatcctgtccgacactaccctgtggctttgccgcattttccggtacgagaacgggtgcgcttactttcacgaagaggagagggaggggctcgcgaaaatctgtcggctggctattcactcgcgctacgaagatttcgtcgttgatgggtttaacgtcctctataacaagaaaccggtcatttacttgtcagccgcggcacgtccgggactcggacagtatctgtgcaaccaacttgggctgcctttcccgtgtctgtgccgggtgccttgtaacacagtatttgggtcccaacatcagatggacgtggcctttttggaaaaacttatcaaggacgacattgagcggggaaggctgccgctcctccttgttgcaaacgctgggacagcggcggtaggacatactgataaaatcggccgactgaaagaattatgtgagcagtacggaatttggttgcatgtcgagggtgtaaacttggctaccttagcattgggatacgtgtccagttctgtgctcgccgccgccaagtgcgactcaatgactatgacccctgggccttggttgggtctccccgccgttccagcagtcactctatataagcatgacgatccagcgttaacgctggttgccggacttaccagtaataagcccacagacaaactacgggctctgcctctttggttatcccttcaatacctgggcttggatggattcgttgagcgaattaagcacgcctgccagctctcccagcggttgcaggagagtctgaaaaaggtgaattacattaaaattcttgttgaagacgaactgagcagcccggtggttgtgttccggttctttcaggagcttcctggaagcgaccccgtgtttaaggcagtgcctgtacccaacatgacaccctccggggttggcagagagaggcactcatgcgacgcactgaatagatggttgggagaacagctcaagcagttggtgccagccagcggactcactgttatggatctagaagcagagggcacctgcctgcggtttagtcccctcatgacagcagctgtactgggcacgcggggcgaagacgtcgatcagttggtagcctgcatcgagagtaagctgccagtcttatgctgcacactccagctgcgtgaggaatttaagcaagaggtggaagccaccgccggtctgctgtatgtggatgaccccaattggtctggcataggagtcgtgcggtacgagcacgctaacgacgacaagagctcgctgaaaagcgaccctgagggagagaacatccacgctggtctacttaaaaagctgaatgaactagaatctgatttaaccttcaagattggccccgaatacaagagtatgaagtcatgtctttacgttggtatggctagtgacaatgtggacgctgccgagctcgtcgagacaatagcggccacagccagagaaattgaggaaaactccagactcttggaaaacatgacggaggtggtacggaaaggtatccaagaggcacaggtggagcttcagaaagcatcagaggagagattgctggaggagggcgtcctaagacaaatacctgtggtggggtcagttctgaactggttttctcccgttcaggctctgcagaaagggaggaccttcaatttgactgcgggatctttggaatcaaccgaacctatctatgtatataaggcacagggggccggggtgactcttccacccacccccagtgggagtagaacaaagcaacgcctaccgggacagaagccgttcaagcgatccctcagaggcagcgacgcactcagcgaaacttcctctgtgagtcatatagaggacctagaaaaagtggagaggttgagcagcggtcctgaacaaatcacgttagaggcatcttccaccgaaggccaccccggagcgccgtccccgcaacatacagatcagacggaagctttccagaaaggagttccccacccggaagacgaccacagtcaagtggaaggccccgagtctctcagatag

SEQ ID NO: 131312 - DNA, 1290 bp, synthetic construct
  misc_feature 1..1290: note = Description of Artificial Sequence: Synthetic coding sequence
  source 1..1290: mol_type = other DNA
ctgtcctccacactgagacggatagcggatcccaccctagcagaaatggggaaaaacctgaaggaggctgtcaagatgctggaagactcgcagcggcgcactgaagaagagaacggcaagaagctcattagcggagatattccaggccctctgcaggggagcggtcaagacatggtcagtatcctgcaactcgtgcagaacctaatgcacggcgatgaggacgaggagcctcagagtccacggattcagaacattggcgagcaggggcatatggctctgctcggccacagcctcggagcttatataagcactctggataaggaaaagctaagaaagctcacaacacgtattctctcagacactacactctggctctgtcgaatctttaggtatgagaacggttgtgcatactttcatgaagaagagagggaaggcctcgccaaaatctgtcgcctggccatccacagtcgatacgaggactttgttgtggatggatttaacgtgctttataacaaaaaacccgtcatttatctgtctgctgcggcccgcccgggcctcggccagtatctgtgtaaccaggacgtggctttcttagagaagctgatcaaagacgatatcgagcggggccggctgcctctactcctggtcgctaatgcaggtaccgccgctgtcggccatactgataaaatcggtagattgaaggagttgtgcgaacaatacggaatttggctccatgtcgagggggtgaatcttgcaaccctcgcactggggtacgtgtccagcagcgtgctcgccgcggccaagtgcgatagcatgactatgactccgggcccatggctgggcctgccagctgtccctgctgtgactctgtacaagcacgacgacccagccttaaccctggtcgccgggcttacctctaataaacccactgataaacttagggcgttgccactctggctctcactccagtatcttggactggatggattcgttgaacgcatcaagcatgcctgccagctcagccagcgtcttcaggaaagcctgaaaaaggtcaattatatcaagatcttagtcgaggatgaattgagctctccggtggttgtttttcgattcttccaggagctacctggctccgatccggtttttaaagctgtgcctgtacccaacatgacaccctccggagtgggacgggaacgacactcctgcgatgccctgaacagatgggtaaggatggccgtgactcccctaagctttcaggtcccagtgcaccaccaccctacatgttggtag

SEQ ID NO: 131313 - DNA, 1497 bp, synthetic construct
  misc_feature 1..1497: note = Description of Artificial Sequence: Synthetic coding sequence
  source 1..1497: mol_type = other DNA
atggacgcctccctggagaaaatcgcagatccaaccctcgccgagatgggcaaaaatttaaaagaggccgtgaagatgctggaggactcacagcggaggactgaagaagagaacgggaagaagctgattagcggcgatattcctggacccctccagggcagcggacaggacatggttagtattctgcagctggtgcaaaacctgatgcatggggacgaggatgaagagccccagagtcccagaatccaaaacatcggggaacaggggcacatggctctgcttggtcattcactcggcgcttacatttccacattagacaaggaaaagctgcggaaattgacaacaagaatactcagcgacaccacgctttggttgtgcaggatctttcgctacgaaaacggatgtgcctacttccatgaggaggaaagagagggcctggctaagatctgccgtctggccatccactctcgatatgaagacttcgttgtggatgggttcaatgtgctttacaacaagaaaccagtaatttacctgagcgccgccgccagaccgggtctgggacagtatctgtgtaatcagctgggactgccattcccttgtctgtgtagggtcccttgcaatacggtgtttggaagccaacatcagatggacgtagccttcctggagaagctcattaaggacgacatagagagagggaggctcccactgctgcttgtggccaacgccgggactgcggccgtgggacacacagacaagatcggccgcctaaaagagctttgcgagcagtatgggatttggctgcatgtggagggcgtgaacctggccactctggctctgggatacgtttcatcatccgtgctagccgcggccaaatgtgatagcatgaccatgacgcccggcccatggctcggcctgcccgcagtacctgcagtaacattgtacaagcatgatgatcctgccctgacactggttgctggacttactagtaacaaaccaaccgataaactgagagctctccctttgtggctctctctgcagtatctgggcttggatggcttcgtggagcgaataaaacatgcctgtcagctttcccagcggctccaagaatccctcaaaaaggtgaactatatcaaaattcttgttgaggatgagctcagctcccccgtggtggtcttccgattcttccaggaactcccagggtccgatccagtttttaaggcagtgccggtgcctaacatgactccttccggagttggtcgcgagagacacagctgtgacgcactgaataggtggcttggcgaacagctgaaacagctcgtcccggcatcaggcctgacggtgatggacctcgaggcagagggaacttgcctgaggttctccccactcatgacagccgctggctggagtcactgcggaacaaccacacggtacgactgcgtcaggagccggttaacaacaagattgccgggttccaccggcgaacaagctcccccctag

SEQ ID NO: 131314 - DNA, 615 bp, synthetic construct
  misc_feature 1..615: note = Description of Artificial Sequence: Synthetic coding sequence
  source 1..615: mol_type = other DNA
atgactatgacacctggcccctggctgggcttaccagcagtgccagccgtgaccctgtacaagcatgatgatcctgccttaactcttgtcgccggcctgactagcaataaaccaactgataaactgcgtgctctccccctgtggctgtcactacagtacctgggcctagatggtttcgtggagcgaatcaaacacgcctgtcaactgagccagagactgcaggaatctctgaagaaggtgaactacattaaaatcctggtggaggatgagctttcaagtccagtcgttgtgttcaggttctttcaagagcttccaggtagtgaccccgtcttcaaagctgtccctgtgcccaacatgactccgtccggtgttggccgtgagaggcattcgtgcgacgcactgaacaggtggctgggggagcagctaaagcagctcgttccagcaagtggtctcactgtcatggacctggaggccgaaggtacatgcctgagattcagcccattgatgacggcggccggctggtctcattgcggaaccactaccaggtatgattgcgttcggtccagactgactacaaggctgccaggctctacaggggaacaagcacccccatag

SEQ ID NO: 131315 - DNA, 642 bp, synthetic construct
  misc_feature 1..642: note = Description of Artificial Sequence: Synthetic coding sequence
  source 1..642: mol_type = other DNA
atggatcccctcttccaacaaacacataaacaggtgcacgaaatccagtcctgtatgggccgacttgaaaccgccgacaagcaaagcgttcatatagtcgagaacgaaatacaggctagcatcgaccaaatcttttcacgcctggaacgccttgagatattaagcagcaaggaaccacctaacaagcgacagaacgcacgacttcgcgtcgatcaacttaagtacgacgtgcaacacctccaaactgctctgcggaacttccagcatagaagacatgccagggagcagcaggaacgacaacgtgaggagttactgtcacgcacttttacgactaatgactcggataccactattcccatggatgaaagccttcagttcaatagtagtctgcagaaggttcacaatggcatggatgatcttattcttgacggacataacattctggacgggcttcggacgcagcgcctgacattgaaagggacccagaagaaaatcctcgacattgccaacatgctcggtttgtccaacacagtcatgcggttaattgagaagcgggcattccaagacaagtactttatgatcggaacacagggatcatgccaaactgcccattttggtgggcgatcagcgggttcctcttag

SEQ ID NO: 131316 - DNA, 657 bp, synthetic construct
  misc_feature 1..657: note = Description of Artificial Sequence: Synthetic coding sequence
  source 1..657: mol_type = other DNA
atgacatgctggctgcggggcgtgacagccacttttggaagaccagcagagtggccaggatacctcagtcacctttgcggccgctctgccgcgatggatctgggccccatgcgcaaatcatacaggggagatcgtgaagccttcgaggagacacacctaaccagcctcgatcccgtgaagcaatttgctgcatggtttgaggaggccgtacagtgcccggacattggtgaagcaaacgcaatgtgtttggctacatgcactcgcgatgggaaacctagtgccaggatgttgttgcttaagggattcgggaaagatggatttcggttcttcaccaacttcgaaagccgcaaggggaaggaattggattctaatccgttcgccagcctcgttttctattgggagccgctcaatagacagtacctcaggaaaaaaaacgaggaattagagcaactgtatcaggatcaggaggtgccaaaaccaaaatcttgggggggatatgtactctacccccaggtgatggagttttggcaggggcagacaaatagattgcacgaccgcattgtcttcagaagagggcttccaactggcgacagcccactgggacccatgactcacagaggggaggaggattggttatacgaacggctcgcaccttag

SEQ ID NO: 131317 - DNA, 501 bp, synthetic construct
  misc_feature 1..501: note = Description of Artificial Sequence: Synthetic coding sequence
  source 1..501: mol_type = other DNA
atgctgctgctcaagggctttggtaaggatggcttcagattcttcactaactttgagagccgcaaagggaaagagctggacagtaatccctttgccagcctggtgttctactgggaacctctgaatagacaggtgcgtgtagagggccctgtcaagaaattgccagaggaagaagccgaatgctatttccactcaagaccgaagtcttcacagattggcgccgtagtttctcatcaaagcagcgtgatccctgatcgcgaatatctgcggaagaaaaatgaggagctggagcagctctatcaggaccaagaagtcccgaagcccaaaagttgggggggctacgtgctatacccccaggtgatggagttttggcaggggcaaactaaccgcttgcacgacaggatagtcttcaggagggggctgcccactggcgacagcccgctggggccgatgactcaccgtggagaagaagattggctgtacgagagactggctccctag

SEQ ID NO: 131318 - DNA, 732 bp, synthetic construct
  misc_feature 1..732: note = Description of Artificial Sequence: Synthetic coding sequence
  source 1..732: mol_type = other DNA
atgacctgctggctaaggggggtgaccgccacttttggtcgaccggccgagtggccgggttatcttagccatctgtgcgggagatctgccgcaatggatttagggccaatgcgcaagagctataggggcgacagggaagcttttgaggagacccatttgacgtcccttgatcccgtcaagcaattcgctgcttggttcgaggaggctgtccaatgtccagacatcggcgaagcgaatgcaatgtgccttgctacctgtaccagggacgggaaaccctcagcacgcatgctcctgctgaagggttttggcaaggacggatttcgcttcttcacaaactttgagagccgtaaagggaaggaactggtgcgcgtggaagggcccgtgaaaaaactgcctgaggaagaagcagagtgttatttccatagtagacctaaaagcagccagattggtgccgtagtgtcacatcagtcgagcgtgataccagatcgcgaatatcttagaaaaaagaatgaggagctcgagcagctttatcaggatcaggaagtccctaaaccaaaaagctggggcgggtacgtgctgtatcctcaagtgatggagttctggcagggccaaaccaacaggctacatgataggattgtgtttcgccgcggcctgcctacaggagattcacccctggggccgatgacccaccgaggggaggaagactggctatacgagaggctagcaccatag

SEQ ID NO: 131319 - DNA, 1098 bp, synthetic construct
  misc_feature 1..1098: note = Description of Artificial Sequence: Synthetic coding sequence
  source 1..1098: mol_type = other DNA
atggcatctaccgaaagcagtcttctcaggtctctcggcctgagccccggcccgggcagttccgaggtagagcttgattgttggtttgatgaggacttcaaattcatactgttgcctgtgtcatatgcagtggtcttcgtgttgggcctgggcctcaacgcaccaactttatggttattcattttccgactgcggccctgggacgccaccgccacttatatgttccacctggccctgagtgacaccctctatgttttgtcccttcccaccctaatatactattatgccgcacataaccactggcccttcggaactgagatctgtaagtttgtgcgcttcctgttctattggaacctgtactgctcagtgctttttctcacgtgcataagcgtacaccggtaccttggcatttgtcacccattgagggccctgcggtggggaagaccccgcctagctggcctgctgtgcttagccgtctggctcgttgttgcagggtgcttggtgccaaacttatttttcgtgaccactagtaataagggcacaacagtgctgtgccatgatactaccaggcccgaagagttcgaccattatgttcatttcagcagcgcagtgatggggttgttattcggagtgccgtgcctcgtgaccttagtttgttacggcttaatggctagacggttgtaccagcctctgcccgggagcgctcagtcatcctctaggcttcgctccctgcggaccattgctgtggttctcacggttttcgctgtgtgtttcgtgccatttcatattacacgcactatatattacctcgcgaggctactggaagctgattgtcgcgtcctcaacatcgtcaacgtggtatacaaggtgacacggccactcgcttcggccaatagttgcctagacccagttctctatctgttaaccggggacaaatataggaggcaactccgccagctgtgtggtggcggaaagcctcaacctagaacagctgccagctccctcgccctcgtcagcttacccgaggacagctcatgtcgctgggcagccacgccacaggatagcagctgcagcacacccagagcagataggctgtag

SEQ ID NO: 131320 - DNA, 987 bp, synthetic construct
  misc_feature 1..987: note = Description of Artificial Sequence: Synthetic coding sequence
  source 1..987: mol_type = other DNA
atggaatgggacaatgggaccggacaggccctgggcttgccccccaccacctgcgtttaccgcgaaaactttaaacagcttcttctaccaccagtctattctgccgtgctcgccgccggtttgccattgaatatctgtgtcatcacgcagatctgtaccagtcgccgcgctctgacacggactgctgtgtacacattaaatctggccctggcggatctgctgtacgcttgttcacttccgctcctgatatataattatgctcagggtgatcattggccttttggtgactttgcttgtcggttggtgcgcttcctgttttacgcgaacctgcacgggtcaatcctgttcctgacatgcatcagcttccaacgctatttaggcatctgtcatcctctggccccttggcataaacgtggcgggaggcgtgcggcttggttggtgtgtgtagctgtatggctggctgtgacaacacagtgcctgcctactgcaatctttgctgcaacgggaattcaaaggaatagaaccgtctgctacgacctgagcccacctgcccttgccacccattacatgccctatggtatggccctgaccgtgataggttttctgcttcccttcgctgcgctgctggcatgctactgtcttctggcttgccgactgtgtaggcaggatggacctgctgaacctgtagctcaggaaagaaggggaaaggcagctcgtatggccgtcgttgtggcagccgcgtttgctatcagtttcctccctttccacatcaccaagacagcttatctggcagttagaagcacacctggcgtgccttgcaccgtcctcgaagcctttgcagcagcctacaaaggaacccgtcccttcgctagcgcaaacagtgtcctggaccccattctgttctattttacccagaagaagtttcggagacgcccacatgagcttctccagaaactaaccgctaaatggcaacggcagggcagatag

SEQ ID NO: 131321 - DNA, 987 bp, synthetic construct
  misc_feature 1..987: note = Description of Artificial Sequence: Synthetic coding sequence
  source 1..987: mol_type = other DNA
atggagtgggacaatggcaccgggcaggccctgggcctgccccccaccacttgcgtgtaccgagagaatttcaaacaattgctcctgccacccgtgtacagtgccgttctcgccgcgggtcttcccctcaatatctgcgtcatcacacaaatttgtacaagccgccgggccctgactaggaccgcagtgtacacactgaacctagccctcgcagatctgctctatgcatgcagcctgccactcctcatctacaactatgcgcagggcgaccattggccttttggcgatttcgcatgccgactggtcagattcttgttctatgccaatttacatggcagcatactttttcttacttgtatctcttttcaacggtaccttggaatttgtcacccattggccccatggcacaaacggggagggagacgggccgcttggttggtctgcgtcgcagtctggctggcagtgaccacccagtgcctgcccacagcaatcttcgccgcaactggtattcagagaaacagaactgtgtgctatgacctttctccacccgccctcgccacacattacatgccatatggaatggcactgacggtgatcggctttttactgccttttgccgctcttttggcttgctactgtctgttggcttgtcgactgtgtcggcaggatggcccggccgagccagtcgcacaggaacgccgtgggaaggcggcacggatggcagtggtcgtcgccgccgcattcgctatttctttcctgccattccacattaccaagacagcctacctcgcagtccgctcgactcccggagtgccatgcaccgtgctggaagcattcgccgcggcctataaaggaaccaggcccttcgccagcgccaatagtgttctggatcccatcctgttttacttcactcagaagaaatttcgaaggagacctcacgagttgttgcagaaacttacggctaaatggcagcgacaaggtaggtag

SEQ ID NO: 131322 - DNA, 987 bp, synthetic construct
  misc_feature 1..987: note = Description of Artificial Sequence: Synthetic coding sequence
  source 1..987: mol_type = other DNA
atggagtgggataatgggaccgggcaggctctggggctgccccccaccacctgtgtctacagggaaaattttaagcagttgctgctgccgccagtatactctgccgtgctggctgcgggactgccattaaatatttgtgttatcacgcagatatgcaccagtcggcgagccttgacgcggacggcagtgtacacactcaacctggccctcgcggatttgctgtacgcctgctctttacctctgctcatctacaattatgcccagggggaccattggccgtttggggactttgcctgtagactggttaggttcctgttctatgccaatctgcatggcagcattctatttctgacttgtatctcctttcagcgatatctgggaatctgccatccactcgccccatggcataagcgggggggtagaagagctgcctggctcgtttgcgtggctgtatggcttgctgtaactactcagtgcctcccaaccgcgatttttgcagcaacaggcattcagcggaaccgaaccgtgtgctacgacctgtcgccgccagctcttgctacccactatatgccatacggaatggctttgactgttatcggcttcctgttgccgtttgccgcattgctggcctgctattgtttgctcgcttgtaggctgtgccgccaagatggcccagccgagccagtagcccaagaacggcgtggaaaagccgccaggatggccgtggttgtggcagccgccttcgccatcagcttcctaccttttcacataacaaaaacagcatatctcgcagtgcgatctacacctggtgtgccctgtacagtgcttgaggccttcgcagcagcatataagggcactcggcctttcgcctctgctaatagtgtgctagacccgatcctgttttattttacccagaagaagtttaggcgcagaccacacgagctccttcagaaattgacggccaagtggcagcggcaaggccgatag

SEQ ID NO: 131323 - DNA, 987 bp, synthetic construct
  misc_feature 1..987: note = Description of Artificial Sequence: Synthetic coding sequence
  source 1..987: mol_type = other DNA
atggagtgggataatggcactggtcaagccttaggactgccgccaaccacctgtgtgtaccgggagaacttcaagcagctgctccttccaccggtatacagcgccgtgctagctgcagggctgcctctcaacatttgtgtcataactcaaatctgtacttcacgtcgcgccctgacccgtacagctgtgtacactcttaatctggccttggccgacttgctatatgcatgttccctgccactcctcatctacaactacgcccagggcgaccactggcctttcggagattttgcctgcaggttggtgcgctttctcttttacgcaaaccttcatgggtctatactgttcctgacttgcattagcttccaacggtatctcgggatttgtcacccccttgcaccctggcataaacgcgggggccgccgtgcggcctggttggtttgcgtagcagtctggttggcggtaacgactcaatgcctgcccactgccatctttgcggccacagggattcagagaaatagaactgtgtgctatgacttgtcccctccagctttagccacacactatatgccctatggaatggcccttacagtgattggcttcctgctaccgttcgcagctttgctggcctgttactgcctcctggcgtgtcggctatgtcggcaagacgggccggccgagccagttgcccaggaacgtcgcggcaaggccgcccggatggccgtggtagtggcagctgcctttgctatcagctttctcccatttcatatcactaaaactgcctacctggccgtgcgttccaccccaggggtcccatgcaccgtgcttgaagcttttgctgcagcttataaaggtactcgaccattcgcgtcagccaattcggtcctagacccgatcttattttactttacccagaaaaagtttaggcgcaggccccacgaattgttgcagaaactgacggctaagtggcagcgacagggacgttag

SEQ ID NO: 131324 - DNA, 738 bp, synthetic construct
  misc_feature 1..738: note = Description of Artificial Sequence: Synthetic coding sequence
  source 1..738: mol_type = other DNA
atggagtgggataatggcacaggccaggcactgggattgcctcccactacttgtgtataccgggagaacttcaaacagctgctcctacctccagtgtatagcgccgtgctcgccgcgggcctccccctcaatatttgtgtcattactcaaatctgcactagccggagggccctcacgcgtaccgctgtgtacactctcaacctggcactagccgacctactctatgcctgttcgttgcccctcctcatatataattacgcccagggtgatcactggccatttggggatttcgcgtgcaggttggttcgcttcctgttttacgctaatctacacggttccattctgtttttaacttgcatttctttccaacgctacctgggcatatgtcacccactggctccatggcacaaaagaggtggccgccgggccgcctggctggtctgtgttgcagtgtggttagccgtcaccacccaatgtctcccaaccgccatatttgcagccacaggcattcagcgaaataggacagtctgctacgatctatccccgccagcccttgcaacacactatatgccttacggcatggccttgacagtgatcggctttctgctcccattcgccgccctgctggcgtgttactgcctcctggcatgtcggttgtgcagacaggacggccccgccgagccggtggcacaagagagaaggggcaaggcagctcggatggctgtagttgttgcctag

SEQ ID NO: 131325 - DNA, 987 bp, synthetic construct
  misc_feature 1..987: note = Description of Artificial Sequence: Synthetic coding sequence
  source 1..987: mol_type = other DNA
atggagtgggacaatggaactggacaggcgttaggactgccccctacaacttgtgtttacagggagaactttaagcagctgttgctgccccccgtgtactctgctgtgctcgcagccgggcttcccctgaatatttgtgtgatcacgcagatatgcacctctagacgcgccctgacccggactgctgtgtacaccctcaatttggctctagctgacttgctgtatgcatgctccctgccactgttaatatataattatgcccaaggcgaccactggcccttcggtgatttcgcgtgcaggcttgtgaggttcttgttctacgccaacctgcatgggtccattcttttcttgacctgcatcagcttccagagatatctggggatctgtcatccactggcaccttggcacaagcggggcgggagaagagcagcttggctcgtttgcgtcgctgtgtggctggccgtgaccactcaatgtctgcccaccgcaatttttgctgcgaccggcatccagagaaaccgtaccgtctgttacgatttgtctccaccagcccttgcgacccattacatgccatacgggatggctctgactgtgataggattcctcctcccattcgccgcattgctagcgtgttactgtctgcttgcctgtcggctgtgccgacaggacggcccggccgaacctgttgcccaggaaaggcgggggaaagccgctcgcatggctgttgtggtcgcagctgcgttcgccatttcgtttctcccatttcatattactaaaactgcctacctggccgtgaggagcaccccaggggttccctgtacagttctggaggccttcgccgcggcctataaaggtactcgcccatttgctagcgcaaattccgtgttagacccaatactattctacttcacgcagaaaaaatttcgtcggcgcccccacgaactactgcagaagctgacggcaaagtggcaaagacaaggcaggtag

SEQ ID NO: 131326 - DNA, 987 bp, synthetic construct
  misc_feature 1..987: note = Description of Artificial Sequence: Synthetic coding sequence
  source 1..987: mol_type = other DNA
atggaatgggataatgggacaggccaagctctgggattgcctcccacgacctgcgtctatcgggagaacttcaaacagctacttcttccacccgtgtattccgctgtgttggccgcaggtcttcctttgaatatctgtgttattactcagatttgtacatcccggcgggctcttacaaggacggccgtctatactctcaacctggccttggcggatctgttgtatgcatgttctctgcccctgctcatctacaactacgcccaaggagaccactggccatttggcgatttcgcttgtcggttggttcggtttctcttctatgccaacctgcatgggagcatactattcctgacatgtatttcatttcagagatacctggggatatgccaccccttagcaccatggcacaagcgcggtgggcgtcgcgctgcttggttggtgtgcgtggccgtgtggcttgccgtgacaacccagtgcctgcctaccgccatctttgccgccacggggattcagaggaatcggaccgtgtgctacgacctgtcaccacccgcactagcaactcattacatgccttacggcatggccttgacagtcatcggcttcctactgccattcgccgctctgttggcttgttattgcctcttggcttgtaggttgtgccgccaggatggccccgcagagccggtagcacaggagcgacgagggaaggctgcacggatggccgtggtcgtggcagctgctttcgccatcagttttctgccatttcacataacaaaaaccgcatacctggccgtgcgatcaacacccggcgtcccctgtacggtactggaagcgttcgccgccgcttacaaaggaactcgtccctttgcctccgccaactccgtgttggatccgattctcttctatttcacacaaaagaagtttcgccggcgcccacacgagctcctgcagaagctgacagcaaagtggcaaagacaggggcgttag

SEQ ID NO: 131327 - DNA, 987 bp, synthetic construct
  misc_feature 1..987: note = Description of Artificial Sequence: Synthetic coding sequence
  source 1..987: mol_type = other DNA
atggagtgggacaacggcacagggcaggcccttggcctgcctcctacaacctgtgtgtatcgagaaaattttaagcaactcctgttaccccccgtgtactcagcggtacttgccgctggacttccgctcaacatatgcgtgattacacagatttgtacaagccggcgggcgctgacacgcacagctgtttacactcttaatctggccttggccgacctgctctacgcctgcagcctgcctttgttgatttacaactatgcccaaggagatcattggccttttggcgacttcgcttgcaggctcgtacgctttttgttctatgcaaatctccatggcagcattctgtttttgacttgcatctcatttcaacgatacctcggaatctgccatccactggctccctggcataaacgcgggggccgcagggctgcctggttagtgtgcgtggcagtgtggttagccgtgacgacccagtgcttgcccactgctatcttcgccgcaactggaattcagaggaatcgtacggtgtgttacgatctatcgccacccgccttagccacacattacatgccttacggaatggccctgaccgtgattggatttctgctgcctttcgctgccttgctcgcgtgctactgcctgcttgcctgcaggctctgtcggcaagatggccccgccgagccagtggcacaggaaaggcgtggaaaagccgcgcggatggctgtggtcgtcgccgctgctttcgctataagctttctcccatttcatattaccaaaacagcctatctggccgttagatcaactcctggtgtaccttgcacagtcctggaagcatttgcggctgcatacaaaggaactcggcctttcgcaagtgcaaatagcgtgctcgatcccattctgttctattttacccagaaaaaatttcgacggcggccacatgaacttctgcagaagctgacagcaaagtggcagagacagggtcgatag

SEQ ID NO: 131328 - DNA, 987 bp, synthetic construct
  misc_feature 1..987: note = Description of Artificial Sequence: Synthetic coding sequence
  source 1..987: mol_type = other DNA
atggagtgggacaatgggactggtcaagcactcggtctcccgcccactacatgtgtctatcgtgagaatttcaagcagttattactgccacccgtgtattcagcggtgcttgctgccggcctcccactgaacatatgtgtgattactcagatttgcacttcccgaagggccttaacaagaaccgctgtgtataccctcaacctcgcgctcgcggacctcttgtatgcctgtagcctaccactcctgatttacaattacgcccagggcgatcactggccattcggcgattttgcctgccggttagtacgtttcctgttttacgccaacctccatggtagcatcctcttcctgacatgcatatctttccagagatacctcggaatatgtcatcccctggccccatggcacaaaagagggggccgcagagcagcctggctcgtctgtgtagctgtttggctcgcggtgacgacccaatgtttgcccacagcaatattcgccgctaccggcattcagcggaatagaacggtatgctacgacttgtcccctcctgccctggccacccactacatgccttatggcatggcattgactgtgattggatttctccttcctttcgccgccctgctggcttgctattgcctgctggcatgtcggctctgtcggcaggatggtcccgccgagcccgtagcccaggaacggcgcggcaaagctgcaagaatggcggtggtggttgccgccgcctttgccatttccttcttgccatttcatatcaccaagactgcttacctcgcagtccgctccaccccaggcgtcccctgcactgtcctggaagccttcgcagccgcctataaaggtacccgcccctttgcttccgcgaattccgtcctggatccaattctgttctatttcacccagaagaaatttagaagacgaccacacgagttacttcaaaagctcacagcaaaatggcagagacagggacgctag

SEQ ID NO: 131329 - DNA, 387 bp, synthetic construct
  misc_feature 1..387: note = Description of Artificial Sequence: Synthetic coding sequence
  source 1..387: mol_type = other DNA
atggaatgggataatgggaccgggcaggcactgggcttgcctccaaccacttgcgtgtaccgagagaactttaagcaattacttctccctccggtgtatagtgccgtactggcagccggtcttcctcttaacatctgtgttattactcagatttgtacctctcgacgcgccctgacacggactgctgtgtataccctgaatctggccctggccgatctcctgtacgcctgctctctgccattgctcatttataactacgcgcaaggagatcattggccatttggagatttcgcttgtcgccttgtgcgcttcctgttctacgctaatctccatgggtcaatcttatttctgacttgtatcagcttccagcggtatctgggcatttag

SEQ ID NO: 131330 - DNA, 738 bp, synthetic construct
  misc_feature 1..738: note = Description of Artificial Sequence: Synthetic coding sequence
  source 1..738: mol_type = other DNA
atggccaataattataagaaaatagtgctgctcaaaggactagaggttataaacgattaccactttcggattgtgaaaagcctgttaagtaacgatcttaagctgaacccaaagatgaaagaagagtacgacaaaattcagattgcagacctgatggaggaaaagttccccggcgatgctggcctgggtaagttgatcgagttctttaaagagatccccacactgggtgacctggctgaaactctaaaacgggaaaagctgaaggtggctaacaagattgagagcattcccgtcaagggcataatacccagtaaaaagactaaacaaaaggaggtgtacccagccaccccggcttgtacaccttcaaacaggctcacagccaagggtgccgaagaaacactagggccccagaagcgaaagaagccctcagaagaagaaaccgggacaaagcgatctaagatgtcaaaagagcagacgaggccgtcctgcagtgcaggtgcatccaccagtaccgccatgggcagatccccccctccacagactagcagctccgccccgcccaatactagttcaaccgaggcctacctaatgaatctcaccttaagcctgactgctggtagctttttgtcttgtgcagtgtggggaagggatagggagttgcgcaatttggagctgagcgctactgattctctgagcaccgctccaatttactatacgcccataccattcgctcattag

SEQ ID NO: 131331 - DNA, 1452 bp, synthetic construct
  misc_feature 1..1452: note = Description of Artificial Sequence: Synthetic coding sequence
  source 1..1452: mol_type = other DNA
atggccaacaactacaaaaagattgtgttgctaaaggggctcgaagtcatcaatgactatcacttcaggatcgttaaatcgctgctttcaaacgatcttaaactcaaccctaaaatgaaggaggagtacgacaagattcagattgcagatcttatggaagagaaatttcccggggacgctggactcgggaagctaatagagtttttcaaggagatcccaactcttggagaccttgctgagacgctcaagagggagaagctcaaagtgaagggcattatcccatctaaaaagacaaaacaaaaggaggtgtaccccgctacacctgcctgtacaccctccaaccgtcttacggcaaagggggcggaggagaccctgggaccacagaagcgtaaaaagccatctgaggaggagacaggcaccaagcgtagcaagatgagtaaagagcaaacgcggccctcctgcagcgcaggagcttctacttccacggctatgggcaggtcaccaccaccccagacctcatcctccgctccacctaatacctcctccacagagtcactgaaaccccttgcgaatcgtcatgcaacagctagcaagaatatttttcgtgaggatcccattattgctatggtcttaaacgcaaccaaagtgttcaagtatgagagcagtgagaacgaacaacggcgcatgtttcacgctaccgtggccacacagacgcagttcttccatgtgaaggttctcaacatcaacctgaaaaggaaatttatcaagaagcggatcataatcatatccaactactccaagcgcaactctctgctagaagtcaacgaggcctcatcagtatctgaggccggtcccgaccagacttttgaggtcccaaaagatataattagaagggctaaaaaaataccaaaaatcaacatactccacaaacagacatcaggatatatcgtatatggcctctttatgctccacacaaaaattgtaaatagaaagacaactatttatgaaattcaggacaagaccggatccatggccgtcgtgggaaaaggcgaatgccataatataccctgcgaaaagggcgacaaactccggctgttctgcttccgcttaagaaaacgcgagaacatgtccaaacttatgagcgagatgcacagtttcattcagatacagaaaaacacaaaccagaggtcccatgactcacgcagtatggctctccctcaagagcaaagtcagcaccctaagccatctgaggccagcacaacactgccagagtctcacctcaagactccccagatgccacccacgactccgagttctagttcatttacgaaaaaggacgaaacacacccgggcgctcagagttctcccgcaaattttaggattacatcacccaccgtggccccccctctatcaagtgatacttctactaatcggcaccccgcagtcccgtag

SEQ ID NO: 131332 - DNA, 1479 bp, synthetic construct
  misc_feature 1..1479: note = Description of Artificial Sequence: Synthetic coding sequence
  source 1..1479: mol_type = other DNA
atggctaacaattacaaaaagatagtgctacttaaggggctcgaggtgatcaatgattaccacttccgtattgttaaaagcctactgagcaacgacctcaagctgaatccgaaaatgaaagaggaatatgacaaaatccagattgccgatctgatggaagaaaagtttcccggggacgcgggtctgggaaagctgatcgagtttttcaaggaaatccccactctgggagaccttgcggagacactgaaaagagagaagttgaaggtcgccaacaaaatagaatccattccagtaaaaggcatcattccatctaagaagacgaagcagaaggaagtttaccccgctacacctgcctgcactcccagtaataggttgaccgccaaaggcgccgaggaaacactgggacctcagaagcgcaaaaaacctagcgaggaggagactggaaccaaaaggtccaagatgtctaaggaacagaccagaccatcatgtagtgccggcgctagcacttcaaccgcaatggggcgctccccaccacctcaaacctcgtcctctgcacctccgaatacctcttctactgaaagtctcaaacctctcgctaaccgtcatgcaaccgcatctaagaacattttccgcgaggacccgataatagcaatggtccttaatgccacgaaggtgttcaaatacgaatccagcgaaaacgaacagcgcaggatgtttcacgcaactgttgcaacccagacccaattcttccacgtcaaagtgctgaacattaatctgaagagaaagtttataaagaagagaattattattattagtaactattctaaaagaaactccctcctggaggtgaacgaggcatcctctgtgtcagaagccggacccgaccagacctttgaagtccccaaagatataatcaggcgggccaagaagatccctaagattaatatactccataagcagacatctggatacattgtgtacggactcttcatgttacatacaaaaatcgtgaaccgtaagaccactatatacgagatccaggataaaactggaagtatggccgtggtcggcaagggtgagtgccataatatcccctgtgagaaaggtgacaaactccgcctgttttgtttcaggttgcgaaaacgagagaatatgagtaaacttatgagcgagatgcattcttttatacagatacaaaaaaatacaaatcaaagatctcatgacagtcgctctatggctcttccacaggagcaaagtcagcaccctaaacctagcgaggctagtacgactctccctgaatcccatcttaagaccccacaaatgccccccaccaccccatcttccagttcctttaccaagaaggacgaaacccacccaggggcccaatctagcccagctaatttcagaatcaccagtcccacagtagcccctcctctgtcaagcgataccagtaccaatcgccaccccgctgtgccatag

SEQ ID NO: 131333 - DNA, 1359 bp, synthetic construct
  misc_feature 1..1359: note = Description of Artificial Sequence: Synthetic coding sequence
  source 1..1359: mol_type = other DNA
atggccaataattataaaaagatagtactgcttaagggcctggaggttattaatgactatcacttccggattgtgaaatcgttattgtccaacgatctcaagttgaatcccaaaatgaaggaagaatacgataaaatccagattgcggatttaatggaggagaaattccccggcgacgccgggttgggcaagttgattgagttttttaaggagatcccgaccttaggagatctggcagagaccctcaagcgagagaagctaaaggtaaagggcattataccttcaaaaaagactaagcagaaagaggtgtaccctgcaacacccgcctgcactccttctaatcggctgacagctaagggtgctgaggagacactggggccacagaaacgaaagaaacctagtgaggaggaaacggggacaaagagatcaaaaatgtcaaaggaacaaactcgccctagttgttcagccggcgcttccacaagtactgccatggggagaagtccacctccccagacatcctcttctgcaccccccaatacaagctcgaccgagtccctgaagcctctagctaatcggcacgccactgcatccaaaaacatctttagagaagatcccattatcgctatggtgctgaacgccacgaaggtgttcaaatatgaaagtagcgagaatgaacaacgcaggatgtttcatgccaccgtcgccacccagacccaattttttcatgtgaaggttctcaatattaaccttaagaggaaattcattaaaaaaagaattatcatcatctctaattacagcaaaaggaattcgttgctcgaggttaatgaggccagttctgttagtgaggccggtcccgatcaaacattcgaagtgccgaaggatattataagaagggccaagaaaatccctaagatcaacattctccacaagcagacatctggatatattgtttacggtcttttcatgcttcacacaaaaattgtcaataggaagaccactatttacgagattcaggacaagacggggtctatggcggtggttggcaaaggcgagtgccacaatattccctgtgagaaaggcgacaagctgaggctcttttgttttcgcctcaggaaacgcgaaaatatgtccaaattaatgagcgaaatgcatagcttcattcagatccaaaaaaacacgaatcagagatcccacgatagccggagtatggccttgccccaggagcagagccagcacccgaagcccagcgaggctagcaccaccttgcctgagtcccaccttaaaacaccacagatgccgcccactacccccagctcaagctcctttacgaaggttacaaaggacaaggatatcaagtag

SEQ ID NO: 131334 - DNA, 1386 bp, synthetic construct
  misc_feature 1..1386: note = Description of Artificial Sequence: Synthetic coding sequence
  source 1..1386: mol_type = other DNA
atggcaaataactacaagaaaatcgtcttgctaaaaggactggaagtcatcaacgactatcatttccggatcgtcaagtcactgttgtcaaacgacttgaagctcaaccccaagatgaaagaggaatatgacaagatccagatagcagacctgatggaggaaaagtttccaggcgacgcgggattggggaaactgattgagttcttcaaagaaatcccgacacttggggatctcgccgaaaccctgaagcgtgaaaagctgaaggtggccaacaaaatcgaatccattcctgttaagggtattatcccatctaagaagaccaagcaaaaagaagtgtaccctgccactcccgcatgcaccccatcaaaccgactgacggcaaagggagcagaggagaccctggggccacagaagaggaagaaaccttctgaagaggagaccggaaccaagcgatccaagatgtcaaaggagcagactagaccatcatgttccgcaggcgcctccacaagcacggcaatgggacgatcgcctcctcctcagacctcatctagcgcccctccaaacacctccagcacagaatccttgaaacccttggccaaccgacacgccaccgctagcaagaacatatttcgcgaagaccccattatagcaatggtgctgaatgcaactaaagttttcaaatacgaaagttctgaaaacgagcagcgcaggatgtttcatgctactgtggccacgcagactcagttcttccacgttaaggtgctgaacatcaacttaaagcgcaagttcataaagaagcgcatcataataatttctaactattccaagcgcaactcccttttagaggttaatgaggccagctcagtgagcgaggcaggccctgaccaaacttttgaggtacctaaggacattatacggagggccaaaaaaattcctaagattaatatcttacataaacagaccagcggctatatcgtctacggcctgttcatgcttcacactaaaattgtgaataggaaaactaccatttatgagatccaggacaagactggctctatggcagtagtcgggaagggcgagtgccacaatataccttgcgagaagggggacaaactgcgacttttttgtttccggctgagaaaacgggagaacatgagtaagctgatgtctgaaatgcacagttttatacagatacaaaagaacacaaaccagaggtcgcatgactctcgaagtatggcactgccacaggagcagtctcaacatccgaaaccatctgaggcctccaccacactccccgaaagtcacctgaagactccccaaatgccgccaactacgccgtctagctccagttttacgaaggtgaccaaagacaaggacatcaaatag

SEQ ID NO: 131335 - DNA, 453 bp, synthetic construct
  misc_feature 1..453: note = Description of Artificial Sequence: Synthetic coding sequence
  source 1..453: mol_type = other DNA
atggcaaataactataagaagatcgttctgctgaagggtcttgaagtcatcaacgactatcattttcggatcgtgaagagtctgctttcaaatgatctgaagctgaatccgaagatgaaggaggagtacgacaagattcagatcgccgacctcatggaagagaagttccccggggacgccgggctgggaaaactcatcgagttctttaaagagatcccaacactgggagacttggccgaaaccctgaagcgcgagaaacttaaggtggccaataagatcgagtctatccccgtcaaagggattattcctagcaagaagactaagcagaaggaggtttaccctgccacacctgcctgtactccaagtaaccgattaactgccaagggggcggaggagaccctcggcccccagaaacgcaagaagccctccgaggaggagacaggcacgaagtag

SEQ ID NO: 131336 - DNA, 399 bp, synthetic construct
  misc_feature 1..399: note = Description of Artificial Sequence: Synthetic coding sequence
  source 1..399: mol_type = other DNA
atggctactaccgtcacattggagaaatgtggtcacaataaggggtataaaggattggacaactgccggttctgtcccgggtctcagtgttgtgtggaagacggtccagagagcattgattcgatcatagatatggacgctgtgtgtaaacgtgttactaccctgggactcgatgtcagcgtcacaatttctcaggatgcaggtcgctatctgtgcgacttcacgtactacacctccctttaccagagccatggcaggtctgcattcgtgcacgttccacccctgggaaaaccctataatgcagaccagctcgggagggccttgcgcgccatcatcgaagaaatgttagatctccttgagcagagcgagggcaagatcaactactgtcacaagcattag

SEQ ID NO: 131337 - DNA, 630 bp, synthetic construct
  misc_feature 1..630: note = Description of Artificial Sequence: Synthetic coding sequence
  source 1..630: mol_type = other DNA
atggagcagccacgaaaggccgtggtagtgacaggcttcggcccctttggtgagcataccgtaaatgcgtcgtggatagccgtgcaggagctcgagaagcttgggttaggcgacagcgtggatctgcacgtttatgaaattcctgttgagtaccaaactgtacagagactgattcctgcactgtgggagaagcactcgcctcagctggtggtacacgtcggggtaagcgggatggcaaccacggtaacgctggagaaatgtggccacaataaggggtataagggactggacaactgtcgcttctgtcccggcagtcagtgctgtgtcgaggacgggcctgagtctattgacagtatcatagatatggacgcagtttgtaagcgggtgactacactcggcctagatgtatctgtgacaatctcacaggacgcgggcagatacctatgtgactttacatactatacctccctttaccagtcccacggcaggtcggcgtttgtccatgtgccacctctcggaaagccatataatgctgatcagttagggcgggccctaagggcaataatagaggagatgctcgacctgctggagcagtcggaagggaagattaattactgtcataaacattag

SEQ ID NO: 131338 - DNA, 609 bp, synthetic construct
  misc_feature 1..609: note = Description of Artificial Sequence: Synthetic coding sequence
  source 1..609: mol_type = other DNA
atgaagaaggcaagaaatgacgaatatgagaatctctttaatatgattgtggagatacccagatggaccaacgcgaaaatggaaattgctaccaaggaacccatgaaccccatcaaacagtatgtcaaggacggaaagttgcggtacgtggcaaacattttcccgtacaaaggctacatttggaattacggcacattaccacagacctgggaagacccgcatgaaaaggacaagagcacaaattgtttcggggacaacgatccaatagacgtttgcgaaatcggctcaaagattttatcctgtggcgaggtgatccacgttaagattctgggcatacttgctttgatagacgagggtgaaacagattggaagttgatcgcaattaacgccaatgaccctgaagcaagtaagtttcacggactccggaacattcctgtgtatacgattaatcgcattgtgatcctccctagtctggatcggagccagacatctagcctgtcttatctgcccgcccaccaggattcatgcgtgccattagacgcagcgttgcatgtggtgctgtacttttgttcactgctcggtctgcagtcgtacctctcatgcttctag

SEQ ID NO: 131339 - DNA, 1005 bp, synthetic construct
  misc_feature 1..1005: note = Description of Artificial Sequence: Synthetic coding sequence
  source 1..1005: mol_type = other DNA
atgagtgccctgctcagactgttgagaactggcgccccggccgctgcttgtctaagactggggacttctgcgggtacagggagccggcgcgctatggccttgtaccatacggaggaaagagggcaaccgtgctcacagaattaccgactgttctttaagaacgtaaccggacattatatttccccattccacgatatacctctgaaagttaatagcaaagaagaaaacggaatcccaatgaaaaaggcgagaaatgacgaatacgaaaacttattcaacatgatcgtcgagattcctcgctggacgaacgcgaagatggagattgctaccaaggagccaatgaatccaatcaaacagtatgtgaaggacggcaaactccggtacgtggctaatattttcccttacaaaggttacatctggaattacggaaccttgccacaaacctgggaagacccgcacgagaaagacaaatccaccaattgcttcggagataacgatcccatcgacgtatgcgagatcggctcgaaaatcctgagttgcggtgaagttatccatgttaagatcctggggatactggccctcatagacgagggagagactgactggaagcttatcgctattaatgctaatgatcctgaggcttctaagtttcacgatatagacgacgtaaaaaagtttaagcctgggtacctagaggcaaccctgaactggttcagactgtataaggtgcctgacgggaagccggagaatcagttcgcttttaacggcgaattcaaaaacaaagcttttgccctagaagtaatcaagtctacacaccagtgctggaaagccctgttaatgaagaagtgcaacggcggcgctatcaactgtaccaatgtgcagatctcggattcaccttttaggtgcacccaggaggaagcccggtcgctcgtggaatctgtgtcatcgtctcctaacaaagagtctaatgaagaggagcaagtttggcatttcctcggtaaatag

SEQ ID NO: 131340 - DNA, 918 bp, synthetic construct
  misc_feature 1..918: note = Description of Artificial Sequence: Synthetic coding sequence
  source 1..918: mol_type = other DNA
atgagcgccctgctgaggctcttaagaactggtgcccccgccgcggcttgcctacgcctgggcacttctgcaggcacgggaagcaggagagccatggcgctctaccataccgaggagaggggtcagccttgttcacaaaattaccgactgttcttcaagaacgtaacgggtcactatattagtccattccacgatatccccttaaaggtgaattcaaaagaggagaatggtattcccatgaaaaaggcacgcaatgacgagtacgagaatttattcaacatgattgtggagattcctcgctggacaaatgccaagatggaaatagccaccaaagaaccgatgaatcccataaagcagtacgtaaaggatgggaagctgcgctacgtggcaaacattttcccttacaaagggtacatatggaactacggcactcttcctcaaatcctgagttgcggggaagttatacacgttaaaatacttgggatcctggcactcatagatgaaggggagaccgattggaaactgattgcaattaatgcgaacgaccccgaagcgtctaaattccacgacattgacgatgtgaaaaagttcaagccaggctatctcgaggctactctgaattggttcaggctgtataaggtgcccgacggaaaacccgagaaccagtttgccttcaacggagagtttaagaataaggcgtttgcccttgaggttattaagagtacacatcagtgttggaaagctttactgatgaaaaaatgcaatggaggggcgattaattgcacaaacgtgcagatcagcgacagcccctttaggtgcacacaggaagaagcacggagtctcgtcgagagcgtcagctcctcacctaacaaagaatctaacgaagaggaacaggtgtggcattttcttgggaaatag

SEQ ID NO: 131341 - DNA, 507 bp, synthetic construct
  misc_feature 1..507: note = Description of Artificial Sequence: Synthetic coding sequence
  source 1..507: mol_type = other DNA
atgtcggccctgttgcggctgttgaggactggggcccccgccgccgcatgcctgagactcggcacaagcgcaggcaccggatcccggagagccatggcactgtaccataccgaggaaaggggacaaccatgctcacaaaactaccggctctttttcaatatcgatgacgttaagaaattcaaacccggttatctagaggccacactcaactggttccgcctgtacaaagtacccgacggaaaaccggagaatcagtttgcctttaatggtgaatttaagaacaaggcatttgccctcgaagttatcaaatcgacccatcagtgttggaaagctctcctcatgaagaagtgtaacggtggcgctattaactgcaccaatgtgcagatctctgattccccattcagatgtactcaggaagaggcgcggtctctggtagagtcggtgagctccagccctaacaaagagtccaacgaggaggagcaggtctggcacttcctgggcaaatag

SEQ ID NO: 131342 - DNA, 1050 bp, synthetic construct
  misc_feature 1..1050: note = Description of Artificial Sequence: Synthetic coding sequence
  source 1..1050: mol_type = other DNA
atgtcggcactgctgaggctgctcagaaccggggctccagctgccgcgtgtttacgcctcggtactagcgctggcactgggtccagacgcgcaatggcactgtatcacacagaagagaggggacagccctgttctcaaaactatcgcctttttttcaaaaatgtaacaggacattatatttcccctttccatgacatcccacttaaggtgaattccaaggaggatacagaggcacaggggatttttattgacctttccaagatctgggagaatggcattccaatgaaaaaagcacggaatgacgagtacgaaaacctttttaacatgattgtggaaattcccagatggacaaacgcaaaaatggagatcgctacaaaggagccaatgaacccaataaagcagtacgtgaaggatggcaaactgcggtatgttgccaacatctttccatacaaggggtatatctggaactatggcaccctgcctcaaacatgggaggatcctcacgaaaaagataaaagcaccaactgcttcggcgacaacgatcctatcgacgtctgcgagatcggctctaaaatactcagttgtggagaggtcattcatgtaaaaatcttaggcatccttgcgctgatcgacgagggtgagactgactggaagctgatagctattaatgctaatgatcccgaggcctccaagttccatgacatcgatgacgtgaaaaaattcaagcccggatacctggaagccacgctgaattggttccgcctttataaagtgcctgacggcaagccagagaaccaattcgcttttaatggcgaatttaagaataaggcgtttgcactggaagtaattaagtcaactcatcagtgttggaaggcgttgctgatgaaaaaatgtaacggcggggctatcaattgcaccaatgtccaaatctccgatagcccatttcgctgcacccaggaagaagctagaagcctggtcgagagtgtctcctctagcccgaataaggaatccaacgaggaggaacaagtgtggcactttctcggtaaatag

SEQ ID NO: 131343 - DNA, 951 bp, synthetic construct
  misc_feature 1..951: note = Description of Artificial Sequence: Synthetic coding sequence
  source 1..951: mol_type = other DNA
atgagtgcactgcttcgcctgttacggacgggtgctcctgcagccgcatgtctgcggcttgggacctccgctggaactgggtcacgccgcgcaatggccctttatcacaccgaagagagaggccaaccatgttcgcaaaactacagactctttttcaagaatgtgactggccattacatcagccccttccacgatattccattgaaagtaaactctaaggaggagaacggtatccctatgaagaaagcacgtaacgatgagtacgagatcgccactaaggagcccatgaaccctataaaacagtacgtgaaggatgggaagttacggtatgttgctaatatcttcccttataaaggatatatctggaactacggcactctcccccagacttgggaggacccccacgagaaggacaagtctacaaactgttttggtgacaatgaccctatcgatgtgtgcgagataggatccaaaattctgagctgtggtgaggttatacacgtcaaaatcctgggaattctagcacttatagacgaaggagagaccgattggaaattaattgctatcaatgctaacgacccagaggcatcaaagttccatgatatcgacgacgtgaagaaatttaagcccggctacctcgaagcaacccttaactggttcaggctgtacaaagttcctgatgggaaaccagaaaaccagttcgcctttaacggcgaatttaagaataaggcgtttgccctagaggtcattaaaagtacccaccaatgctggaaagcactcttaatgaagaaatgtaatgggggggcaatcaattgtacgaacgtgcagatctcagacagcccgttcagatgtacccaggaggaagctagaagtctggtcgagagtgtctcgagctccccaaacaaagaaagcaatgaggaggagcaggtctggcacttcctaggcaaatag

SEQ ID NO: 131344 - DNA, 699 bp, synthetic construct
  misc_feature 1..699: note = Description of Artificial Sequence: Synthetic coding sequence
  source 1..699: mol_type = other DNA
atgagtgcactgctcagactcctccgaactggagccccagctgccgcttgtcttcgcttggggacctccgccggaactggctctcgccgcgcgatggccttgtaccataccgaggaacgcggtcagccctgctcccagaattatcgactgtttttcaagaacgtgactgggcattacatctctccattccacgatatccccttgaaggtaaacagcaaggagatcctctcttgtggcgaggtgatacatgtgaaaatcctcggcattctggcgctgatcgacgagggtgagaccgattggaaactgatagcaatcaacgccaatgacccggaagcaagcaaattccacgatattgacgatgtgaaaaagttcaagcctggataccttgaggcgacacttaactggttccgcctttataaggtaccagacggcaagcctgagaatcagttcgcttttaacggagagttcaagaacaaggcgttcgcattggaggtgattaagtccactcaccagtgttggaaggcgctcctcatgaagaagtgcaatgggggagccatcaactgtacaaacgtccaaatttcagacagcccatttcgttgcactcaagaagaagcacggagccttgtggaatccgtcagtagcagcccaaacaaggagagtaacgaggaagagcaagtctggcacttcttgggcaagtag

SEQ ID NO: 131345 - DNA, 960 bp, synthetic construct
  misc_feature 1..960: note = Description of Artificial Sequence: Synthetic coding sequence
  source 1..960: mol_type = other DNA
atgtctgtggggtttatcggcgctgggcagctggcattcgctctggccaaaggtttcactgcagcaggtgtgctagccgcgcacaagattatggcaagcagcccagatatggatctcgctacagtgagtgccctccggaaaatgggagtcaaacttacccctcacaacaaggagacagtgcaacattctgatgtcctcttcttggccgttaagccgcacatcataccttttatcctagacgaaatcggggccgacattgaagaccgccacattgtggtgagctgcgccgccggcgtgactatcagctcaattgagaaaaagctgtccgcttttcgacccgctccacgagtgattagatgcatgacaaatactcccgttgtggttagggaaggtgctaccgtatacgcaacgggcactcacgctcaggtggaagatggccgcctgatggagcaactgctaagcagcgtcgggttttgcacggaggtcgaggaggatctaattgacgctgtaacaggcctttctggaagcgggcccgcttacgcgttcacagcactcgacgccctcgctgacggaggggtgaagatgggactaccacgaaggctggccgtaagactgggagcccaggcgctgcttggagccgccaaaatgctgctgcatagcgagcaacatcctggccagcttaaagataacgtgagcagtcccgggggagctactattcacgccttacacgtgctcgaaagcggcggattcagatccttgttgataaacgccgtggaggcctcctgtattagaacacgagagctccagagcatggctgatcaagaacaagtgagccccgcagccatcaagaagacaatattggacaaggtgaaattggactcaccagcagggacagctctctctccttctggtcatactaagctgcttccccggtcactggcaccagccggcaaagactag

SEQ ID NO: 131346 - DNA, 951 bp, synthetic construct
  misc_feature 1..951: note = Description of Artificial Sequence: Synthetic coding sequence
  source 1..951: mol_type = other DNA
atgtctgtggggtttatcggagcagggcagctggccttcgctctggcaaaggggttcaccgccgccggagtgctggcagctcacaagatcatggctagtagcccggacatggacttggctaccgtgagcgcgcttaggaaaatgggtgtaaagctcacaccccacaataaggaaactgtgcaacactccgatgtgctatttcttgccgtgaaaccacatatcatcccctttatactcgacgaaattggagctgacattgaggaccgacacatcgtggtgtcttgcgcagccggcgtgactatttcttccatcgagaagaaattgtccgcctttcgcccggctcccagggtgattagatgtatgaccaacaccccagtggtggtacgcgaaggagcaaccgtgtacgccaccggaacacacgcacaagttgaggacgggagattgatggagcaactcctttcaagtgtgggcttctgcaccgaggtggaggaggatctcattgatgctgtgacaggcctgagcggaagcggccctgcctatgcctttaccgccctggacgcactcgcggacggcggggtcaagatgggcttgccacgacgcctggctgtccgcttgggcgctcaggctctcttaggcgctgcaaagatgctgctacatagcgagcagcaccccggccagctgaaagacaacgttagcagcccaggaggggctacaatccacgcccttcacgtgttagagtccggtggattcagaagtcttcttatcaatgctgtggaggccagctgtattcgaacccgggaactccagtccatggccgatcaagaacaggtgagccccgctgctatcaagaaaactattctggacaaggaccatctgcccctggagctgggttccccagaaggtttgcatccattactactgcagtaccagctggcccgcgccccttcatag

SEQ ID NO: 131347 - DNA, 1041 bp, synthetic construct
  misc_feature 1..1041: note = Description of Artificial Sequence: Synthetic coding sequence
  source 1..1041: mol_type = other DNA
atggtgggcggggggagacgtgttgggagggacgaacctgtccctagcgtcggagctctgggtcaggggagcccagactccatgagcgtgggattcataggggctggccagttggcattcgccctagccaaaggattcaccgccgccggcgtcttggcggcacataagatcatggcctcctcccccgatatggatctggctaccgtatctgctctgcgaaagatgggcgttaaactaactcctcataataaggaaactgtccagcattcagatgtcttgttcctggctgtgaaaccacacatcattccttttatcctggacgagatcggtgccgacattgaagacagacacatcgtcgtgtcctgcgctgcgggggtaacaatcagctcaatagaaaaaaagctctccgcattcagacccgccccaagagtgatcagatgtatgactaatactcccgtggtggttagagagggcgccacagtctacgctacgggtacccacgcgcaggtggaggacggccggctgatggagcagctgctgagttccgtgggattctgtaccgaagtggaagaagatctgatcgatgcggtgacagggctgtctggttcaggacccgcctatgcctttactgcactggacgccctcgccgatggtggcgtaaagatgggcctgccgcggagactagctgttcggctaggcgcccaggcactgctgggcgccgccaagatgcttctccacagtgagcagcatcctggtcagctgaaggataacgtgagtagccctggcggtgccacaatccatgccctccacgttctcgagagtggcggcttcagatcacttttaatcaatgccgtggaagcctcatgtatccgaacacgggagctacagtccatggctgatcaagagcaggtgtctcccgcagccattaaaaaaactatcctggataaagtgaagctcgatagcccagctggaactgcgctctctccaagcggacacaccaaactccttcccaggtcacttgcccctgccggtaaggattag

SEQ ID NO: 131348 - DNA, 819 bp, synthetic construct
  misc_feature 1..819: note = Description of Artificial Sequence: Synthetic coding sequence
  source 1..819: mol_type = other DNA
atgtctgtgggcttcattggtgccgggcagctggctttcgcccttgccaaaggattcaccgccgctggggtgctggccgcccataagattatggccagttcgcctgacatggatctggctactgtatcagcgctccgaaagatgggcgtcaaacttacccctcataataaggaaacagtgcaacacagtgatgtgttgtttcttgccgtaaagccccacatcatcccctttatccttgacgagatcggcgcagatattgaggacaggcatattgtcgtcagctgtgcagcgggggtcacaattagctctatcgaaaagaaactcagcgccttccgccctgcgcctagggtgatccgctgtatgactaacactcctgtggtcgtacgagagggcgctaccgtgtatgccaccggcacccacgcccaggtggaggatgggagattaatggaacaactcctgagctctgtcggcttctgcacggaggtggaggaagacctaatcgacgccgttaccgggctatcaggttccgggccagcttacgctttcactgccctggacgctctggctgatggtggggtgaaaatgggcctgcctcgcaggctggccgttcggctcggcgcccaggcattactgggaggttgtcaagacgcagcagcccttcgaaccgcccctcgcccggcacaaggccagcgacagctgtcctggtggggccaccacccttgcctggcgtgtgcaggcgagtgggggctcccactcccggcccatcagcggtgcggggggctgctgcatccccacacaggagccgcagtccacggatag

SEQ ID NO: 131349 - DNA, 723 bp, synthetic construct
  misc_feature 1..723: note = Description of Artificial Sequence: Synthetic coding sequence
  source 1..723: mol_type = other DNA
atgtcagtggggtttattggggcgggccagttggccttcgcgctggccaagggcttcacagctgccggcgtcttggcagcacacaagattatggcgtcctcgcctgacatggacctcgcaacagtttccgctctgcgcaagatgggggtgaagcttacaccacacaataaagagaccgtccagcactctgacgtcttgtttctcgccgtgaaacctcacatcatcagtatcgagaaactcagtgccttccgtcctgctcccagagtcatccgttgcatgaccaataccccagtcgtcgtacgcgagggcgccaccgtgtacgcaacgggcacccatgcgcaagtggaggatggcagattgatggagcagcttctgagttcagttggtttctgcacggaagtcgaggaagacctgatcgatgctgtgacaggcttgtcaggatcaggccccgcgtacggcgctgccaagatgctcctccactctgagcagcacccagggcagctcaaagacaacgtttcaagcccaggcggagccacaatccatgctttacatgttctggagtctggaggcttccgcagccttcttatcaacgctgtggaggcatcttgtattcgcacacgttgggcccccgcacttccagcgtctctcgtctccagtccttgtatggcggaagcctccctgacacatatatgcagcttcactcacagcgctgacacatattag

SEQ ID NO: 131350 - DNA, 1590 bp, synthetic construct
  misc_feature 1..1590: note = Description of Artificial Sequence: Synthetic coding sequence
  source 1..1590: mol_type = other DNA
atgctgaagttccgaacggtgcatggagggctgcggcttctcggaatcaggcggaccagcacagccccggccgcaagcccaaacgtgaggcgattggagtacaaacccatcaaaaaggtgatggtggcgaatagaggggagatcgcaattcgagtgttcagagcttgcaccgagctgggcattcgaaccgtcgctatctatagcgagcaagacaccggccaaatgcaccgccaaaaagccgacgaggcttatttgatcggccgaggcctggctccggtgcaggcttacctgcacatccctgatataatcaaggttgctaaagagaataatgtagatgcggtgcaccccggttacgggtttctgagcgagagggccgattttgcacaagcttgtcaggacgccggagtcaggtttatcggaccgagccccgaggtcgtgaggaagatgggggacaaagtggaagcacgagccatcgcaattgccgcaggcgtaccggttgtcccggggactgacgccccaatcacctcccttcatgaggcacacgaattctctaacacatacggattccccatcattttcaaagctgcctacggaggcggagggcgaggaatgcgcgtggtacatagctatgaggaacttgaagagaattacacaagggcctactcggaagccctggctgcttttggtaacggggccttgttcgtagagaagtttatcgagaagcccaggcacattgaggtgcagatcttgggcgaccaatatggaaacatcctccacctgtatgagcgcgactgctccattcagagaaggcatcagaaagttgtcgagatcgctcctgccgcccacctagatccccagctaaggaccagactcaccagtgactccgttaagctggcaaagcaggtcggctacgagaatgccggtactgttgaattcctggttgatagacatggcaagcactatttcattgaggtgaactccagattgcaggtggagcacaccgtcactgaagagattaccgacgtggacctcgtccatgcccagatccatgtggcggaggggcgcagtctccctgatctgggtctgcgtcaggagaacattcgtattaacgggtgcgcaatccagtgccgagtcacgactgaggatcccgcacggtccttccaacctgatacgggtaggattgaggtcttccgcagcggtgagggcatgggcatccggctggataatgcctccgctttccagggtgctgttatttctcctcactatgattcccttctggtgaaagtaatcgcccatggcaaggaccaccccacggccgcgactaaaatgtcacgagcactggccgaattcagggtgcgcggtgtgaaggtaagacgtcaccaggcccagccccttgctgctgctttaggcaggccttgtggtcaggaggccagaaggccccaggccgcagtcacagctcctaccggaccaggcagccccacactggtgcgagtcccccccgcagccagagttttgtcaagtcgcctgggagggccctcccagaccacgccagagacatccacagaagtgtctcctaccattttgctttag

SEQ ID NO: 131351 - DNA, 3537 bp, synthetic construct
  misc_feature 1..3537: note = Description of Artificial Sequence: Synthetic coding sequence
  source 1..3537: mol_type = other DNA
atgttaaagtttagaactgtccatggcgggctgaggctcctaggaatccgcaggaccagcacagcacccgctgctagccctaacgttcggaggttagagtacaaaccaatcaaaaaagtcatggttgccaatcggggggaaatcgcgattagagtatttagagcatgcacggagctgggtataagaactgttgccatatatagcgaacaggacaccggtcagatgcatcgccaaaaagcggacgaggcttacctgattgggaggggtcttgctcctgtccaggcatacctgcatattcctgacattatcaaggtggccaaggaaaataatgtcgacgctgttcatccggggtatggctttttgtctgaaagggccgattttgctcaggcctgccaagatgccggagtcagattcataggccctagtcccgaagtggttaggaagatgggcgataaggttgaggccagggcaattgccatcgcagccggagtcccggtggttcctggaacagatgcacccatcacttccctgcatgaagcccacgaattctctaatacctacggctttccaatcatttttaaagccgcttacggtggtggcggccggggaatgcgcgtcgttcactcctacgaggagctcgaggagaattacaccagagcctactcagaagctttggctgcttttgggaatggagccctgttcgtggaaaaattcatcgaaaagcctaggcacatagaggttcagatcctgggcgatcagtatggaaacatcttacacctctatgagcgcgactgttcaatccagcgcaggcaccagaaggtggtggaaatcgcaccagccgcccatttggatcctcagctgaggacgcgcctcacaagcgattcagtcaagctggcgaagcaagtgggatacgaaaacgccggtactgtggaatttctggtggaccggcatgggaagcattatttcatagaggtgaactctcggttacaagtagagcacaccgtgaccgaagaaatcactgatgtggacctagttcacgcgcagatacacgtggcagagggacgcagtctgcctgatcttggcctcagacaggagaatatcagaatcaatgggtgcgccatccagtgtagggtgacaaccgaagaccctgcaagatcgtttcagcctgatactgggaggatcgaggttttccgaagcggggagggcatgggaattaggcttgataacgccagcgcctttcagggtgctgttatctctcctcactatgattcactcctggtgaaggtcattgcccacggtaaggaccaccccaccgctgctaccaagatgtcaagggccttagcagaattcagagtgagaggcgtcaaaaccaacatagcctttctccagaatgtgctgaacaaccagcaatttctcgcaggaactgtggacacccaatttatcgacgagaatccggagctatttcagctgcgccccgcgcagaatcgggcacagaagcttctccattacctgggtcatgtaatggtcaatggccctaccacccctattcccgtaaaggcctccccctcacctaccgaccccgtggttcctgcagttcccatcggccctccccccgctggtttcagggatatccttttacgcgaaggccccgagggatttgcaagggccgttcggaatcatcctggacttctgttaatggacactacatttagggacgcacaccagtcgctgctggctacccgcgttcgaacccacgatctcaaaaagatcgccccctatgtcgcacataatttttccaaactgttctccatggaaaattggggtggcgctacattcgacgtggcaatgcgatttctttacgagtgtccatggagacgtttgcaagaattgcgagagctcattcctaacataccatttcagatgctgctgagaggtgcaaacgctgtgggatataccaactatccagataacgtggtgtttaaattctgcgaggtggctaaggagaatgggatggacgtattcagggtattcgactcgttaaattatctaccaaatatgctcttaggcatggaggccgccgggtcagctggtggcgtcgtggaggccgccatctcgtacaccggagacgttgctgacccatcaagaaccaagtatagcctgcagtactatatgggcctggctgaagaactcgtgcgggcagggacccatatactgtgcattaaggatatggccggcctgctcaagcctacggcatgcacaatgctcgtatctagtctgcgcgacagatttccagatctgcccttgcacatccacacgcatgacacttctggcgcaggggtggcagccatgctcgcctgtgcccaggctggggcagatgtggttgatgtcgccgcagatagcatgagcggtatgacctcacagccctctatgggtgccctcgtcgcctgtacaagaggtacccctctggacacagaggtccccatggagcgcgtttttgattattctgagtactgggaaggcgccagggggctgtacgccgcattcgattgcactgctactatgaagtcagggaacagcgatgtgtacgaaaacgaaatacccggtggccagtatacaaacctccacttccaagcccactctatgggtctgggatctaagttcaaggaagtcaagaaagcttacgtggaagccaaccagatgcttggggacttaattaaagtcacgccatcatctaagatcgtcggcgatctggcacagtttatggtccaaaatggactctccagggcggaggctgaggcccaggcagaggagttatctttcccgagatcagtggttgaatttttacaggggtacatcggagtcccgcacggaggcttcccagaaccttttagaagtaaagtactcaaggacttacctcgggtggagggacgccctggagctagtctccctccccttgatctgcaggccttggagaaagagttggttgatcgtcatggagaagaagtgaccccagaggacgtgctgtcagccgcaatgtacccggacgtgttcgctcacttcaaagacttcaccgctactttcggcccccttgacagtctaaatacaagactgttcttgcagggcccaaaaattgccgaggagttcgaagtggagctggaaagggggaagaccctgcatattaaggccctagcggtgagcgatttaaacagagccggacagcgacaggtgtttttcgagcttaacgggcagctgcgttctattctcgttaaagacacccaggctatgaaagagatgcatttccacccaaaggcgctgaaagatgttaaggggcagataggagcacccatgcccgggaaggtcattgatatcaaagtcgtggcaggggctaaagtagccaagggccagcccctatgtgtactctccgcaatgaagatggaaacggtggtcacatcccccatggaaggcactgtacgcaaagttcacgtcaccaaagacatgaccctagaaggtgatgatctcatactggagatagagtag

SEQ ID NO: 131352 - DNA, 3537 bp, synthetic construct
  misc_feature 1..3537: note = Description of Artificial Sequence: Synthetic coding sequence
  source 1..3537: mol_type = other DNA
atgctgaagtttagaacagtgcacggagggctcaggctcctcgggattcgaaggacttctactgcccctgcagcgtctcctaacgtgcgtagactagagtacaagcctattaaaaaggtgatggtggccaaccggggggagattgcgattcgagtatttcgagcttgcactgaactgggaattcggaccgttgcaatttactcagaacaggacactgggcaaatgcacagacagaaggccgatgaggcctacttgattggacgcgggctggctcctgttcaggcttacctccacatccctgacatcatcaaagtggcaaaggaaaataacgttgatgccgtccacccaggttacgggttcctgtccgagcgcgcggattttgctcaggcgtgccaggacgctggtgttaggttcattggtccttctccagaagtcgttcgaaaaatgggagataaggtggaggccagagccatcgcaatcgctgccggagtgcccgtggtacctggaacggatgcaccaattaccagtttgcacgaagcccatgagttctcaaacacatacggtttccccatcattttcaaggcggcttacggaggagggggaaggggcatgcgggtagttcatagctatgaagagcttgaagagaattacactcgggcttactcagaagccctcgctgcatttggcaacggcgcattgtttgtggagaagttcatcgaaaaaccacgacacatagaagttcagatactgggtgatcaatatggaaacatcctgcacctctatgagcgagattgtagcatccagcggcggcaccagaaggtggtggagattgcaccagccgcccaccttgacccccagttgagaaccagacttacttctgatagcgtcaaattggcgaagcaggtgggttatgagaacgccggtacggtggaatttcttgtggaccgtcacggaaagcattatttcatcgaggtgaatagtagactgcaggtagagcatacagtcacagaggagattaccgatgtggacctggttcatgctcagattcacgtagctgagggaagaagtctgccggacctggggctaagacaggagaatattcggataaacggttgcgccatccagtgtagagttactaccgaggacccagctcgctcattccagcccgatacaggacggatcgaagtattccgtagcggagaggggatggggattcgactggataatgctagtgccttccagggagcagttatatccccccactacgatagcttacttgtgaaagtgatagcacacggtaaggaccaccctacagcagccaccaaaatgagccgcgcactggccgagtttagggtccgcggcgtgaagaccaacatcgcctttcttcagaatgttttgaataatcagcagttcctcgccggaacagtcgatacgcagtttattgatgagaaccccgaactgttccagctccggcctgctcagaaccgggcccagaaacttctgcattacctcggccatgtaatggtgaatggcccaacgacacctatccctgtaaaagcctctccttcacctactgacccagtagtgcccgccgtaccaatagggcctcctccagcaggctttcgcgacatcctactgagggagggtcccgaggggtttgctagagctgttcggaaccatcccggactactccttatggatactactttcagggacgctcaccaatccttgctggctacccgcgtgcggacacacgacctgaaaaagatcgccccatatgtagcccacaactttagcaaacttttttccatggagaactggggtggcgctacattcgacgttgcaatgaggtttctgtatgagtgtccctggcgtcgactgcaagagctgcgggagctcatacctaacatcccctttcaaatgttgttaagaggagctaatgctgttgggtatacaaactaccctgataatgtcgtgtttaagttttgcgaggtggccaaggagaatggaatggacgtctttcgtgtattcgactctctcaactacttgccaaacatgctgctcggcatggaggccgcaggaagtgccggcggtgtggtggaggctgctatcagctatactggggatgtagccgatcctagtaggacaaagtacagtctgcagtattatatgggccttgccgaagaactcgtgcgggccggtacccatattttgtgtatcaaagatatggccggcttgctgaaaccaaccgcttgcacaatgctggtatcatctctaagggatcgttttccggacctccccctgcatatccatactcacgatacctccggagctggagtcgcggccatgctggcatgtgctcaagccggcgcagacgtcgtggatgtggccgctgacagcatgtccggcatgacctcccaaccatctatgggggccttggtcgcttgtaccagaggaacgccgctcgatacagaggtacctatggagagagttttcgattatagcgagtattgggagggcgcccgaggactgtacgccgcatttgactgcacggccacgatgaaatcaggcaatagcgatgtgtacgaaaacgaaataccaggcggtcagtacacaaacctgcacttccaggcccactccatgggacttggcagtaagttcaaagaagtgaagaaagcctacgttgaggcaaatcagatgctgggagacctgattaaggtgactccttcctccaagatcgtcggcgacctggcacaattcatggtacaaaacggcctcagtagagctgaggccgaggcccaggccgaggaactgtcgttcccaagatctgtagtagagttcctccagggctatatcggcgtgccccacggtggcttccccgaacccttccgatctaaggtgttaaaagatctgccacgagttgaagggaggcctggagcctcgctgcccccgctggatctgcaagcccttgagaaagagttggttgatagacacggggaagaggtcacccctgaggacgtgctgtcagccgcaatgtaccctgatgtcttcgcccacttcaaagattttacagcaacttttggccccctagacagtctcaatacccgtctcttcttgcaggggcccaaaatcgccgaagagttcgaggtcgaactggaacggggaaaaaccctgcacattaaggcccttgccgtctctgaccttaacagagctgggcagaggcaggtcttctttgagctcaacggacagttgagatcaatcctggtgaaggatactcaggcgatgaaagagatgcacttccaccccaaggccctgaaggacgtgaagggccagattggggcgcccatgccaggcaaagtgattgacatcaaagtcgtcgctggagctaaggtggctaagggccagcccctgtgcgtgcttagcgccatgaagatggaaacagtggtcaccagccctatggaaggaactgtgcgtaaggtacacgtaaccaaggacatgactctggagggagacgacctgatactggaaatagagtag

SEQ ID NO: 131353 - DNA, 3537 bp, synthetic construct
  misc_feature 1..3537: note = Description of Artificial Sequence: Synthetic coding sequence
  source 1..3537: mol_type = other DNA
atgctgaagttcagaactgtccatggaggactgcgccttcttggcatcaggcggacctctacagcgcctgccgcatcccccaacgtgcggagactggagtataagcccattaagaaagtgatggtggccaaccggggcgagatcgctattagggtctttcgggcctgcacggagctggggatcaggaccgtcgcgatttactcagagcaggacacaggccaaatgcatcgtcaaaaggcggacgaggcctacctcatcgggcgcgggctggcccctgtgcaggcctacctgcacatccccgatattattaaggtggctaaagagaataacgtagacgccgtacatcccggatatggcttcctgtccgaaagggctgatttcgctcaggcttgccaggacgctggcgtccgcttcataggtcccagtcctgaggtggttcgaaagatgggggataaggtggaggcaagagccatcgctattgccgctggcgtgccagtggtgccaggcaccgatgctccaatcacgtcgctgcacgaggcacatgaattttcgaacacctacggttttcccataatattcaaggctgcctacggaggcgggggccgaggcatgcgggtggtccattcatacgaagaactggaggaaaactacactagggcatacagtgaggccctggccgccttcggaaacggtgcactgttcgtggagaaatttattgaaaaacccaggcatatagaggtgcagattcttggcgatcagtacggtaacattcttcacttgtacgagcgcgattgttcaattcagcgtcggcatcagaaggttgtggagattgccccagccgctcatctcgaccctcaattaaggactcgtctgacctccgactccgtcaaattagcaaagcaggttggatatgagaatgccggaaccgttgaattcctcgtggacaggcacggaaagcattatttcattgaggttaattcaagactgcaggtggaacacaccgtcacagaagaaatcacagacgtagacctggtgcacgcccagatccacgtggccgagggtagatcattgccggatctaggactgcgacaggaaaacattagaattaatggttgcgccatacagtgtcgcgtcaccacagaggacccagcccggagtttccagcctgatactggtaggatcgaagttttccggtcaggggagggaatggggatcaggttggacaacgcaagcgcctttcagggcgcagttatcagcccacattatgactcattactcgtcaaggtcatcgcccatggcaaagaccaccctacggctgccactaaaatgtccagggctctggctgagttccgcgttcgcggggtgaaaaccaacatcgcttttttacagaacgtgctgaacaaccaacagtttctggctggaacagtcgatactcagttcattgatgaaaaccctgaactgttccagctccgaccagcacagaatcgggcccagaagctcttacactatctagggcatgtcatggttaatggtcccactacacccatccctgtgaaagctagcccctccccaacagacccagtcgttcctgctgtgcctatcggccctcccccggccggctttcgcgatattttgctgcgggaaggtccagaaggattcgcccgcgctgtgagaaaccacccgggcctgctgctgatggacacaacctttcgcgacgcacatcagtctctcctcgccacacgagtgcggactcacgatcttaaaaaaatcgcaccctacgtggcccacaacttcagtaagttgttctctatggagaactggggcggcgcaaccttcgacgtggcaatgagattcctgtatgaatgtccctggcgtagactgcaggaactgcgggagctgattcccaatatcccgttccagatgctgctgaggggggcgaacgccgtgggctatactaattacccagacaacgtggtgttcaaattctgtgaagtagccaaggaaaacggcatggacgtctttagggtatttgattcactaaattacttaccaaatatgctgctgggtatggaggcagctggaagcgccgggggtgtggttgaggctgcaatcagttatacaggggacgtggcagatccctctagaacgaagtactcacttcaatactatatgggactagctgaagagctcgtgcgagcaggtacacacatcttgtgcataaaggatatggccggactgctcaagcctaccgcctgtacgatgttagtgtcttcgcttcgcgaccgcttcccagacttgcctctacatatccatacacacgatactagcggtgcaggcgttgctgctatgcttgcatgcgcacaagccggagcagatgtagtggatgtggcagccgattcaatgagcgggatgacctcccaaccttccatgggagcacttgtggcatgcactaggggcaccccgctcgacacagaagtgcctatggagcgcgtgtttgactactccgaatattgggaaggagccagagggttatacgccgcctttgactgtaccgctaccatgaagtccggaaactctgatgtctatgaaaacgagatccccggcggacagtacaccaacctccactttcaggcccactcaatgggacttggcagcaaatttaaggaagtgaagaaagcctacgtggaagcaaaccagatgctaggagacctcattaaagtcaccccaagtagcaagatcgtgggcgaccttgcccagttcatggtccagaacgggctttccagagctgaggcggaagcccaggcagaggagctcagtttccctcgttccgtggttgagtttttgcaggggtacattggcgtgccccatggtggattccctgaaccattccgcagcaaagtattgaaggacttgccacgagtcgaggggcggcccggcgccagtttgcctcccctcgatcttcaggcattagagaaggaactggtagaccgacacggcgaagaggtgacgcccgaagatgtactatcagctgcaatgtatcccgatgtttttgcgcacttcaaagactttacggcgaccttcggaccactcgatagccttaacacccgcctctttttgcaagggcccaaaattgcagaggagtttgaagtggaattagaacgcgggaaaaccctgcatatcaaggcactggcagtcagcgatcttaacagagcggggcaacgacaagtgtttttcgagctcaacggtcaactgaggagcatccttgtgaaagatacacaagctatgaaggaaatgcactttcacccaaaggcactcaaagacgtcaaaggtcagataggagctcccatgccgggaaaggtcatagatatcaaggtggtggccggggccaaggtggccaagggacagcctttgtgcgttctgagtgctatgaagatggaaaccgttgtgaccagcccaatggaagggacagtgcggaaagtccacgtcaccaaagatatgaccctggaaggggacgacctgatactggagatcgagtag

SEQ ID NO: 131354 - DNA, 615 bp, synthetic construct
  misc_feature 1..615: note = Description of Artificial Sequence: Synthetic coding sequence
  source 1..615: mol_type = other DNA
atgaggaaaatgctggctgcggtgagccgcgtactcagcggagcttctcagaaaccagccagccgggtgctagtcgcatcgagaaattttgcgaacgatgctaccttcgagatcaaaaaatgtgatcttcaccgactcgaagaagggccacccgtgacaacagttctgactagagaggacggtctgaagtattaccggatgatgcagacagtgagacggatggaactgaaggccgaccagctgtacaaacaaaagattatccgaggattctgccatctgtgtgacggccaattcctgctcccactgacccaggaggcttgctgcgtgggcctggaagcagggattaaccccactgaccatctcattaccgcatacagagcccacggttttactttcactcgggggttgtctgtgcgggagatcctcgcggagctgacagggcgcaagggtggatgtgccaagggaaaagggggttccatgcatatgtatgctaaaaatttttatggtggcaatgggatcgtgggtgcacaggttccgctcggcgctgggattgcgctcgcatgtaaatataacgggaaagatgaagtctgcctgaccctgtatggcgatggatag

SEQ ID NO: 131355 - DNA, 330 bp, synthetic construct
  misc_feature 1..330: note = Description of Artificial Sequence: Synthetic coding sequence
  source 1..330: mol_type = other DNA
atggagttgcagacttatcgctatcacggacattcgatgtctgacccaggtgtgagctatagaactagggaagaaatacaggaagttcggagcaaatccgatccaatcatgttactcaaggatcgaatggttaattctaacctggcatctgtggaggagctcaaagagatcgatgtcgaagtgcgaaaggagatcgaagatgctgctcagttcgcgaccgcagatcccgagcctccccttgaggagctggggtatcacatctattcttcagatccgccttttgaggtgcgaggggccaaccagtggataaagttcaagagcgtgtcctag

SEQ ID NO: 131356 - DNA, 543 bp, synthetic construct
  misc_feature 1..543: note = Description of Artificial Sequence: Synthetic coding sequence
  source 1..543: mol_type = other DNA
atgagaaagatgctagctgctgtctcaagagtgttgagtggcgcaagccagaagccagcctcaagagtgttagtcgcctctcgaaattttgcaaatgatgctacgtttgagataaaaaaatgtgatctgcacaggctcgaggaaggcccacccgtgacaacggtactgacgagggaggacggcctgaagtattatcggatgatgcagacggtcaggaggatggagctaaaggcagatcagctgtataagcagaagattataagaggattctgccacttatgcgacggacaagaggcatgctgcgtggggctcgaggctggaatcaatccaaccgatcatcttataaccgcctaccgtgcacatggctttacatttacaaggggtctcagtgtgagggagattctggccgagctcacggggagaaaagggggatgtgctaagggaaaggggggctctatgcacatgtacgccaaaaatttttacggagggaacggaattgtgggcgcccaggtcgtcaaggacgaagactgcgtgctcctgtag

SEQ ID NO: 131357 - DNA, 1287 bp, synthetic construct
  misc_feature 1..1287: note = Description of Artificial Sequence: Synthetic coding sequence
  source 1..1287: mol_type = other DNA
atgaggaagatgctcgccgcagtttcccgggtgttgtccggcgcaagtcagaaaccaaggcatggtctggctacactaccttccctcgtgagcatctccaggttgaaacagtcttctcacctcggtctaccaaaatgctgggattactcccattcattgaaaacacgccaggcatctagagttctggttgccagccgcaacttcgccaatgatgcaaccttcgagatcaaaaagtgtgacctacatcgattagaggaaggccctcccgtcacaactgtgctcactagagaagatggcctgaaatactatcgaatgatgcagaccgtgagacggatggaactgaaagcggaccagctatacaagcagaagattattcgcgggttctgccacctgtgtgatggacaggaagcctgctgcgttgggctggaggccgggattaaccccacagatcatctcatcacagcctatcgcgctcatggcttcacattcactaggggactatcagtgcgggaaattctcgccgagctgactgggaggaagggcggttgcgccaaaggcaagggtggatctatgcatatgtacgctaaaaacttttacggtggcaacggtatagtgggcgctcaagtcccactcggtgctggaatcgctctggcttgtaagtacaacggaaaggatgaggtgtgcctgacattatatggggacggcgccgcaaatcaaggccaaattttcgaagcctacaatatggccgcattgtggaagctgccttgcatcttcatttgcgagaataataggtacggaatgggcacctcagttgaaagggccgcggcaagcacagattactacaagcggggagattttattcctggcctgagggtcgacggaatggatattttgtgcgtgagagaggccacccgattcgcggcggcgtattgtcggagcggcaaggggccaattctgatggagctgcagacctatcgttatcacggacacagcatgtccgaccctggcgtcagttatagaactcgtgaggaaatccaggaagtaaggagcaagagtgacccaataatgcttcttaaggatcgcatggtgaacagtaaccttgccagtgtggaagagctcaaggaaattgacgtggaagttagaaaggagatcgaggacgcagcacagtttgccacggccgacccagagccccccctcgaggagttaggatatcacatatacagctctgacccccccttcgaggtgcggggagcaaaccagtggattaaattcaagagcgtctcttag

SEQ ID NO: 131358 - DNA, 366 bp, synthetic construct
  misc_feature 1..366: note = Description of Artificial Sequence: Synthetic coding sequence
  source 1..366: mol_type = other DNA
atgagaaaaatgttggccgctgttagcagggtcctcagtggcgcttctcagaaaccgttcgccggcagcccgcctcctagacacctgaccgtggggagaaagctttcttccagatatgaagtaacctttgaatccgcccaggccagccgagtgctcgttgcttcccgcaattttgccaatgatgcaactttcgagatcaagaagtgcgacctccaccgtttagaggagggcccacctgtcaccaccgttctgacccgcgaggacggcctgaaatattaccgaatgatgcaaactgttaggagaatggagctgaaggccgatcagctctacaagcagaagatcattaggggcttctgccacctctag

SEQ ID NO: 131359 - DNA, 366 bp, synthetic construct
  misc_feature 1..366: note = Description of Artificial Sequence: Synthetic coding sequence
  source 1..366: mol_type = other DNA
atgaggaagatgctagcagctgtttccagggtgctgagtggggccagccagaaaccgtttgctggtagccctccccctaggcacctcactgtggggcgcaagctgagttccaggtatgaagtcacctttgaatctgcacaggcctcacgagtgctcgtcgcaagcaggaattttgccaatgatgccaccttcgagattaagaagtgtgacctgcatcgcctcgaagaaggaccccccgtgacgacggttctaacacgggaagatggtcttaagtactaccgcatgatgcagactgttcggagaatggagctcaaagctgatcagctttacaaacagaaaattatccgaggtttttgccacctctag

SEQ ID NO: 131360 - DNA, 1173 bp, synthetic construct
  misc_feature 1..1173: note = Description of Artificial Sequence: Synthetic coding sequence
  source 1..1173: mol_type = other DNA
atgaggaaaatgttggcggccgtgtcacgggtcctgtcaggagcgtcgcaaaaaccagcctctagggtcctggttgcatcaagaaatttcgctaatgatgcaacattcgaaatcaaaaaatgcgaccttcatcgcctggaagagggccccccggttactacggtactgactcgcgaggatggacttaagtattatcgtatgatgcagacagttcgaagaatggaactgaaagccgaccaattgtataaacagaaaataatcaggggcttctgtcacctttgcgacgggcaggaggcttgctgcgtaggactggaggcagggatcaaccccaccgaccatctgattacagcttacagagctcacgggttcacatttaccagggggctttcagtgcgggagattttggccgagctgactggcagaaagggggggtgtgccaaggggaaaggcgggtcaatgcacatgtacgcaaaaaacttttacggtggcaatgggatcgtgggcgcccaagttcccctcggagccggcatcgccctggcctgtaagtataacggcaaagatgaggtctgcttaacactttacggagatggggctgccaaccaggggcagatctttgaggcatataacatggctgcattgtggaaactcccctgtatctttatttgtgagaataatcgctatgggatggggacgagcgtggagcgggccgcagcttcgactgattactacaaaaggggtgactttatccccggccttcgggtcgacggcatggacatcttgtgtgtgagagaggccacgcgattcgctgccgcctactgccggtcaggcaagggacctatcctgatggagctgcagacctatagatatcacggccacagcatgagtgatccgggagtctcctacagaacccgcgaggagattcaggaagtgcgctcgaagtctgacccaattatgctactcaaagaccgcatggtgaattccaatctggcttccgtagaagagctcaaggagattgatgtcgaggtgcgcaaagagattgaagacgcagcccagtttgccacggccgaccctgagccacccctcgaggagttagggtatcacatctacagttccgatccaccattcgaggttcggggagctaaccagtggattaagttcaaatcagtttcatag

SEQ ID NO: 131361 - DNA, 618 bp, synthetic construct
  misc_feature 1..618: note = Description of Artificial Sequence: Synthetic coding sequence
  source 1..618: mol_type = other DNA
atgaggaagatgctggccgctgtatctagggtgctatcaggtgcaagtcaaaagccaagacacggcctcgccaccttgccctccctggtatcaattagtcgtctcaaacaaagttctcacttgggtcttccaaagtgctgggattatagtcacagcctgaaaacacgccaggcatcccgggtgttggttgcctcacggaacttcgccaacgacgcaaccttcgagatcaagaaatgcgacctccaccgcttggaagagggacctcccgtcacgaccgtcctcactcgagaggatgggctaaagtactatcgaatgatgcaaacagtgcggcgcatggagctgaaggctgatcagctctacaagcagaaaatcatccgaggattctgccatttatgtgacggacaagaggcttgctgtgtgggtctggaggcagggatcaaccccactgatcatctgattactgcctatcgagctcacggctttaccttcacccgcgggttgagcgtccgtgagatactggctgagctgacagggcgcaagggtggttgtgccaagggaaaagggggcagtatgcatatgtacgcgaaaaacttctatggcggcaacgggatcgtttag

SEQ ID NO: 131362 - DNA, 1080 bp, synthetic construct
  misc_feature 1..1080: note = Description of Artificial Sequence: Synthetic coding sequence
  source 1..1080: mol_type = other DNA
atgcgcaaaatgctggccgccgtttcaagggtcttgtcaggcgccagccagaagccagcatccagggttctggtggcaagccgtaactttgcgaacgatgctaccttcgaaattaagaagtgcgacctccatcgactcgaggaagggcctcctgtcaccaccgtattgacccgcgaagacggcttgaagtattatcggatgatgcaaactgtgcgccgcatggagctgaaggccgatcagttgtacaagcaaaagattatcaggggcttctgccacctctgcgacgggcaggaagcctgctgcgttgggctcgaagcaggcattaatcccaccgatcacctgataactgcatacagggcacacggttttaccttcaccagaggtctgagcgtgagagaaattctcgccgagttaaccggtaggaagggagggtgcgccaaaggcaaaggaggctctatgcacatgtacgccaaaaatttttacggcgggaacgggatagttggggctcaggggcagatcttcgaggcgtataatatggccgctctgtggaaactgccctgcatctttatatgcgagaataaccgctacggtatgggaacgtccgttgagagagccgccgcctcaacggactattacaaacgcggagactttatccctggtctgcgggtcgacggaatggatattttgtgtgtgagagaggcaacacgcttcgccgcagcttactgtagaagtggaaagggaccaattttgatggaactgcagacctatcggtaccatggccattcaatgagcgaccctggagttagctaccgcacacgggaggaaatccaagaggtccggagcaagtcagatcccataatgctgctgaaagaccgtatggtgaactccaatctggcgagcgtagaagagttaaaagagatcgatgtagaggtgagaaaagagatcgaggatgcggctcaattcgccaccgcagaccccgagccacccttggaagagctcggataccatatttacagtagtgatcctcctttcgaagtgcgaggggcaaatcaatggattaagttcaagtccgtttcgtag

SEQ ID NO: 131363 - DNA, 129 bp, synthetic construct
  misc_feature 1..129: note = Description of Artificial Sequence: Synthetic coding sequence
  source 1..129: mol_type = other DNA
gctaatcagtggattaagttcaaaagtgtgaaggggagaaggaggagaggttatactttcagggggttgcccgacagcgtgctgaacttggtgaaggaagaagagaatccggtgaacgaaatccagtag

SEQ ID NO: 131364 - DNA, 1194 bp, synthetic construct
  misc_feature 1..1194: note = Description of Artificial Sequence: Synthetic coding sequence
  source 1..1194: mol_type = other DNA
atgcgcaagatgctcgccgctgtgtcccgagttctaagcggcgcctctcaaaaacctgctagccgggtgctggtggctagtcggaacttcgcgaacgatgcaaccttcgagattaaaaagtgcgatctacatcgcctggaagagggaccccccgtgacaaccgtcctgacacgcgaggatggcctgaagtactatcgtatgatgcagacagtgaggcgcatggagcttaaagcggatcaactatacaagcagaagattatccgggggttctgtcacctgtgcgatggacagtttctgctccccctcacacaggaagcttgttgcgtagggttggaggccgggattaacccgaccgatcatttgattaccgcctatagagctcatggctttacattcacacgcggactgagcgtgagagaaatacttgctgagctgaccggaaggaaaggggggtgcgccaaaggaaagggggggagcatgcatatgtatgccaagaatttctacggaggcaacggtatcgtgggagcccaagtgcccctgggtgctggaattgctctggcttgcaagtataacgggaaagacgaagtttgccttaccctgtacggcgatggtgccgctaatcaaggccagattttcgaagcctacaatatggcagccctatggaaactgccttgcatcttcatatgcgaaaataaccggtacggcatgggaacctctgtcgagagggctgccgcgtccaccgactattacaagaggggcgactttatccccgggctgcgagtggacgggatggacatcctttgcgtacgggaggccactaggtttgctgctgcctactgtaggagtggcaaaggacccattcttatggaactgcaaacctacagataccatggccattctatgagtgaccctggagtgtcctaccgaacccgcgaggaaatccaggaggtaagaagcaagagcgatccaatcatgcttctgaaggaccgcatggttaattctaacctcgcttctgtggaagagctgaaagaaattgacgtggaggtgcgaaaggagatcgaagatgccgcacagttcgccacagcagaccctgagccacctctggaggaattagggtaccatatttactcctctgatccacccttcgaggtgcgcggagccaaccagtggatcaaattcaagtctgtatcatag

SEQ ID NO: 131365 - DNA, 1167 bp, synthetic construct
  misc_feature 1..1167: note = Description of Artificial Sequence: Synthetic coding sequence
  source 1..1167: mol_type = other DNA
atgctggcagccttcattagccgcgttctcaggcgcgtcgcccaaaaaagcgctagaagggtgttagtcgcttcccggaattcaagtaacgatgcgacattcgagataaagaaatgtgacctttatctgctggaggagggtccgcccgtcaccactgtgctcacacgggcagaagggttgaaatactacaggatgatgctgaccgtacgtcgcatggagttgaaggccgaccaattgtataaacagaagttcatccggggattctgtcatctgtgcgacggacaggaagcttgttgcgtggggctagaggccggcattaaccctagcgaccacgtaataacatcctatcgcgcgcacggagtgtgctacaccagggggctgtcagtgcggtcaatcctcgccgaactgacaggacggcgcggcggctgtgccaagggtaaaggcggcagcatgcacatgtatacaaagaacttctatggggggaacggaattgtgggcgcccaggggcccttgggtgctggaatagctcttgcgtgtaaatacaagggcaatgacgagatttgcctgacactatatggcgacggcgctgcaaatcagggccaaatcgctgaggcctttaacatggccgccctgtggaaactcccttgtgtatttatttgtgagaacaatctctacgggatgggcacgtccacagagagggcagccgcatccccagattactacaaacgcggaaattttatcccgggcctcaaggtggacggaatggatgtattgtgcgtacgcgaggcgacgaaattcgctgcgaactactgtcgcagtggcaaaggacccattctgatggagttgcagacctacaggtatcatggacactccatgagcgacccaggcgtgtcatacagaactcgagaggaaattcaggaagttcgctccaagcgggacccaatcattattctgcaggacaggatggtgaacagcaagcttgcaactgtggaggagctgaaagagattggcgcagaggtgcgcaaagaaatagatgacgctgctcagttcgcaactacagatcctgagccacacctggaggagttagggcatcatatatacagttccgatagctcttttgaggtgagaggagccaatccctggattaagttcaaatctgtctcgtag

SEQ ID NO: 131366 - DNA, 1080 bp, synthetic construct
  misc_feature 1..1080: note = Description of Artificial Sequence: Synthetic coding sequence
  source 1..1080: mol_type = other DNA
atggctgcagtttccgggctcgttcgccgaccactgcgtgaggtgtcaggattgttgaagcgaagatttcactggaccgctcccgccgcacttcaggtgaccgtccgcgacgccatcaaccagggaatggacgaagaactggaacgcgacgaaaaagtgttcctgctcggtgaagaggtcgctcagtacgacggagcctacaaagtgtcgaggggcttatggaaaaaatacggcgacaaaaggatcatcgacacacccatttctgaaatggggtttgctgggatcgccgtgggggccgcaatggctggtctgagacccatttgcgaattcatgactttcaacttttccatgcaggccatcgatcaagtgatcaatagtgccgctaagacatattacatgtccggaggcctccagccagtccccatagtgtttagggggcccaacggagcctccgccggggtggctgcccaacactcgcaatgtttcgcagcatggtacggacactgccccggcctaaaggtggtgtctccatggaattctgaggacgcaaaaggattgataaaaagcgccatcagagataacaatccagtggtggtgctggagaacgaattgatgtatggcgtgccattcgaattccctcccgaggcccaaagtaaggatttcttgatcccaattgggaaagcaaagattgagaggcagggaacccacataaccgtggtgagccattcaaggccagttggtcactgtttagaggccgccgccgtgctcagtaaggagggcgtagaatgcgaggtgattaatatgcgaaccatcagacctatggacatggagacaatagaagcctccgtgatgaagactaatcacctggtcacagttgagggcggttggccacagtttggtgtgggggcagagatatgtgcacggatcatggagggccctgctttcaacttcctggatgctccagcggtccgcgttaccggggccgatgttcccatgccctacgccaagattctggaggacaactcaatcccccaggtaaaggatattatattcgcaatcaagaaaacgctgaacatttag

SEQ ID NO: 131367 - DNA, 1026 bp, synthetic construct
  misc_feature 1..1026: note = Description of Artificial Sequence: Synthetic coding sequence
  source 1..1026: mol_type = other DNA
atggccgccgtgtctggcttggttaggaggccactgagagaagttacggtccgggacgccattaatcaggggatggatgaggagctagaacgcgacgaaaaggtttttttgttaggggaggaggtcgctcaatacgatggggcttataaggttagccgagggctttggaaaaagtacggagacaagagaatcattgatacacccattagcgaaatgggatttgctgggattgcagtcggtgcggccatggctggcttgcgaccaatctgtgagttcatgacatttaacttctccatgcaagctattgaccaggtgatcaatagtgcagccaagacatattacatgtccggtggtctccaacccgtcccgatagtattccgtggcccaaacggggctagtgcaggtgtggccgctcagcattctcagtgtttcgccgcatggtacgggcactgccctgggttaaaagtggtgagcccctggaacagcgaggacgccaagggactgataaaatccgccattcgggataacaatccagtggtcgtgttagagaacgagttaatgtatggagttccctttgaatttcccccagaggcccagagcaaagactttctcatacccatcggcaaggcgaagatagagcggcagggcacccatatcacagtcgtttcacattcccggcccgttggccattgcctggaggcagccgctgtgctctccaaggagggcgttgagtgtgaggtcataaatatgagaactataaggccaatggatatggagacaattgaggccagcgtcatgaaaactaatcacctagtgactgtggaaggcggatggccccagttcggcgtcggcgccgagatatgtgccaggattatggaaggacccgcatttaacttcctggacgccccggccgttcgagtaactggagccgatgtccctatgccatacgccaaaattctagaagacaattccattccccaggtcaaggacatcatcttcgccatcaagaagacactgaatatctag

SEQ ID NO: 131368 - DNA, 1026 bp, synthetic construct
  misc_feature 1..1026: note = Description of Artificial Sequence: Synthetic coding sequence
  source 1..1026: mol_type = other DNA
atggccgcagtgagcggacttgtgaggagaccactcagagaggtgagtgggcttcttaagcggcggttccactggacagcgcctgccgctttgcaggtgaccgtgcgcgacgccatcaatcaggggatggatgaggagttagaaagagatgagaaagtgtttctgcttggggaagaagtggcacagtatgacggggcctataaagtctctcgaggactatggaaaaaatacggggacaaacgaatcatagatacaccaattagtgagatgggcttcgccggcatagccgtgggcgctgctatggcagggctccgccccatttgcgagtttatgactttcaacttttccatgcaggctatcgatcaagtgattaattctgccgctaaaacatattatatgtccggcgtggccgcccagcactcacagtgtttcgccgcttggtatggccactgtccaggcctaaaggtcgtgtccccctggaatagcgaggatgcaaaggggctgattaaaagtgccattcgggacaataatcctgtagtggtactcgagaacgagttgatgtatggggtaccatttgaatttccgcccgaagcacagtccaaggattttctgatccctatcgggaaagccaaaatcgaacgacaggggacacacatcactgtcgtctcacacagccggccagtcggacattgtttggaggctgccgctgtgttgagcaaggaaggcgtggaatgcgaagtgattaatatgaggactattcggcccatggatatggagaccattgaagcaagcgtcatgaaaacgaatcacttggtaactgttgaggggggatggccacagtttggagtcggggccgaaatctgcgcacgtatcatggagggtccagcttttaatttccttgacgctcctgcagttagagtcaccggggcagacgtgcctatgccatatgccaaaattctggaagataattccattccacaggtgaaggatattatcttcgccattaagaaaacgttaaatatctag

SEQ ID NO: 131369 - DNA, 1236 bp, synthetic construct
  misc_feature 1..1236: note = Description of Artificial Sequence: Synthetic coding sequence
  source 1..1236: mol_type = other DNA
atgaaggccgccagatttgtccttcggtcagccgggtccctgaatggggctggcctggtccctagagaagtcgaacatttttcaaggtattccccatctcctctctctatgaaacaactccttgacttcggctctgaaaatgcctgcgagcgtacctcatttgcctttctgaggcaggagctaccggttcgtctggccaatatattaaaagaaatcgacatcctgccaacacagctggtaaacaccagttctgttcagttagtgaagtcctggtacatccagtccctgatggatctcgttgagttccatgagaaatcccctgatgaccaaaaggctcttagtgacttcgtcgatactctgataaaggtgaggaatcgccatcacaacgtggtacctaccatggcacaagggattatcgaatacaaggatgcctgtaccgtggaccccgtgaccaatcaaaacctgcagtacttccttgacagattctatatgaatcggatctcaactagaatgctgatgaatcaacatatcctcattttctcggattctcaaacaggcaaccctagccatatcggaagcattgaccctaactgtgatgtggtggctgttgtgcaggatgcctttgaatgcagcagaatgctgtgtgatcagtattatctgtcatctcccgagctgaaactgacccaagtaaatgggaaattcccggatcagcctatccacatcgtgtatgtgccgtcacatctccatcatatgttatttgaactctttaaaaatgcaatgagagccaccgtggaacatcaggagaatcaacccagcctgaccccaattgaagtcatcgtggtattgggcaaagaggacctcaccatcaaaatctcagatagaggcggcggtgtaccgctgcgaattatagacagactgtttagctacacatactcaaccgcgcccacccctgtaatggacaattctagaaatgcgccactggccggcttcggttatggactgcccattagccgcctgtacgccaaatacttccagggagatctgaacctttactctttaagcggctacggcaccgatgctattatctacttaaaggcgctctcttcggaatctatcgagaagctgccggtttttaacaaatctgcctttaaacattaccagatgtccagcgaggctgacgactggtgcatcccgtcaagagagccgaagaacctggcgaaagaggtggccatgtag

SEQ ID NO: 131370 - DNA, 1128 bp, synthetic construct
  misc_feature 1..1128: note = Description of Artificial Sequence: Synthetic coding sequence
  source 1..1128: mol_type = other DNA
atgaagcagttgttggacttcggaagtgaaaacgcatgtgagagaactagctttgcttttttaagacaggagctccccgttagattagccaacatcttaaaggagatagatatcctgccgacacagctagtgaatacctcttcggtgcaactcgtaaagagctggtatatccagtctttgatggacctcgtggaatttcatgagaaatcccctgatgaccagaaggcactcagcgattttgtagacacgctcatcaaggtgcgaaatcgtcaccacaacgtagtccccaccatggctcaggggattatagaatacaaagatgcatgtactgtggaccctgtcacgaatcagaacctccagtattttctggatcgcttttacatgaaccgaatatcaacacgcatgttgatgaatcagcacatcctgattttctctgactcccagactgggaatccttcacacatcggatctatagatcctaattgcgacgtagtggcagtggtgcaggacgcatttgagtgctctcgtatgctttgcgatcagtactacctctcatctccagaactgaagctgactcaggtcaacggtaaattccctgaccaaccaatccacattgtgtatgtcccctctcacttgcaccacatgctcttcgagctgtttaaaaacgctatgcgtgctacggtcgagcaccaggaaaaccagccttcactgaccccgattgaagtgatagtggttttgggaaaggaggacctgacaatcaaaatttccgaccgaggtggaggagttccattgcgtataattgacagactctttagttacacatatagtaccgcaccaacgcccgtgatggacaatagccggaacgctccattggctgggttcgggtatggactcccaatatcaagattgtacgcaaagtatttccagggggatttgaacctgtatagcctgtcagggtacggcactgatgctattatctatctgaaagccttgtcctctgaatctatagagaagctgcctgtgttcaacaagtcagccttcaaacattatcaaatgagttcagaggccgatgactggtgtattccttccagagaaccaaagaatttggcaaaggaggtggctatgtag

SEQ ID NO: 131371 - DNA, 1614 bp, synthetic construct
  misc_feature 1..1614: note = Description of Artificial Sequence: Synthetic coding sequence
  source 1..1614: mol_type = other DNA
atgcctgcacccacccagcttttttttccactgatacgtaactgcgagctgtcacggatttatggcacagcctgttattgccaccacaagcacctgtgctgctcctcttcttacattccgcagtcgaggctgaggtatactcctcaccctgcgtacgcaactttctgcaggccaaaggagaactggtggcagtatacacagggcagacggtacgccagcacgccccaaaaattctatttgacacccccccaggtgaatagcattctaaaggccaacgaatactcttttaaagtgccagaattcgacggtaaaaacgtgtcgagtatccttggtttcgactccaaccagcttccagcgaacgctcctattgaggaccgcaggtccgccgctacatgcttgcaaactagaggaatgttgttaggcgtctttgatggccacgcagggtgcgcgtgtagtcaggccgtgtccgagaggttgttttattatatcgccgttagcctattgccacatgagacgcttctggagatcgagaatgcggttgaaagtggccgcgcactgctccctatcctgcagtggcataagcacccaaatgattatttttccaaggaagcaagcaagctgtactttaattctctccggacttactggcaagagctgatcgatctcaataccggtgagagcaccgacattgacgtgaaagaagctctaattaatgcatttaagaggcttgataatgacatcagcctggaggcccaagtaggtgatcctaacagcttcctaaactatctggtgcttcgcgtcgccttcagcggggcaactgcatgtgtagcccacgttgatggcgtggatttacacgtagctaacacaggcgacagtcgggccatgctaggcgtgcaggaagaagatggaagctggtccgcagtgaccctttctaatgatcacaatgcccagaatgaaagggagcttgagcggctaaagctagaacaccctaaatcagaagccaagtctgtggttaagcaagacaggcttctcgggctgctcatgccgttccgagcgttcggagacgtcaaattcaaatggagcatcgacctgcagaagcgagtcatcgaatcaggccctgatcagctaaatgataacgagtacacaaagttcattccacccaactaccacacccccccatatctgactgccgagcctgaggtgacttatcaccggctgcgaccccaagataagtttctcgtgctggctaccgatggactctgggagaccatgcatcgccaggacgtggtgcgaatcgtgggtgagtaccttactgggatgcatcaccagcagcccattgccgtgggggggtacaaagtgaccctcgggcagatgcacggtctgctgacagaacggcgcactaagatgtccagcgtatttgaggatcagaatgccgccactcatctcattaggcacgctgtgggcaataatgaatttggaaccgttgatcatgaaaggctgtccaaaatgttgagcctcccagaggaacttgcaaggatgtaccgagacgatattacaatcattgtcgtgcagtttaatagccatgttgttggggcctatcagaatcaagaatag

SEQ ID NO: 131372 - DNA, 1689 bp, synthetic construct
  misc_feature 1..1689: note = Description of Artificial Sequence: Synthetic coding sequence
  source 1..1689: mol_type = other DNA
atgtgcgtctgcccaggccctcgtcgtatcggcatccccgttagaagctcctcactgcctctgttcagcgatgctatgccagcccctacacagctgtttttcccactgatacgtaattgtgagctgtcaaggatttacggaaccgcctgttattgccaccataaacatctgtgctgttcgtcgagttacatccctcagtccaggcttcgatacaccccccatcccgcatatgccaccttctgtcgaccaaaggagaattggtggcagtacacacaggggaggagatacgcctccaccccgcagaagttttacctaacaccacctcaggtgaactccatcctcaaggccaacgagtatagctttaaggtccctgagtttgatggcaagaacgtaagctctattttgggtttcgattccaatcaactgccagcaaacgcccctatcgaggaccgcagaagtgccgcgacatgccttcagacccgcggcatgttgcttggggtcttcgacgggcacgctggctgcgcctgttcccaagctgtcagcgagcgactgttctattacattgctgtgagtctcctgccccacgagaccctgcttgagatagagaatgctgtcgaatccggacgcgctttgttgcccattctgcagtggcacaagcatcccaatgattacttttctaaggaagcatccaagctgtactttaactccctacgtacgtattggcaggagttaatcgaccttaacacaggtgagagtactgacattgacgtgaaagaagcactgattaacgccttcaaaaggctggataacgatatcagccttgaggcccaggtcggagatccgaattctttccttaactatcttgtcttacgtgtggcttttagcggtgctaccgcctgtgtggcccatgtggatggcgtggatttacacgtcgccaataccggagactctcgggccatgttgggagttcaagaggaagacgggtcctggtctgcagtgacgctgagcaacgatcacaatgctcagaatgaaagggaacttgaacgcctcaaactggaacacccgaaatctgaggcgaagagcgtggtgaaacaagacaggctgctgggtctgctgatgcccttcagggccttcggcgatgtcaaatttaagtggtccatcgatttgcaaaagcgtgtgatcgaatcaggcccagaccagctgaatgataatgagtataccaaattcataccccccaactatcacacgcccccctacttgactgcggagcccgaggtgacttaccatcgcctgcgaccccaagataagtttctggtcctggctaccgacggactttgggaaacaatgcaccgccaggatgtcgtgaggatcgtgggagaatacctgaccggcatgcaccaccagcagcctatcgccgtgggcgggtataaggtgactcttggccagatgcatggactgctcacggaacgcagaacgaaaatgagcagcgttttcgaagatcagaatgcagcaacacacttgatccgtcacgcagttggcaataacgagtttggcacagttgaccacgaacgtctctcgaaaatgctttctctgccagaggagctcgccaggatgtaccgggacgatatcacgatcatcgtggtgcagtttaattctcatgttgtgggcgcctaccagaaccaagagtag

SEQ ID NO: 131373 - DNA, 1614 bp, synthetic construct
  misc_feature 1..1614: note = Description of Artificial Sequence: Synthetic coding sequence
  source 1..1614: mol_type = other DNA
atgcctgcccctacgcagctgtttttcccgcttatccgcaattgcgagctctctaggatttacgggactgcctgctactgtcaccataagcatctgtgttgttcatctagttacattccccaatctcgactacgctatacaccccatcccgcttacgccacattttgccggcctaaggagaattggtggcaatacactcaaggccggcgttatgcttcaacccctcagaagttctacctgacacctccccaggtgaacagtatcctgaaagcaaacgaatattccttcaaagtgccagaattcgatggaaaaaacgtttctagcatcctgggcttcgacagcaatcagcttcctgcaaacgcgccgattgaggatcgaagaagtgccgccacatgcctgcagacccgcgggatgctattgggggtctttgacggccacgctggctgcgcttgtagtcaggccgtaagcgagcggctgttctactacatcgcagtgagcttgttaccgcacgaaaccctgttggagattgagaatgctgttgaaagtgggagggctctcctccccattcttcaatggcataagcatcccaatgactacttttccaaagaagcgagcaaactgtactttaacagcctgcgcacttactggcaggaactgattgatctgaacaccggcgagagtactgacattgatgttaaagaggccctgattaatgctttcaagagattggataacgacatcagcctggaggctcaagtcggggatccaaactctttcctcaattatttagtgcttcgcgtggcatttagtggagctacagcctgtgtagcccacgtggacggagtggaccttcatgtggccaataccggcgattcccgagccatgctgggtgtgcaggaggaggatggatcctggagcgctgtgacactgtccaatgaccacaacgcacagaacgaacgggaactggaacgcctgaagctggagcaccctaaatccgaggctaagtccgtcgtcaagcaggatagactcctgggactgctcatgccgttccgcgccttcggggatgtcaaattcaaatggagcatagacctccagaaacgcgtgattgaatctgggcctgaccaactcaacgataatgagtacacaaaattcattcctcctaattaccacacacctccttatctcactgcagagccggaggtcacatatcatcgcctcagaccgcaggacaaattcctcgtactggccacggatggcctctgggagacaatgcatagacaggatgttgtgaggatcgtaggagagtatctgacaggaatgcatcaccaacagccgattgcagtaggggggtacaaggtgacactaggtcagatgcatggtttgctgacagagcgcagaaccaaaatgtcctccgtgtttgaggatcaaaacgctgctacccatttaattaggcatgctgttggaaataatgaatttggtacagtggatcacgagcggctgtctaagatgctttctctgccagaagaactggctagaatgtaccgggacgatattaccatcatcgttgttcaatttaatagccatgtcgtgggggcctatcagaaccaggaatag

SEQ ID NO: 131374 - DNA, 231 bp, synthetic construct
  misc_feature 1..231: note = Description of Artificial Sequence: Synthetic coding sequence
  source 1..231: mol_type = other DNA
atgcctgcccccactcagttgttcttccctcttatacggaactgtgagttaagcaggatttacggaacagcatgttattgtcaccacaaacacctgtgctgctcttcttcatatattccccagtcccgcctacgatacactccccacccagcctatgcaacattctgtagacccaaggaaaattggtggcagtatacacaaggcaggcggtatgccagcacccctcagtag

SEQ ID NO: 131375 - DNA, 387 bp, synthetic construct
  misc_feature 1..387: note = Description of Artificial Sequence: Synthetic coding sequence
  source 1..387: mol_type = other DNA
atgcccgctccaacacaactcttcttccccttaatacggaactgtgagctcagccgtatatacggtacagcatgttattgccaccacaagcatctctgctgctcctcgtcatacattccacagtcgagactgcggtacactcctcatccggcttacgcaaccttttgtcggcccaaagagaattggtggcagtatacacagggacgccggtacgcctccactccccagaagttttaccttaccccaccccaggtgaactccatcctcaaggccaatgagtacagttttaaggtgcctgaatttgacggaaaaaacgtctcttctatccttggcttcgactcgaaccaactccccgcaaacgcccctatagaagaccgcagaagctag

SEQ ID NO: 131376 - DNA, 699 bp, synthetic construct
  misc_feature 1..699: note = Description of Artificial Sequence: Synthetic coding sequence
  source 1..699: mol_type = other DNA
atgccagctccaacgcagctgttctttccgctcatccgcaattgtgaactttctaggatctatggaaccgcctgttactgccaccacaagcatctctgctgttcttcaagctacatcccgcagtccagactgcgctacaccccccaccccgcctacgcaacattttgtagaccaaaggagaactggtggcagtacacgcagggtcgtaggtacgcttcaacaccccaaaaattctacctgacccccccacaagtaaatagcattctcaaggctaatgaatactcctttaaggtgccagagttcgacggcaagaacgtgtctagcatcttgggcttcgacagcaaccagcttcctgccaatgcgcctattgaagatcggagaagcgctgctacgtgcctccagacacgcgggatgctgctgggcgttttcgacggccacgccggatgtgcctgctctcaggctgtttctgagcggctgttctactatatagccgtctcattgctgccgcatgaaactctgctcgaaatcgaaaatgctgtcgagtctgggagagcgttactccccattctgcaatggcacaaacacccaaatgattatttctctaaggaagccagcaagctttattttaacagcctgaggacgtattggcaggaacttatagatctaaatacgggggagtcgacagacatcgatgtgtag

SEQ ID NO: 131377 - DNA, 219 bp, synthetic construct
  misc_feature 1..219: note = Description of Artificial Sequence: Synthetic coding sequence
  source 1..219: mol_type = other DNA
atgcccgcacctacacaattattctttccacttatcagaaattgtgagctgtcacggatttacggcacagcatgttactgtcaccacaagcatctgtgttgcagcagcagctacattcctcagagtcgactgcgctatactccccatccagcctatgcaaccttttgtagacctaaagagaattggtggcagtacactcaggggaggaggtacgcttag

SEQ ID NO: 131378 - DNA, 1614 bp, synthetic construct
  misc_feature 1..1614: note = Description of Artificial Sequence: Synthetic coding sequence
  source 1..1614: mol_type = other DNA
atgcctgcccctacacagctctttttcccgctgatcaggaattgcgaactttccagaatatatggcaccgcctgctattgccaccataagcatctctgctgcagtagcagctacatcccccagagtcgactccgctatactccacatcctgcatatgccactttttgcaggcccaaagagaactggtggcagtacacccagggacgccggtacgcgagcacaccccagaaattctatctgactccaccccaagtgaatagtattctcaaagccaatgagtacagcttcaaggtgcctgagttcgatggcaagaatgtgagctccatcttgggatttgactccaaccagttgcccgcaaacgcccccatcgaagatcgtcgatccgccgccacttgcctccagacacgaggtatgcttctcggagtctttgacgggcacgccggctgtgcctgcagccaggctgtgtccgaaagactcttctactacattgcagtgtctttgttgcctcacgagactctgcttgaaatcgagaacgccgttgagagcggtagggccctgctccccatactgcagtggcacaagcacccgaacgactacttcagcaaggaagcaagtaagctttatttcaatagcctcagaacttattggcaggagctgattgacctaaacaccggcgaatctactgacatcgatgttaaggaggccttgattaatgcctttaaaagattggacaatgacattagtctcgaggcacaggtgggtgaccccaactctttcctcaactatttggttcttcgcgtcgcctttagtggagccacggcatgtgtcgcacatgtcgacggtgtagatctacacgtggctaacaccggagattcaagggccatgctcggagtgcaggaggaggacggatcctggagcgccgtgactctctccaatgaccacaatgcacaaaatgagcgggagctggaacgattaaagttggagcacccgaagtctgaggccaagtccgtggtgaagcaggacaggctgctggggttgctgatgccttttagggcgttcggagacgttaagttcaaatggtcaatcgacttgcagaaaagggtcatcgaatcaggccctgaccagctcaatgacaacgaatacactaaatttattccacctaattaccacacccccccctacctgacagccgagccagaggtgacctaccaccggctgcggccccaagacaaattcctagtgcttgctaccgatggcctgtgggagacgatgcacagacaggacgtggtacggatcgtgggtgagtaccttaccggaatgcaccatcagcagcctatcgcagtaggcggttacaaggttaccttaggtcagatgcacggtcttttgactgaacgacgcaccaaaatgagcagcgtgtttgaggaccagaacgcggccacgcacctgatcagacacgcggtagggaataacgagtttgggacagtggaccacgaacggctgtcgaaaatgctaagtcttcccgaggaactggcgaggatgtatcgggatgatattacaatcatcgtcgttcagttcaatagtcacgtggttggagcttaccagaaccaagaatag

SEQ ID NO: 131379 - DNA, 444 bp, synthetic construct
  misc_feature 1..444: note = Description of Artificial Sequence: Synthetic coding sequence
  source 1..444: mol_type = other DNA
atgccagccccaacgcaacttttcttcccacttattcggaattgtgagctcagtcggatctacggcaccgcatgctattgccaccataagcacttatgttgctcttcttcctatatcccccagtcgaggctgcgttataccccacaccctgcatacgccacgttttgcaggcccaaggagaactggtggcaatatacacagggacgccgctatgcctcaacccctcagaaattctacttgactcccccacaggtgaattctattttaaaagctaacgagtattcctttaaagtgccagagtttgatggaaagaatgtttcctcaatattggggtttgattctaaccagttgcctgcaaacgctcctatcgaggatcgaaggtctgcggcaacatgtctacagaccagaggaatgctgctaggggtgttcgacggccatgcgtag

SEQ ID NO: 131380 - DNA, 1467 bp, synthetic construct
  misc_feature 1..1467: note = Description of Artificial Sequence: Synthetic coding sequence
  source 1..1467: mol_type = other DNA
atggctgatacattcttagagcacttatgccttcttgacatagatagtgaacccgttgcagcccggtccacgtccattatcgcaacgattggccccgcttcccgctcagtcgagcgtttgaaagagatgattaaagcaggcatgaacattgcgagattgaacttctcccacgggagccatgagtaccatgcggaatccatcgccctggacaccaaaggacccgaaatccggacggggatcctacagggaggccccgagagtgaagtggagctggtcaagggttctcaggtgctggttacagttgatccagcttttcgcactcggggaaatgcaaatacagtgtgggttgattatccaaacatcgtgagggtagtcccggttggtggaaggatctacatcgacgacggccttatctccctggtggtgcaaaagataggcccggagggcctggtgacacaggtcgagaatggcggcgtgctcggcagcaggaagggtgtgaatctgcctggggcgcaggtggatttgccaggcctgtcagagcaggatgtgagagacctgcgctttggtgtagaacacggtgtggatatcgttttcgcctcatttgtgcgcaaggccagtgatgtggccgccgtgcgggccgccctgggacctgagggtcacggaatcaagattatcagcaagattgaaaaccacgagggcgtaaaaagattcgatgagatcttggaggtttccgatggtattatggtggcccgcggggacctgggcatcgaaatccctgctgaaaaggtgttcctcgcgcagaagatgatgataggccggtgcaatttagctggcaaacccgtggtttgtgcaacgcagatgctggaatctatgatcacaaaacccagacccacacgggcggagacttctgacgtggcaaatgccgttttagacggggccgattgtattatgttgagcggagaaacggccaaaggtaattttcccgtagaagcagttaaaatgcagcatgccattgctcgcgaagccgaggccgcagtgtatcacagacaactgtttgaagagctccgaagagctgcacccctgagtagagatccaacagaggtcaccgctatcggcgccgtagaggccgccttcaagtgctgcgctgcagctatcattgttctgaccaccaccggccgtagtgcgcaactgcttagccggtatagacctcgagcagctgtgatcgcagtgactcggtccgcccaggcagcgcggcaagtgcacctctgcaggggagtgttccctctcctctacagggaaccgccagaagctatatgggcagatgatgtcgatcgtagagtgcagttcgggatagagtctggtaagcttcgcgggttcctgcgcgtgggcgacctggtgatcgtagtaacgggctggagaccaggaagtggctacaccaatatcatgcgggtgctgagtattagctag

SEQ ID NO: 131381 - DNA, 1725 bp, synthetic construct
  misc_feature 1..1725: note = Description of Artificial Sequence: Synthetic coding sequence
  source 1..1725: mol_type = other DNA
atgtccattcaggaaaacattagttccctgcagctcagatcatgggtcagcaaatcccagagggatctggcaaaatcgatactgatcggcgcccctggaggaccagcgggatatttaaggcgggcctcagtggcccagctgacccaggagcttggaacggccttttttcagcaacagcaactgcccgcggccatggcagacacttttctggagcatctgtgcctgttagacattgacagcgagcccgtcgccgctcgctctaccagcataattgccacaatcggaccagcttcacggtctgtcgagcgcctgaaggagatgatcaaggctgggatgaacatcgctagactgaatttctcccacggtagtcatgagtaccacgctgaatcgatagccaatgtgcgtgaagccgtggagtcattcgccggaagtcccctgtcctaccggcccgtggcaatcgcactggatacgaaagggccggagatcagaacgggaatcctacagggcggccctgagtctgaagttgagctggtgaagggatcacaagtcctagtgactgtcgaccctgcattccgaacccgcgggaacgccaacaccgtatgggtcgattatcctaatatcgttcgggtggtccccgtcgggggccgcatatacatagatgatggcttgatatcgctggtggttcagaaaatcgggcctgagggcctggtgacgcaagttgaaaatggcggagtgctcggcagcaggaagggggtaaacctacccggggcacaagtcgatctcccgggtttatcggaacaagacgtccgggaccttcggttcggcgttgagcatggcgttgacatagtgttcgcatccttcgtacgcaaagctagcgacgtcgcagccgtgagagctgccctaggtcctgagggtcatgggataaaaatcatatctaaaatcgaaaaccacgaaggcgtgaagagattcgacgagattctggaagtttccgacggcatcatggtggctaggggagacctcggcattgaaatcccagccgagaaagtattcctggcccaaaagatgatgattggaagatgtaatctcgctggcaaacctgtggtgtgcgcaacccaaatgctcgaaagcatgatcacgaaaccacgccccactcgcgcagaaacgagcgacgtagccaacgccgttctggacggagcggattgtattatgctctctggagagacagctaaagggaatttccccgtggaggcagtgaagatgcagcatgccatagcacgtgaggcagaggctgctgtgtaccatagacagctattcgaagaattgcggcgcgccgcccccctgtcccgtgatcccacagaagtcactgccattggcgctgtcgaggctgcatttaagtgctgtgccgctgctattatagtgctcacaacgaccggccggagcgctcagctgctatccagataccgtcctagggctgctgtcattgctgtgactcggagcgcacaggctgctagacaggtgcacctgtgccgcggggtgttcccattactgtatagagagccccctgaagccatatgggccgatgatgtggaccgcagggttcagtttggcatcgagagtggcaagcttcggggatttctgcgcgtgggcgacctggtaattgtcgtgacaggctggagaccagggagcggatacactaacatcatgcgagtgctcagcatatcttag

SEQ ID NO: 131382 - DNA, 1632 bp, synthetic construct
  misc_feature 1..1632: note = Description of Artificial Sequence: Synthetic coding sequence
  source 1..1632: mol_type = other DNA
atggagggccctgctggctaccttagaagagccagcgtggctcagctaacgcaggagctaggtacagctttctttcagcagcagcagctaccagcagctatggctgacacatttctggaacacctgtgcctattggatatcgattctgaacccgttgccgcaaggtcgacaagcattatcgcaacgatcggaccagcatctcgatcagtggagcgccttaaagagatgattaaagccggtatgaatatcgcccgcctgaacttttcgcacggctctcacgagtatcacgctgagagtattgctaacgtccgagaggctgtcgaaagcttcgcggggtctcccctgagctacagaccggtcgcgattgcccttgatacaaagggccctgagatccggacaggtatccttcaaggcggtcccgagtctgaggtggagctcgttaaagggagtcaggtgctagtaaccgtcgatccagccttccgtactagaggtaatgctaacacagtgtgggtcgattatccgaacatcgtgcgagtcgtgcccgtgggaggtagaatttacattgacgatggactgatatccttggtggtccagaagattggccccgaagggttagtcacccaggtcgaaaacgggggggtcctgggatcaaggaaaggcgtgaatttgcccggggcccaggtggatctccctggattatccgagcaagatgttcgtgacttgcgttttggggtggagcacggagttgatattgtgttcgcctcctttgtgagaaaagcctccgatgtggcagccgttcgtgctgcattgggtcccgagggccacggtatcaagattatcagcaaaatagagaatcatgagggagtaaagagatttgacgagatcctcgaggtctcagacggtataatggtggcaagaggcgacctgggcattgaaatccccgctgaaaaagtgttcctggcgcagaagatgatgattggacggtgtaacctcgccggcaaacctgtggtttgcgcgacccagatgctcgagtctatgattacaaagccacgaccaaccagagcagaaacaagtgacgttgccaacgccgtgctggacggcgccgactgtatcatgctttctggtgagacggccaaaggaaactttccagtagaggccgtgaagatgcaacacgccatcgcaagggaagcagaggcagcggtgtatcataggcagctgtttgaggagttaaggcgagctgcaccacttagtagagatcctacggaggttacagccatcggcgccgtcgaagccgcatttaaatgttgcgcagccgctattatcgttctaacgacgactggcaggtctgcccagttgctgtcacggtaccgccctcgggcggcagtgatcgccgttacaagaagtgcacaagccgccaggcaagtgcacctgtgtagaggggtgttcccccttttgtacagagagcctcctgaagcgatctgggcggatgacgtggacaggagggtgcagtttgggatcgagtccggaaagttgagaggctttctgcgcgttggggatctggtcatcgttgtcaccggttggagaccaggctcaggctacaccaatataatgcgcgttctttccataagctag

SEQ ID NO: 131383 - DNA, 1800 bp, synthetic construct
  misc_feature 1..1800: note = Description of Artificial Sequence: Synthetic coding sequence
  source 1..1800: mol_type = other DNA
atgagcatacaagaaaatattagtagcctccagttgaggtcttgggtttcaaaatctcagcgagacctggccaagagcatcctcattggcgcccccggcgttccactgaccactcagcagtgtggcgccgacccccaaaggggaaggccccgagaggtctgctccggaatggagggacctgcgggatacctgagacgtgcttcagtagcccagctcactcaggaattgggtaccgccttttttcaacagcagcaactgcctgccgccatggcagacactttcctggagcatttgtgtctgcttgatattgactccgaaccagtcgcagccagatctacaagtatcatcgccaccatcggaccagccagcaggtcagtggaaagactgaaggaaatgattaaggcaggtatgaacattgccagattgaacttcagccacggatcacacgaataccatgcggagtccattgccaatgtgagagaggccgttgagtcgttcgccggttctccgctgagttaccggccagttgcaattgccttagatactaaagggccagagattcgtactggtattctgcagggcgggcccgagagtgaggtggagctagtgaaaggctctcaggtccttgtgaccgtcgatcccgccttcagaacccgtggtaacgccaacaccgtttgggtagactaccctaacatagtccgggtggtgcccgtgggaggaagaatctacatagatgatggactgattagtcttgtggttcagaagatcgggccagagggactggtgacacaggtggagaacggaggcgtcctcggctcacggaagggcgtgaatctccccggagctcaggtcgacttgccaggactgagcgagcaggatgtgagggatcttcgctttggagtagagcacggggttgacatcgtgttcgcctcctttgtaagaaaagcatccgatgttgctgctgtcagagctgccttggggccggaaggccacggcatcaagatcatttcaaagatcgagaaccatgaaggggtgaagcggttcgatgagatcctggaggtgagtgatggcatcatggtggccaggggtgatctcggaatcgaaatccctgccgaaaaggtgttcctggctcaaaaaatgatgataggcaggtgcaacctggctggaaagcctgtggtctgtgcaacccagatgcttgagtccatgattacaaaaccacggccaactagagcagagacttcggatgtggccaatgctgttctggacggagcagattgtatcatgttatccggcgagacagcaaagggtaactttcccgttgaagccgtaaagatgcagcacgccatcgctcgggaggccgaagctgcggtttatcatagacagctgtttgaggagctgcgacgtgccgcccctctgagccgcgatccgacggaggtaactgcaatcggggcagtcgaagcagccttcaagtgttgcgcagcggctattatcgttcttactactactggcaggtccgcgcagctcctgagtcgctatagacccagggctgctgttatagctgtgactcgctccgcgcaagccgcacgccaggtgcacctttgtaggggggtgtttcctctactctaccgggagcctccggaagccatttgggctgacgatgtggatcgacgtgtgcaatttggcatagaaagcggtaaactacgcgggttcctgagagtgggcgacttagtgatcgtcgtgactggatggagacccgggtctggatacacaaatattatgagggttctcagcataagctag

SEQ ID NO: 131384 - DNA, 1596 bp, synthetic construct
  misc_feature 1..1596: note = Description of Artificial Sequence: Synthetic coding sequence
  source 1..1596: mol_type = other DNA
atgagtaagcctcacagcgaggcaggaaccgctttcatacagacacagcagctgcacgctgccatggccgatacattcttggagcatatgtgccgattggatatcgattcccctccgattactgcccgtaataccggcattatttgtaccatcgggcctgcatcccggagtgtagagaccctcaaagagatgatcaaaagcggcatgaatgttgcaagacttaacttcagtcacggaactcacgagtatcatgctgagacaattaagaatgttagaactgccacggaatcctttgcatcggacccaatactgtacagacccgtcgccgttgcactggacacgaagggacccgagataagaacaggactgattaagggctctggcacggcagaggtagagctcaaaaaaggcgccaccctcaaaataacacttgataacgcatacatggagaagtgcgatgaaaacatcttatggttagactacaagaacatttgcaaggtcgtggaagttgggtcaaaaatctatgttgatgacgggttgatatcactccaggtcaagcagaagggagccgacttcctcgtgacagaagtggagaacggcgggagcctcgggagcaagaaaggggtgaatctccccggagccgcagtagaccttcctgccgtgtccgagaaggacatacaagaccttaagttcggggtggaacaagacgtggatatggtgttcgcctccttcattcgcaaagctagcgacgttcacgaagtgaggaaagtgctgggagagaaaggtaaaaatataaaaattatatcaaaaatcgaaaatcatgagggcgtgcggagattcgacgaaatactggaggcctccgacgggattatggtagcacgcggcgatctcgggatcgagatcccagccgaaaaagtcttcctggctcaaaaaatgatgatcgggaggtgcaatcgcgctggaaagccagtgatctgcgctacgcagatgcttgagtccatgattaaaaagcctcgccccaccagagccgagggctccgatgtggctaatgccgtgctcgacggcgcagattgtattatgctgtccggggagaccgcaaagggcgattatcccctggaggccgtcaggatgcagcacttgattgcccgtgaagcagaagccgcaatgttccacagaaaactttttgaggagcttgtgcgggcaagctcccattccactgatcttatggaagccatggccatggggtcagtggaggcctcatacaagtgtctcgctgctgctctgattgttttaactgaaagtgggcgtagtgctcaccaagtcgcccggtatagaccccgggctccaatcatcgctgtgactaggaacccccagacggctcgccaggcccatctgtacagaggtatttttccagtgttatgtaaagaccccgtgcaggaagcgtgggcagaggacgtggaccttcgggtcaactttgcaatgaacgtgggaaaggctcgggggttttttaaaaaaggagatgttgtaattgtactgacagggtggcgcccaggctctggttttacaaacaccatgagagtagtgcccgtgccgtag

SEQ ID NO: 131385 - DNA, 1101 bp, synthetic construct
  misc_feature 1..1101: note = Description of Artificial Sequence: Synthetic coding sequence
  source 1..1101: mol_type = other DNA
atgagtaagcctcactctgaagcaggtacagctttcatccagacccagcaactccacgcagcaatggctgacacgtttcttgagcacatgtgtaggctggatatcgactcacccccgattaaaaagggcgttaatcttccaggagccgctgtcgatttgccggccgtgagtgagaaggacattcaagacctgaaattcggggtggagcaggatgtggatatggtgtttgcctcatttatccgcaaggcttcagatgttcacgaggttagaaaagtgctcggagaaaaaggaaagaatattaaaattatctcaaaaattgagaatcatgaaggcgtaaggaggtttgacgaaatcctggaggcgtcagacggcataatggttgctcgaggcgacctgggtatcgaaattcccgccgaaaaggtgtttctcgcacagaaaatgatgattggcaggtgcaacagagccggaaagcctgtaatctgcgccacccaaatgctagagagtatgattaagaaacccaggcccactcgagcagagggatcagatgttgcaaatgccgtccttgatggagctgactgtatcatgctgtcaggagagacggccaaaggcgattaccccttggaggccgtaaggatgcagcacctcatagctcgagaggcagaggccgcaatgtttcataggaaactgttcgaggagctggtgcgagcctcatcccactccactgatctaatggaagcgatggcgatgggctcggtagaggcttcttacaagtgtctggcggccgctttgatcgtgttgacagagagcggccgaagcgcccaccaggtcgcgagataccggcctcgagctccaattatcgcggttacaagaaatcctcaaactgcacgccaggcgcacttgtataggggtatttttcctgtgctctgcaaggaccctgtgcaagaggcctgggctgaggatgttgatctgcgggtgaattttgctatgaatgtgggcaaagctcggggctttttcaagaagggcgatgttgtcattgtgctgaccggctggagacccggatcaggattcactaatacgatgagggtagtgccagtgccctag

SEQ ID NO: 131386 - DNA, 1596 bp, synthetic construct
  misc_feature 1..1596: note = Description of Artificial Sequence: Synthetic coding sequence
  source 1..1596: mol_type = other DNA
atgtcaaagccacattcagaagccggcactgccttcatccagacccagcagctccatgccgccatggccgatacattcctggaacatatgtgcaggcttgatatcgactcacctcctattacagcccggaacaccgggatcatttgtaccatagggcccgcctctcgctcagtggagacactgaaggagatgatcaaatccggtatgaacgtggccagactgaacttttctcacgggacccacgagtaccatgcggaaacgattaagaatgtgcgcactgcaaccgagtcctttgcctcggacccaattctctacaggccagtggccgtggctctcgacaccaagggacccgagataaggacaggattgataaagggaagtggaactgccgaggtcgagctgaaaaaaggggcaacgttgaagattacattggataacgcttatatggaaaagtgcgacgagaacatcctgtggctggattacaagaatatctgtaaagtggtggaagtgggaagcaaaatctacgtagacgatggtctgatcagtctgcaggtaaagcagaagggggccgattttctggtcacagaagtcgaaaatgggggatccttaggttcaaaaaagggcgttaaccttccaggggcagctgtggacctccctgccgtgtctgaaaaagacatccaagatcttaaatttggcgttgagcaggacgtggacatggtttttgcctccttcatcagaaaggcttctgatgtgcatgaagtgcgaaaagtgctgggggagaagggaaaaaacattaaaattatctccaagatcgagaaccacgagggtgttcgacgatttgacgaaatcctggaagccagcgacgggattatggtcgcccgaggggacctcgggatcgaaattcctgccgagaaagtctttctggcccagaagatgatgatcggtagatgtaacagggctggtaagcctgtgatttgtgcaactcagatgctggaatccatgatcaaaaaaccaagaccgactcgtgccgaaggaagcgatgttgccaatgccgttctggacggcgcggactgcatcatgctctcaggtgaaacagctaaaggcgactacccgctggaagccgtgcggatgcagcacctaattgctagagaagccgaggccgcgatttatcatttgcagctgttcgaagaattaaggcgcttggccccaatcacttctgatcctactgaagctactgctgttggagctgtcgaagcttcctttaagtgttgctctggagcaatcatcgtactgaccaaaagtggacgctcagcccaccaggttgcaaggtatcgccccagagcgcctatcattgctgttacacgaaatccccagacagcgcgccaggctcacctatatagggggattttccctgtactgtgtaaggatcccgtgcaggaagcctgggcagaggatgtcgatctgcgcgtgaatttcgccatgaacgtgggtaaagccaggggcttcttcaagaaaggcgatgtcgtcatcgttctgacaggttggcgtccaggttccggttttacaaacactatgagggttgtacctgtcccatag

SEQ ID NO: 131387 - DNA, 1596 bp, synthetic construct
  misc_feature 1..1596: note = Description of Artificial Sequence: Synthetic coding sequence
  source 1..1596: mol_type = other DNA
atgtcaaaaccccattccgaggccggcaccgccttcatacagactcaacaattgcacgcagccatggcggacaccttcctagagcacatgtgtcggctggatatcgactcaccaccaatcacagctcggaacaccggaattatttgcaccatcggtcccgctagcagaagcgtggaaactctgaaagagatgatcaaatcgggaatgaatgtcgctcggttgaatttcagccatggcactcatgagtatcacgcagaaaccatcaagaacgttcgtacagctaccgaaagcttcgcctccgaccccatcttatatcgaccggtggccgtggcacttgacacaaaggggccagagatcaggaccgggctgatcaagggatcaggcaccgccgaagtcgaacttaaaaagggtgcgacactcaaaataaccctcgacaacgcatacatggaaaagtgcgacgagaacatcctgtggctggactacaaaaatatctgtaaagtggtggaagtgggctccaagatctacgtggacgatgggctgatcagtctgcaggtgaaacagaagggagctgattttctggttaccgaggtggaaaatggcggctcactgggctccaaaaaaggtgtgaatcttccaggagccgctgtcgatctccctgcggtaagtgagaaggacattcaggaccttaagttcggggtagagcaggatgttgacatggtgtttgcatcttttattcgtaaggcaagtgacgtacacgaggtgaggaaagtgttgggcgaaaaggggaagaacatcaagattattagtaaaattgaaaatcatgagggtgttaggcgctttgacgaaattctggaagcatctgacggaattatggtggctcgaggagacctgggcatcgagatccctgcagaaaaggtattcctggcgcaaaagatgatgattggacgatgcaacagggcaggcaagcctgtgatttgcgctacacagatgctcgaaagcatgatcaaaaaacccagacctacgagagcagaaggttccgacgtggcaaatgccgtgcttgatggagccgactgcattatgttgtcaggagagaccgctaaaggggactatcctttggaagccgtaagaatgcaacacctcattgctagggaagctgaggcagcaatgtttcacaggaagcttttcgaagagttagtgagggcttctagtcatagcacggacctcatggaggctatggccatgggcagtgttgaggcttcatacaagtgcctcgccgctgctctgattgtgctaactgagtccggccggagcgcccaccaagtcgctcgataccggccgagggcccccattattgccgtcacccgcaaccctcaaaccgcccgccaggcacacctgtataggggcatcttccccgtcctctgtaaagatcccgtgcaggaagcatgggcagaggacgtggacctgcgtgtcaacttcgcgatgaacgtgggcaaggccagaggctttttcaaaaaaggggacgtcgtgatcgtcctgaccggctggagaccgggatctgggttcacaaatactatgagagtagtcccagtgccttag

SEQ ID NO: 131388 - DNA, 1377 bp, synthetic construct
  misc_feature 1..1377: note = Description of Artificial Sequence: Synthetic coding sequence
  source 1..1377: mol_type = other DNA
atgagcaagccccacagcgaggctggcaccgccttcattcagacacagcaattgcatgccgccatggctgacacatttctggaacacatgtgtcgcctggatatcgacagccctccgatcactgcccggaatactgggataatctgtactatcgggcccgctagcagatcagaggttgaactgaagaagggagccacgctgaagatcactctcgacaacgcctatatggaaaagtgtgatgaaaacatcttatggcttgactataagaacatctgcaaagttgtcgaggtgggcagcaaaatttacgttgatgacggtctaatttctctccaggttaaacaaaaaggagctgacttcctggtgacagaagtggaaaacggcggaagtctcgggagcaagaagggagtgaatctccccggtgcggccgtggatctgcccgctgtgtctgaaaaagacatccaagatctgaaattcggagtcgaacaggacgtagacatggtcttcgctagttttatcaggaaggctagtgatgtgcatgaggtgcgaaaggtgctaggagagaaaggcaagaatattaaaatcattagtaagattgaaaaccacgagggcgttcggagattcgatgaaatcctcgaagcctccgatggtatcatggtggctagaggcgatttggggatcgagatcccagcagagaaggtcttcctcgcacagaagatgatgatcggccggtgcaaccgggccgggaaacctgtaatatgcgcaacccagatgttagagagcatgataaaaaaacccaggcccacccgcgccgaagggagcgacgttgccaatgctgtcttggacggcgctgattgtatcatgctcagcggcgagaccgcgaagggcgattacccgttagaagcagtcagaatgcagcacttgatagcacgcgaggccgaggccgctatttatcatctgcagttattcgaggaattgaggaggctcgccccaattacctcagatccaaccgaagccacggctgttggagcagtggaggcatcatttaagtgttgctccggcgctattattgtgttgacaaaatcgggccgctcagctcaccaggtcgcaaggtaccgcccccgagcaccaatcatcgcagtgacacgcaacccccagactgcacggcaggcccacctctacagagggattttccctgtcctttgtaaggaccctgtgcaggaggcctgggctgaagatgtcgatctgagggtcaacttcgctatgaatgtgggaaaggccagaggcttctttaaaaaaggggacgtcgtcatagtgcttaccggctggcggccaggaagcggattcactaataccatgcgggttgtcccagttccttag

SEQ ID NO: 131389 - DNA, 1551 bp, synthetic construct
  misc_feature 1..1551: note = Description of Artificial Sequence: Synthetic coding sequence
  source 1..1551: mol_type = other DNA
atgagcccagaagcacaaccacaacgcacaaagggcccccagcagccgtgccggagcccaatcgtgaagcccggcctgccttcgtttagaccatcatcttgcacccagccctggctaacacacagctggtccacttgcgccgcctggacacttatccaccacccatcccagccaggcaccttggcctcttccgtgcctctgtatcatgctgagacaattaagaatgtccggactgctacggagagcttcgcatctgatccgattctatacagacctgttgctgtcgcactggatacgaagggtcccgagatcagaaccggtctgataaagggatctggcactgctgaggttgaactgaaaaagggtgcaacgcttaagatcacgcttgataatgcatacatggagaagtgtgatgagaatatactatggctggattataagaacatttgtaaggtcgtggaggtcggctccaaaatttatgtggacgatggacttatttcccttcaggtcaagcagaagggagccgattttttagtgaccgaggtggagaacggagggagtctaggcagcaaaaagggtgtgaacctacccggcgccgccgtcgatctgccagccgtcagcgagaaggacatccaggacctgaagttcggtgtagagcaggatgtggacatggtttttgcctccttcattcgtaaggcttcagatgtgcacgaagtgcgcaaggtactgggcgaaaagggcaagaatattaagatcatttccaaaattgaaaaccatgagggagtgcggagattcgatgagatcctggaggcctcagatgggattatggtggccaggggagatctaggcatcgagataccagcagaaaaggttttcttggctcaaaaaatgatgattggacggtgtaacagggcaggaaaacctgtgatatgcgcaacccagatgttggagtcgatgattaagaaacccaggccaaccagagctgaaggctctgatgttgccaatgccgtgttggacggggcggactgcattatgctgtccggcgaaaccgccaagggtgactaccccctggaagccgtgcgcatgcagcatttgatcgccagagaggccgaagcagctatctaccatctgcaactcttcgaggagctcaggcgtcttgcacctataacttccgatcctacagaagcaacagctgtgggcgcggtagaagcttcattcaagtgctgcagcggcgcaatcatcgtgctaacaaagtccggacggagcgcccatcaggttgcgaggtaccgtcctagggcgccgataattgcggttacccggaaccctcaaacggcccgccaggctcacctataccgaggcatctttccagtgctctgtaaggatcctgtgcaagaggcctgggccgaggatgtagacctgcgagtgaacttcgcgatgaacgtgggcaaagctcgaggattcttcaagaagggcgatgtggttatcgtactgaccggatggcgccccgggagtggattcaccaacacgatgcgggtggtcccagtaccttag

SEQ ID NO: 131390 - DNA, 1212 bp, synthetic construct
  misc_feature 1..1212: note = Description of Artificial Sequence: Synthetic coding sequence
  source 1..1212: mol_type = other DNA
atggctggagccgccacccaggccagcctggagagcgctcctaggattatgcgattagttgcagaatgttcaaggtctcgagctcgggccggcgagctgtggctccctcatgggaccgtagctacaccagtgtttatgccagtcggcacccaggcaacgatgaagggcattacaacagaacaattggacgccttagggtgccggatttgtttgggaaacacgtatcatctgggtctcaggccaggaccagaattaattcagaaggcaaacggactgcacggttttatgaattggcctcacaacttgctgaccgatagcgggggatttcaaatggtgtcgctcgttagcctttccgaggtcacagaggaaggggtgaggtttcgctctccttacgatggcaatgaaaccctcctcagccccgaaaagagtgtccagatccagaacgctctaggttccgacataataatgcagttagacgatgtggtgtcttctaccgtcacaggtccccgtgttgaggaggcgatgtaccgcagtatcagatggctcgacagatgcatagcagcccaccagagacctgataaacagaacctgtttgccatcatccagggcgggctcgacgccgaccttcgtgccacctgtctcgaggagatgactaagagagacgttcccggatttgccatcggaggtttgtctggtggagagtctaaatcccagttttggcgcatggtggctctgagtacaagccgtctccccaaggataaaccacggtacctgatgggcgtaggatacgcaacagatttagtggtgtgcgtggccctggggtgcgacatgtttgactgcgttttccctacgcgcaccgcacgctttggaagcgccttggtacccactggcaacctgcagcttaggaagaaagttttcgagaaagacttcggccccatcgatcctgaatgtacatgccccacatgccagaaacacagtcgcgcctttttgcacgcactactgcactctgacaacaccgccgccctgcaccatctcacagtgcacaatatcgcctatcagctgcaattgatgtctgcagtcagaacatccattgtggaaaaaagattccccgactttgttcgagacttcatgggcgccatgtatggcgaccccactttgtgcccaacttgggcaacggatgccttggcttctgtgggcatcactttgggctag

SEQ ID NO: 131391 - DNA, 678 bp, synthetic construct
  misc_feature 1..678: note = Description of Artificial Sequence: Synthetic coding sequence
  source 1..678: mol_type = other DNA
atggccggtgcagctacacaggctagtctggagtctgctccacgcattatgagactggtcgctgaatgttccaggtcccgtgcacgtgctggcgagctatggcttcctcatggaacagtcgcgaccccggtatttatgcctgttggcactcaggccacgatgaagggaattaccacagagcaactagacgccttaggctgcaggatttgtctgggcaacacttatcatctcgggctccggccagggccagaactgatacagaaagcaaatggccttcacgggttcatgaattggccccacaatttgctgaccgacagcggaggctttcagatggtcagccttgtttcccttagcgaggtcaccgaagaaggagtgaggttccggtccccatacgacggaaatgaaacccttctgtcccctgagaaatccgtgcagatccagaacgcattgggatctgacatcattatgcagcttgacgacgtggtgtcctcaacagttaccggaccaagggtcgaagaggccatgtatagaccactcggtctggttacaggtgcgctcctgcaggttaacccactggccggccccgtgcactgctcgccgtccgcagccggacaggccgaacctctgcgacattatccgggatgggccggccgccgatcgccggggcatcttccctag

SEQ ID NO: 131392 - DNA, 2097 bp, synthetic construct
  misc_feature 1..2097: note = Description of Artificial Sequence: Synthetic coding sequence
  source 1..2097: mol_type = other DNA
atggccgccgctggggccgctgtggcgcgtagccccggcattggagctggtcccgctctgagagcccggcggagcccgcccccgcgggccgcaagactaccaaggttattggtgctgctggccgccgctgcagtgggcccaggcgcagggggtgccgctaggctgtacagggcaggcgaagatgcagtctgggtgctcgactccgggagcgtccgtggtgctactgccaattcatccgcagcctggctggtccaattttattcatcatggtgtggccattgtatcggctacgcacctacctggagagcgctggcaggggacgttagagactgggccagcgcaatcagggtcgccgcgctagattgcatggaggaaaaaaaccaagctgtctgccacgactatgacatccatttctacccaacgttcaggtattttaaggccttcaccaaagaatttacaaccggcgaaaatttcaaggggccagaccgggagctccgtactgtaaggcagactatgatcgatttcttgcagaatcatacggaaggatcccgtcctccggcatgcccaaggctggatccaatccaaccttccgacgtactgtctcttctcgacaataggggatcccactacgttgcaatagtgtttgagagtaactctagttatctcggcagggaagtcatcctggatctcattccttatgagagcatagttgtgacccgtgccctcgacggcgacaaggcattcctggagaagctgggggtgtctagtgttccatcatgctacttaatttatccaaatggctcccacggactgataaacgtggtgaaacccttgcgcgcattcttttcctcctacttgaagagtctgcccgacgtcagaaaaaaatcattacctttgccagagaaaccacacaaggaagagaacagtgaaatcgtggtttggcgggaattcgacaagagcaagctgtacaccgttgacctcgagtctggtctgcactaccttttgagagtggaattggcagcacacaaatcactcgcgggggccgagctgaagactctcaaggactttgtgaccgttctcgccaagttgtttcccggaaggcctcccgtgaaaaaactgctcgagatgctgcaggagtggctcgcatcactgcccctcgaccggatcccctacaatgccgtgctcgacctagtaaacaacaaaatgagaatatcaggtatttttctgaccaatcacataaagtgggtgggctgtcagggcagcaggtccgagttacgcggatacccttgctctctgtggaaactgttccacacgcttaccgtcgaggcctcgacccacccagacgcactggtgggaactggttttgaagatgatccccaggcagtattacagaccatgcgccgctatgtccacacgtttttcggatgtaaagagtgtggagaacacttcgaggagatggctaaagagtcgatggactcagtgaagacaccagaccaagctatcctgtggctgtggaagaaacacaatatggtgaatgggcggttagccggacacctgagcgaagacccgcgatttcccaagctgcagtggccaactcccgatctgtgcccagcctgtcacgaagaaattaaagggctggcctcttgggatgaagggcatgtcctgacattcttgaaacagcactacgggcgcgataacctccttgacacatacagtgcagatcaaggagacagctctgagggaggtacgctggcccgcggagaggaggaagagaagcggctgacgcctcccgaggtttcccatggggaccgcgacactcagagtgtgaggccaccgggcgcattggggccccgcccagcactgcccgagtcccttcaccacagcttagatggaaagctgcagtctctggacggcccaggagcacataaggaggtcggtggagcggcaccattcctgggagtagatttctcaagcctcgatatgagtctgtgtgtggtcctgtatgtggccagttctttattcttgatggtcatgtatttctttttcagagtacggtctcgtagatggaaggtgaaacatcatcacccagctgtgtag

SEQ ID NO: 131393 - DNA, 948 bp, synthetic construct
  misc_feature 1..948: note = Description of Artificial Sequence: Synthetic coding sequence
  source 1..948: mol_type = other DNA
atggaagaaaagaatcaagcagtgtgtcacgattatgatatccatttttatcctacattccgctattttaaagcatttaccaaagaatttacaactggcgagaattttaaggggcccgacagggagctgcggactgtgagacagacaatgattgatttcttgcaaaaccacactgaggggagtcgacctcccgcatgcccaagactggatcccattcatgtgaaacccctgagggcttttttttcaagctacctcaaatcgcttccagacgtgcgcaagaagagcctcccccttcccgagaaaccccacaaggaagaaaattcagaaatcgtggtctggagagaattcgataaatctaaactttacacagtagacctcgagagcggattgcattacctgctgcgagtagaactcgcggcacataaatctctggccggagctgaattaaaaactcttaaagattttgttaccgtccttgccaaactgtttccagggcgcccccccgttaagaaattgctcgagatgttacaggaatggctggccagcctgcccttggaccgcattccttataatgccgttctggatctggtgaacaacaagatgcggataagtgggatattccttaccaatcatataaagtgggtgggttgtcaaggatctcgatctgaactgcgaggatatccctgttcactctggaaattattccacactttaaccgtggaagcctctacacaccctgacgcactggtcggtaccggattcgaggacgacccccaggcagtgctgcagacaatgaggagatatgttcacactttcttcggatgcaaagagtgtggcgagcactttgaagaaatggcgaaggaatctatggatagcgtcaagacacctgatcaggcgatcctgtggctgtggaagaagcacaacatggtgaatggaagacttgcttag

SEQ ID NO: 131394 - DNA, 735 bp, synthetic construct
  misc_feature 1..735: note = Description of Artificial Sequence: Synthetic coding sequence
  source 1..735: mol_type = other DNA
atggccgccgcagccgcagccggcgaggctcgaagggtactggtgtacggcgggcgcggtgccctgggctccagatgtgtgcaggcatttcgtgcccgcaattggtgggttgcctctgttgatgtggttgagaatgaagaagccagcgctagtatcatagtgaagatgaccgactcattcacagaacaggcagatcaggttaccgctgaagttggcaagctgctgggcgaggaaaaagtagatgcaattttatgcgtagccggcggatgggcgggcggcaacgccaaaagcaaatctttgttcaaaaactgtgatcttatgtggaagcagtcgatttggacgagcaccatcagctcccatctggctacaaaacatctgaaggagggaggactgcttactctggcgggagcaaaggccgccctggacggaacaccgggaatgatagggtacggtatggcaaagggtgctgtacaccagttgtgtcaatctctggctggtaagaactctggaatgccacccggggccgccgccatagccgtgctgcccgtgactctggatacaccaatgaaccgaaaatcaatgcctgaggcagactttagctcctggacacctttggaattcttggtggagactttccacgattggatcactggaaagaaccgaccttctagtggcagtttgatccaggttgtgaccaccgaggggaggacagagttgacaccggcatacttttag

SEQ ID NO: 131395 - DNA, 681 bp, synthetic construct
  misc_feature 1..681: note = Description of Artificial Sequence: Synthetic coding sequence
  source 1..681: mol_type = other DNA
atggccgctccactgcttcatacccgactcccaggagacgctgccgctagcccttcagccgtgaaaatgctgggagcctctcgcactgggatttctaacatgcgagctctcgagaatgactttttcaattcgcctccaaggaagactgtgcagtttgggggcaccgtgacagaggtgctcttgaaatataagaccggcgaaactaacgatttcgaacttctgaaaaaccaattgctggacccggacatcaaagacgatcagatcatcaattggctgctggaattccgtagctccatcatgtatctcacgaaagatttcgagcaattgatttccatcattcttcgtctgccttggttaaataggtcccagactgtagtggaggagtatttagcatttctgggaaatctggtgtcagcccagacagtgtttctcagaccatgcttgagcatgattgctagccacttcgtaccccccagagtaattattaaggagggggacgtcgacgtcagcgatagcgacgatgaagacgataacttgccggccaactttgacacctcacagtctctcgccaataatagcaagatttgtacaattgacaccgtggtctctcacgctaatacaggtggaaaaatctccatctgttccaagatccgggaaaatacagggatgttgcgatcttag

SEQ ID NO: 131396 - DNA, 894 bp, synthetic construct
  misc_feature 1..894: note = Description of Artificial Sequence: Synthetic coding sequence
  source 1..894: mol_type = other DNA
atggatgcagagggcctggctttgttattacccccagtgacattggccgcccttgttgattcttggctcagagaagattgtcccggtctcaactatgctgccctggtgagcggtgcaggaccgagtcaggcagcactgtgggctaagtcaccaggtgtcctggcaggacagccattcttcgacgccatctttacacagctgaactgtcaagtctcatggtttttaccagaagggtcaaagctggtgcctgtcgctagagtggctgaggttcggggacccgcgcactgtctcttgcttggggagcgggtggcactgaataccctagcccgctgctcagggatcgcatccgcagcggctgctgcagtggaggccgctcgtggcgccgggtggactggccacgtcgcaggcaccaggaaaaccacacccggttttcggctggtcgaaaagtatggactgcttgtgggcggcgctgctagccaccggtatgacctggggggtctggtgatggtgaaagataatcatgtagtcgcagcaggtggcgtggagaaagcagtcagagccgctaggcaggctgccgattttaccctgaaagttgaggtggagtgcagctccctgcaggaagccgtgcaggcggccgaggctggcgccgatctggtcctgctcgataactttaaacctgaagaactgcatccaaccgctactgtgttgaaagctcaatttcccagcgtcgctgttgaagcatccggaggaattactctcgacaatctgccacagttttgtggaccacacattgacgttatttctatgggtatgctgacacaggcggccccagcgctggatttttccctgaagctcttcgcgaaggaagtagcccccgtccccaagatccactag

SEQ ID NO: 131397 - DNA, 498 bp, synthetic construct
  misc_feature 1..498: note = Description of Artificial Sequence: Synthetic coding sequence
  source 1..498: mol_type = other DNA
atggacgctgagggcctggcccttctcctgccccccgttacactggccgcactggtggatagttggctaagggaagactgccccgggctgaactatgcggccctagtgagcggtgcgggcccgagtcaggccgcgttatgggctaagagccccggcgtcctggctggtcaaccattcttcgacgccatttttacacaactcaattgtcaggtgagctggtttctccctgaggggtcgaagttggtgcccgtagcccgcgtggctgaagtgcgaggccctgctcactgtctcttgctgggggagcgcgtggcactgaatactctggctcggtgctctggtatcgcctccgcagctgccgccgctgtcgaggccgcacggggcgccggctggaccggtcatgtagctggtacccgcaagactacacctgggtttagacttgtagagaaatatgggttactcgtgggtggagccgccagtcacagatatgacctcggatag

SEQ ID NO: 131398 - DNA, 2154 bp, synthetic construct
  misc_feature 1..2154: note = Description of Artificial Sequence: Synthetic coding sequence
  source 1..2154: mol_type = other DNA
atggcagttgcggttcgtacactccaggagcagctggagaaagctaaagaatccctgaaaaatgtggacgaaaacatccgaaagttaactggtcgcgaccccaacgacgtaagacccatccaggcgcggttattggccctttccggcccaggaggcggaaggggacgaggtagcttattgctccgcagggggttctccgattcaggaggaggaccccccgctaaacagagagacctcgaaggcgcggtgagcaggctgggcggggagaggcggactcggcgcgagtcacggcaggaatctgatcctgaggacgacgatgtaaaaaaacctgccctgcaatctagtgtggtggcaacatctaaggagcgtacaaggagggatctgatccaggatcagaacatggacgagaagggaaagcagagaaatagaagaatttttggattattaatgggaactctccaaaagttcaagcaggaaagcacagtggcaaccgagcgtcagaaaaggcgacaagaaattgagcagaagctggaagtccaggccgaggaggagcggaagcaagttgagaacgagcgccgtgaactgtttgaggaaagaagggccaaacagaccgagctgaggctgttggaacagaaagttgagctggcccagttacaggaggaatggaacgagcataatgccaagataatcaaatacatccgtacgaaaactaaacctcacctcttttacatacccggaagaatgtgccctgctacacagaagctgattgaggaatcccagagaaagatgaacgctcttttcgaggggaggagaatagaattcgctgagcagatcaacaaaatggaggcaaggcccaggaggcagtcaatgaaggagaaagagcaccaagtggttaggaatgaggaacagaaggctgaacaggaggagggaaaggttgcacagcgggaggaggagctggaggaaaccgggaaccagcacaacgatgtagagatcgaggaggcaggggaagaggaggagaaagagattgcaatcgttcacagtgatgcagagaaagaacaagaggaggaggaacagaaacaagagatggaggttaagatggaagaggagaccgaggtgcgggagagcgaaaagcaacaggattcgcagccggaagaggtgatggatgtgctcgaaatggtggagaacgtgaaacacgtgattgcggatcaggaggtaatggagactaaccgggttgagtctgtcgaaccctctgagaacgaagctagtaaagagcttgagcccgaaatggaattcgaaatcgagcctgataaagaatgcaaaacattgagcccaggcaaagagaatgtgtccgctttagacatggagaaagagtcagaagagaaagaagagaaggagtctgagccccagccagagcctgtcgctcagcctcagccccagtctcaaccacagttacagctgcagagtcagtcacagcctgtgctgcagtcccagccaccatcgcagcctgaggatttgtcccttgctgtcttacagcccaccccccaggtgactcaggaacaggggcacctcttgccagagaggaaggattttcccgttgaatcggttaagctaactgaggtgcctgtggaacctgtattaacagtacatcccgaatccaagtccaaaaccaaaactaggtcacgtagcagaggcagggcacggaataaaacctcaaagagtagaagtaggtccagttcctcctcctcgagcagctcaagtagtacgagcagcagcagcggaagttctagctccagtggatcatcctcaagccggagttcatcttcgagctcttcttctacatctggcagtagcagccgtgacagcagttcgagcacctctagctcctccgaatctcggtcacggtctagaggaagaggccacaacagagaccggaagcacagaagatcagtggacagaaagaggcgagatacttcgggcttggagcggagtcacaaatctagcaaaggtggctcatcccgagatacaaaagggtcaaaggataagaacagccggagcgatagaaaacgatctatctccgaatccagtcggagcggtaagcgatcatccagaagcgagcgcgatcgcaagtcagacaggaaggataagcgcaggtag

SEQ ID NO: 131399 - DNA, 1704 bp, synthetic construct
  misc_feature 1..1704: note = Description of Artificial Sequence: Synthetic coding sequence
  source 1..1704: mol_type = other DNA
atgcatggccggctgaaggttaagacgtcagaggagcaagcggaggcaaagcgcctggagcgggagcagaaattgaagctctatcagagtgcgacccaagcagtattccagaaaaggcaggctggggagctagacgagagtgtcttagagctgacatctcagattctgggcgccaatcccgacttcgccactctatggaattgccggcgtgaagtgctgcagcaactagagacccaaaagagccccgaagagctcgcagcactcgtgaaggcggaactcggcttcttagagtcttgtctcagggtcaacccaaaatcctacggcacatggcaccaccggtgctggcttctgggtaggctgcctgaacccaactggactagggaactggaactgtgtgctcggttccttgaggtggacgaaaggaactttcattgttgggattatagacgattcgtcgcaacccaggcagcagttcccccggctgaagagttggcgttcaccgattccctaattacacggaattttagcaattattcatcctggcattacaggagttgcctgctcccccagttgcatccccagccagattctggtcctcagggaagactgccggaggacgtcctcttgaaagagctcgagctcgtgcagaatgccttcttcaccgatcctaacgaccagagcgcttggttctatcatcgctggctgcttggtcgggccgacccacaggacgctctcagatgcttacacgtgtctcgggatgaagcctgtctcacggtgtccttctctcgccccctgttggtcgggtcgcgtatggaaatactgctactgatggtagacgatagccctctgattgtggagtggcggacaccggacggtcggaatcgaccgtcccatgtgtggttgtgcgacctcccagctgcatccctgaacgaccaactgccacagcatacctttagggttatctggacggccggagatgtccagaaggagtgcgttcttctcaagggccgtcaggagggctggtgccgtgacagtacaactgacgagcagctgtttagatgtgagctttcggtagaaaaatccaccgttttacagtcagagcttgagagctgtaaggagctgcaggagttagagcctgagaacaagtggtgcctcttgacgataatattgctcatgcgagccctggaccccctcctgtatgagaaagaaacactgcagtacttccaaacactgaaggcagtcgacccaatgagggccacttacctggacgacctgcggagtaaatttctcttggagaattccgtgctgaaaatggaatatgcggaggtccgggttctccaccttgcccataaagacctgactgtcctatgccacttagagcagttgctgctggtcacccatcttgacctgtcacacaacaggctgaggacactgccccccgccctcgcagcattgcgctgcctggaggtgttacaggcgagcgataatgcaattgaatctctggacggagtgacaaatctgccaagactgcaggagttactgctctgcaacaatcgcctacaacagcccgccgtcctgcaaccgctggctagctgcccaaggctagtgttactgaaccttcagggaaaccctttgtgccaggctgtgggtatcttggaacagttagctgaactactgccctctgtgtcctctgtgcttacatag

SEQ ID NO: 131400 - DNA, 996 bp, synthetic construct
  misc_feature 1..996: note = Description of Artificial Sequence: Synthetic coding sequence
  source 1..996: mol_type = other DNA
atgggtactccgcaaaaagacgtgattattaagagcgacgcccctgacaccttgctgttggagaagcacgctgactacatagcctcttatggctcgaagaaggacgattatgaatactgtatgtcagaatacctaaggatgtcaggcatttactggggcctgactgtcatggatcttatggggcagctacatcggatgaatcgcgaagaaatattagcatttatcaaaagctgccagcacgagtgtggtggcattagtgccagcatagggcacgaccctcatctgctgtacacattgtcagctgtccagattctgactctttacgacagtattaatgtgattgatgtgaacaaggtggtagaatatgtgaagggtctccagaaagaagacggctcatttgccggagacatctggggagagatcgataccagattctccttctgcgcagttgccacccttgcactgctcgggaaattggacgccataaatgttgagaaagctatcgagtttgtgctaagctgcatgaacttcgacggcggctttggatgtcggcctggaagcgagtcacatgccggacagatatattgctgtaccgggttcctcgctatcactagccagcttcaccaagtgaactcagacctgctgggctggtggctgtgcgaacgccagcttcccagcggcgggttaaacggccggcccgagaaactccctgacgtctgctacagttggtgggtactcgcatcacttaagatcattggcagactgcactggattgaccgtgagaaactgaggaatttcattctcgcctgccaagatgaggaaaccggtggtttcgccgaccggcccggtgatatggtcgaccccttccacaccctgttcggcatcgcaggtctgtccctcttaggcgaagaacaaatcaaacccgtaaaccccgtcttctgcatgccggaagaggtcctgcagagagtgaacgtgcaacctgagttagtctcttag

SEQ ID NO: 131401 - DNA, 963 bp, synthetic construct
  misc_feature 1..963: note = Description of Artificial Sequence: Synthetic coding sequence
  source 1..963: mol_type = other DNA
atgggtaccccgcaaaaggatgtgattattaaaagcgatgcgcctgatacactgctcctcgaaaagcatgctgattacatcgcttcttacggctctaagaaggatgattacgagtattgcatgagcgagtatttgaggatgagcggtatttattggggtctgacggtgatggatttgatgggccagctccatcgtatgaacagagaggagatcctggcgttcataaagagctgtcagcacgaatgcggaggaattagcgcttctataggacacgatcctcaccttctctatactctgtccgcagtgcagatactcactctttacgactccattaacgtaattgatgtgaacaaagtggtagagtacgtgaagggtctccagaaagaagacggatcctttgcaggtgatatatggggcgaaatagacacaaggttctccttttgtgctgtcgcaaccctagctctattgggcaagctggatgccatcaatgtcgagaaggctattgaatttgtactgagttgtatgaactttgacggcggcttcggctgcagacccggatccgaatcccacgccggtcagatctattgttgcaccggattcttggcgatcaccagccagctgcaccaggtaaatagtgatctactgggatggtggttatgcgaaagacagctcccctctggcggcctgaatggacgacccgaaaagctgccagacgtgtgttattcctggtgggtgctcgcatctctgaaaattatcggccgactgcattggatagaccgcgagaagctcaggaatttcatcctggcatgtcaggatgaagaaacgggagggtttgcggatcgtcccggcgatatgcactttatctaccagaactatcccaagaaggaattgtccagcaacaaggagaccctgacagaatcgctactacctagattggaacgcagttccacaatatctgcctag

SEQ ID NO: 131402 - DNA, 459 bp, synthetic construct
  misc_feature 1..459: note = Description of Artificial Sequence: Synthetic coding sequence
  source 1..459: mol_type = other DNA
atgggtactccacaaaaagatgtgattatcaagtctgacgcacccgatactttgcttctcgagaagcacgccgactacatagccagctacgggagtaaaaaagacgattacgaatattgtatgtccgaatacttacggatgagcggaatttattgggggttaactgtcatggatctaatggggcaacttcatcgcatgaaccgcgaggagatacttgcattcattaaatcttgtcagcatgagtgcggtggaattagtgcgtcaataggtcatgatccccacctcctgtacaccctatccgcagttcagatccttacgctgtatgacagcattaacgtcatcgatgtgaataaagtggttgaatatgtgaaaggcttacagaaagaagatggcagcttcgccggggacatttggggcaacgtgagattctctcctttctatcccaaataccaatattag

SEQ ID NO: 131403 - DNA, 474 bp, synthetic construct
  misc_feature 1..474: note = Description of Artificial Sequence: Synthetic coding sequence
  source 1..474: mol_type = other DNA
atgaacttcgacggaggcttcggatgcagaccgggttccgaaagccatgctgggcagatctattgctgcactggcttcctagccattacttcacaactgcaccaggtgaactctgatctactaggatggtggctttgcgagcgacagctgccatccggcgggcttaacgggcgtccagagaagctgcccgatgtgtgctattcctggtgggtgctggctagcctcaaaatcatcggcagactgcactggatcgatcgagagaagctgcgcaacttcatcctggcatgccaggatgaggagaccggcgggtttgccgaccggccgggagatatggtagatcctttccacacactgtttgggatcgctggcctgagcctcttgggagaagagcaaattaaacctgtgaaccctgtgttctgcatgcctgaagaggtgttgcagagagtaaatgtccagcccgaactggtgagttag

SEQ ID NO: 131404 - DNA, 1476 bp, synthetic construct
  misc_feature 1..1476: note = Description of Artificial Sequence: Synthetic coding sequence
  source 1..1476: mol_type = other DNA
atgtctctgaaaagcgagaggagaggtatacacgtcgatcagtccgacttgctgtgtaagaaagggtgcggctattacggcaatcccgcttggcaggggttttgctcgaagtgctggcgcgaggaatatcacaaggcaaggcagaagcagatccaagaagactgggagttggcggagagactccaaagagaagaggaagaagcttttgcctctagccagtcatcccagggggcccagtccctgacctttagcaaattcgaggagaagaagactaatgagaaaacaagaaaggtgacaaccgtcaaaaaatttttttcggcatcatcacgcgttggctccaagaaggaaatccaggaggccaaagccccgtcaccgagtatcaatcgccagaccagtattgagactgacagagttagcaaggaatttatcgaattcctgaagacattccacaagaccgggcaagagatttacaaacagacaaagttgttcctggaaggcatgcattacaagcgcgatctgagcatcgaggaacagagcgagtgtgcacaagatttttatcacaacgttgcagaaagaatgcagacacgcgggaaagtaccacctgagagagttgagaagatcatggatcagatcgaaaagtacatcatgactcggctatataaatacgtgttctgtccagagacgaccgatgacgaaaaaaaagaccttgccattcagaagaggattcgcgccctgaggtgggtcacgccccaaatgctctgcgtgcctgtgaacgaagacatccccgaggtttcggacatggtggtgaaagccatcaccgatattattgagatggacagcaagagggtgcctagagataaactggcttgcatcactaagtgttccaaacacatctttaacgcaatcaagataaccaagaatgagcctgcgtcggcagatgactttctgccaacactgatctatatcgtactgaaggggaaccctccccggctgcaaagtaacattcaatacattacccggttttgtaatccatcccgactcatgaccggcgaagacggttactattttacaaatctgtgctgcgccgtggcgtttatcgagaagctggacgcgcagagcctaaacctctcacaggaggattttgacagatatatgtccggacagacctcccctagaaagcaggaggctgaaagctggagcccagacgcctgtctgggcgtgaagcagatgtacaagaatctggacttactgagccagctgaacgagcggcaggagaggatcatgaatgaagcaaagaaactagagaaagacctgattgattggaccgatgggattgccagggaagtgcaggacattgtggaaaagtatcctcttgaaataaaacccccaaatcagcctctcgcggccatagactctgagaatgtggagaacgacaaactaccccccccccttcagccccaggtctacgcaggctag

SEQ ID NO: 131405 - DNA, 1518 bp, synthetic construct
  misc_feature 1..1518: note = Description of Artificial Sequence: Synthetic coding sequence
  source 1..1518: mol_type = other DNA
atgatggcctcctcctaccacgaagtggtgagcagaaaaaaaatgtcactgaagtccgagaggaggggtatccacgttgatcagtctgacctcctgtgtaagaaagggtgcggatactatggaaatcctgcatggcagggattctgttccaagtgctggagggaggagtatcacaaggccaggcaaaagcagatacaggaagattgggagctcgctgagagattacagcgggaggaggaagaagcctttgccagttcacagtccagtcagggcgcccagtctctcaccttctcaaaatttgaagagaagaaaacaaatgaaaaaacacgcaaagttactacagttaaaaaatttttttctgcatcaagccgagtaggctctaagaaagaaattcaggaagcaaaggctccgagtccttcgattaaccggcagacatctatcgagaccgaccgggtcagcaaggagtttattgaatttctcaagacatttcacaaaacaggacaggaaatctataagcagacaaagctgttcctggaaggtatgcactataaacgcgacctaagcatcgaggagcagtcagagtgtgcgcaggacttttatcataacgtggctgaaaggatgcaaactagagggaaggtgccacctgagcgggtcgagaagatcatggatcagatagaaaagtacatcatgaccagactgtataaatacgtgttctgtcccgaaactaccgacgacgaaaagaaggatcttgccatccaaaaacgaatcagagcactgcgatgggtgaccccccagatgctctgtgtgcctgtgaacgaggacatcccggaggtgtccgatatggtggtcaaagctattacagacataatagagatggactccaaacgggtccccagagataaactggcctgcattacaaagtgttcaaagcacatcttcaacgccatcaagattaccaagaatgagcctgcctccgcggacgactttctgcctacactgatttacattgtgttaaaaggcaatcctccacgtctgcaatccaatattcagtatattactcgcttttgcaacccatctaggctgatgaccggagaggatgggtattacttcactaacctgtgttgcgctgtggccttcatagagaaactggacgctcaaagcctcaacctgtcacaggaggactttgataggtacatgtccggccaaacgtctcctagaaaacaagaggcagagagttggagccctgatgcctgtctcggagtgaagcagatgtacaaaaacctagatctgttatcccagttaaacgaacgtcaggagaggataatgaacgaagcgaagaagctcgagaaagatctgatagattggacagacggtatcgcaagagaggtccaggatatcgtggaaaagtacccattagaaattaagccgccgaaccaaccactggctgcgatcgactccgagaatgtggagaacgataagctgccaccaccattgcagccccaagtgtacgccgggtag

SEQ ID NO: 131406 - DNA, 138 bp, synthetic construct
  misc_feature 1..138: note = Description of Artificial Sequence: Synthetic coding sequence
  source 1..138: mol_type = other DNA
atgtctctgaagagcgagaggcggggcattcacgtcgaccaatcggatttattgtgtaagaaaggctgtggctactatgggaatcctgcttggcaggggttctgtagcaagtgttggagggaagagtaccacaaatag

SEQ ID NO: 131407 - DNA, 1476 bp, synthetic construct
  misc_feature 1..1476: note = Description of Artificial Sequence: Synthetic coding sequence
  source 1..1476: mol_type = other DNA
atgtctctaaagtcagagagacgcggaatacacgttgaccagagcgacctgttgtgtaaaaaaggctgtgggtactacggtaatcctgcgtggcagggattttgctcaaagtgctggcgggaggagtaccataaggcccgacaaaaacagattcaggaggattgggaattggccgagaggctgcagagggaggaggaggaagccttcgctagctcacagtccagtcagggggcccaatccctgactttttctaagtttgaagaaaaaaaaaccaacgagaaaactcgtaaagtgactacagtgaagaagttcttcagtgcgagctcccgcgtgggtagtaaaaaggaaatacaggaagccaaagccccctcaccaagcatcaaccggcagaccagcatagagaccgacagggtgtccaaggaattcattgagttcttgaaaacatttcacaaaaccggtcaggaaatttataagcagactaaactgtttcttgaggggatgcattacaaaagggatcttagtatagaggagcaaagcgagtgtgctcaagacttttaccataacgtggccgagagaatgcaaacccgtggaaaagtcccccctgaacgcgtcgaaaagatcatggaccaaatcgagaaatatatcatgactcgcctctacaagtacgttttttgccctgagacaacagatgacgagaaaaaagaccttgcaattcaaaagcgtatccgagctctgcggtgggtaacaccccaaatgttgtgcgtgcccgtgaacgaagatatcccagaggtgtccgatatggtcgtcaaagcaatcactgatattatagagatggatagcaaacgggtgccgcgggacaagctcgcatgcatcacaaagtgttcaaagcatatcttcaatgcaatcaagattacaaagaacgaacctgcgagcgcagacgacttcctgcccacccttatttacatcgtgctgaaaggcaacccaccccgcctgcaaagcaacatccagtatattacaagattttgcaacccttcaaggctgatgacaggtgaggacggctattattttacgaatctgtgctgtgcagttgcatttatcgaaaagcttgacgcgcagtcactcaacctgtcccaggaagacttcgacaggtacatgtccggtcagacatcacctcgcaagcaggaggctgagagctggagcccagacgcatgtttaggcgttaaacaaatgtataagaatctggatctcctgagccagcttaacgaacgacaggagaggattatgaacgaagccaagaaactggagaaagatctcattgattggacggacgggatcgcgcgcgaggtgcaagatattgtggaaaagtatcctctagaaattaaaccaccaaatcaaccccttgccgcaatcgactcagagaatgtcgaaaacgacaagttgcctcccccactgcaaccccaggtgtatgccggctag

SEQ ID NO: 131408 - DNA, 372 bp, synthetic construct
  misc_feature 1..372: note = Description of Artificial Sequence: Synthetic coding sequence
  source 1..372: mol_type = other DNA
atggagccagctgagcagccaagtgaattagtgtccgccgaaggacgcaatagaaaggcagtactttgccaaaggtgcggaagtagagtccttcagcccggcactgcactcttttctcggaggcaactgtttctcccatccatgaggaagaagcccgccctgtcagatgggtctaaccccgacggtgatctgttacaggagcattggcttgtggaagacatgtttatttttgagaatgtgggattcacaaaagatgttggcaacattaaattcctcgtgtgtgctgattgtgaaattgggcccatcgggtggcactgtctggatgataagaatagcttctacgtcgctctggagagggtgagtcacgagtag

SEQ ID NO: 131409 - DNA, 1206 bp, synthetic construct
  misc_feature 1..1206: note = Description of Artificial Sequence: Synthetic coding sequence
  source 1..1206: mol_type = other DNA
atggagcccaggcgggctgcgcctggtgttccaggttgggggtctcgggaagccgcaggatctgcctcggctgctgagctggtttaccacctggccggagctctcggcaccgagttgcaggatctggctcgccgattcggccccgaggcagcagccggcctggtcccacttgtggtccgcgcactcgagctgctcgagcaggccgcagtggggcccgcccctgacagtctgcaggtgagcgcccagcctgccgaacaagagctacgacgcttgagagaggaaaacgaaagactgaggagggaactgcgggccggccctcaagaagagcgggcactcctcagacagctcaaggaggtgactgatcgtcaacgcgacgagctgcgcgcccacaatcgagacttaagacagagaggccaggagaccgaagcactgcaggaacagctgcagcgactgctcctggtgaacgcagagttgcgccacaagctcgctgctatgcaaacccagttgagggccgcacaggacagagagcgcgaaagacagcagcccggagaagctgccacaccacaggccaaggaacgcgcccgaggccaagccgggaggcccggtcatcagcatggccaggagcctgaatgggccacagccggcgcaggggctccgggtaatccggaagacccagccgaggctgcccaacaattgggcagaccgtctgaagccgggcagtgccggtttagcagggaggaattcgagcagatactccaagaaaggaatgaactgaaggccaaggtgtttctgctgaaagaggaactggcctattttcaacgcgagctgctgactgaccaccgcgtgccaggtctcctgctggaggctatgaaagtagccgtcagaaagcagagaaagaaaatcaaagctaaaatgttaggaacacccgaggaagccgagagctccgaggacgaagccggtccctggatcctgctttccgatgataagggagatcatcctcctcccccagaatccaaaatccagagcttctttggtctctggtataggggcaaagctgagagctcagaagacgaaacaagcagccccgcccctagtaaactgggtggggaagaagaggcccaaccccaatcccctgcccccgacccaccttgttcagccctgcacgagcacctatgcctgggtgcttccgcagcacccgaagcttag

SEQ ID NO: 131410 - DNA, 1212 bp, synthetic construct
  misc_feature 1..1212: note = Description of Artificial Sequence: Synthetic coding sequence
  source 1..1212: mol_type = other DNA
atggaggaagagcgtggcagcgccctggcagcagagtctgcccttgagaaaaatgtagctgagctcactgtgatggatgtctacgacatagctagtctcgtgggccatgaattcgagcgtgtgattgatcaacacggttgcgaggccatagcaagacttatgccgaaagtcgtgagagtcctggaaattctggaggtcctggtcagcaggcatcacgtggcgccggaactggacgagctgagactggagttggatagactccgcctggagagaatggatcgcatcgagaaggagcgaaaacaccagaaggagctggaacttgtggaggacgtctggagaggtgaagcccaggatttgctcagtcagattgcccaactacaggaagaaaacaaacagttgatgactaaccttagccacaaagatgtgaatttttccgaggaggaatttcagaaacatgagggtatgtctgaacgggaacgacaggtcatgaaaaagctcaaggaggtggttgataagcaacgggatgaaatccgcgcaaaagaccgggaattaggcttgaaaaacgaggacgtcgaggccctgcagcagcagcaaactcggctgatgaagattaaccatgatctccgccacagggtaacagttgtggaggcacagggcaaagcactcattgagcagaaggttgagttagaggcagacttgcagactaaggagcaagaaatgggatctctccgagcggaactaggcaagctcagagaacggctacaaggcgagcatagccagaatggagaagaggaacctgaaacggaacctgtgggggaagagagtatctcggatgccgagaaggttgccatggatctgaaggaccccaatcgtcctagattcacgcttcaggaattgcgtgacgtcttgcacgaacggaacgaactgaaatcaaaggtcttcttattacaggaagagctggcttattataaatctgaggaaatggaagaggaaaacaggattccccagcccccccctattgcacatccgcgcacttctccccagcctgagtccggcatcaaaagactgttctccttcttttctcgggataaaaagcggctggctaacacacagcggaatgttcatatccaagagtcattcggccagtgggccaatacgcaccgcgacgacggctacacggagcaagggcaggaggccttgcagcacttgtag

SEQ ID NO: 131411 - DNA, 636 bp, synthetic construct
  misc_feature 1..636: note = Description of Artificial Sequence: Synthetic coding sequence
  source 1..636: mol_type = other DNA
atggaagagcctcctgtccgcgaggaagaggaggaagaaggtgaagaagatgaagagcgggacgaagtgggtcccgagggcgccctcggtaaatccccttttcagctgacagccgaggatgtgtacgatatcagctatctcctcgggcgtgagctcatggcgttgggttctgaccccagggtgacacagttgcagtttaaggtagtccgtgttctcgagatgcttgaggcgctcgtcaacgaagggtccctggctctggaggaattgaaaatggagcgggaccacctccgcaaggaagtcgagggattgcgccggcagtcacctcctgcatcaggcgaagtgaatctggggccaaacaaaatggtcgtggacctcacagaccccaacagaccccgcttcactctccaagaacttcgtgacgtactgcaagagagaaataaattaaaaagccagctactcgtggtgcaagaagagctgcaatgctacaagagcgggctcatcccaccacgggagggaccaggcggaaggagagagaaggatgcagttgtcactagtgcaaagaacgccggccggaacaaagaggaaaagactataattaaaaaactattcttctttcggagtggcaagcagacttag

SEQ ID NO: 131412 - DNA, 717 bp, synthetic construct
  misc_feature 1..717: note = Description of Artificial Sequence: Synthetic coding sequence
  source 1..717: mol_type = other DNA
atggctgaagataagacaaaaccctccgagttggaccagggcaagtacgacgccgacgacaacgtcaagattatctgtctcggcgattccgcagtgggtaagtcaaaactgatggaacgcttcttgatggatgggttccagccccagcaactgtcgacttacgctttgaccttatacaaacacactgccacagtggacggtcgtaccattctcgtagatttctgggataccgccggccaggaacgtttccagtccatgcacgccagttattaccacaaagcccacgcatgtatcatggtgttcgatgtgcagagaaaggtaacttatcgtaatcttagcacctggtacaccgaactccgcgagtttcgaccagaaattccctgtatagtggtcgctaataaaatcgatgacattaatgtgactcaaaaatctttcaattttgcaaagaaattttcattgcctctttactttgtgtcagctgccgacggcactaatgttgtcaaagtgtggctgaccgcagaggtagcgtcaaaactgttcaacgacgccatccgcttggcggtttcctacaagcaaaactcacaggattttatggatgagatattccaggaactcgaaaatttctctcttgaacaggaggaagaggatgtgccagatcaggaacagtcctcatcgatcgaaaccccctcagaagaagccgcctccccacattcttag

SEQ ID NO: 131413 - DNA, 498 bp, synthetic construct
  misc_feature 1..498: note = Description of Artificial Sequence: Synthetic coding sequence
  source 1..498: mol_type = other DNA
atggctgaagacaaaactaaaccctcggaactggatcagggaaaatatgacgccgacgacaacgtgaaaataatctgcctcggagactccgccgtgggaaagagtaagttgatggagcgcttcctgatggacgggtttcaaccacagcagcttagtacgtatgcgctgactctttataaacataccgctacagtagatgggaaaaccatcctggtcgctgacatcaacgtgactcaaaaatcatttaattttgccaaaaagttctctctgccactttacttcgtgtccgcggccgacggcacaaacgttgtaaagttattcaacgatgccataaggttagccgtatcatataaacagaacagccaagacttcatggatgaaatttttcaggaattggagaacttttcattagaacaggaggaagaggatgtccctgaccaggaacagtcatcatctattgaaactccatcagaggaggtggcaagcccccacagctag

SEQ ID NO: 131414 - DNA, 690 bp, synthetic construct
  misc_feature 1..690: note = Description of Artificial Sequence: Synthetic coding sequence
  source 1..690: mol_type = other DNA
atggcggaggacaagaccaagccctccgagctagatcaggggaaatatgatgccgatgacaacgtgaagatcatctgcctcggagattcagccgtgggaaagagcaagctcatggagcggttcttgatggatggatttcagccgcagcagctgtctacctatgctttgactttgtataagcacaccgccacggtcgacggcaagacgatcctagtcgatttttgggacactgccggtcaggagaggttccagagcatgcacgcgagctattatcataaggcacacgcctgtataatggtgtttgatattcagcgaaaagtaacatacagaaacctctctacgtggtacacagagctccgcgagtttagacctgagatcccgtgcatcgtcgtcgccaacaagattgatgccgatatcaatgtaactcaaaaatcctttaattttgctaaaaagttttccttacctctgtatttcgtttccgcagcggatggcactaatgtcgtgaagttgttcaacgatgcaatcagactcgctgtgagttacaagcagaatagccaagatttcatggatgagatcttccaggaactcgagaacttctcactggagcaagaggaggaggatgtgccggatcaagagcagagttctagcattgaaaccccatccgaggaagtggccagtccccactcatag

SEQ ID NO: 131415 - DNA, 687 bp, synthetic construct
  misc_feature 1..687: note = Description of Artificial Sequence: Synthetic coding sequence
  source 1..687: mol_type = other DNA
atggcagaagataagacaaaaccgtccgagctcgaccaggggaagtatgacgccgatgacaatgtcaagatcatctgtcttggggactctgcagtcggaaagtccaagctgatggaacgcttcctgatggacggatttcagcctcaacagctctctacctacgctctgaccttgtacaagcatacagccacagtggacggtaaaacaatccttgtggacttctgggacacagctggtcaggagcggtttcagtcaatgcatgcctcttactatcacaaagcccacgcctgcatcatggtctttgacatccagcgtaaagtcacgtaccggaatctgtcgacatggtataccgaattgcgcgaattccggccggagatcccatgcatcgtggtggccaataaaatcgacgacatcaatgtgacacaaaaatcctttaactttgccaaaaaattttcactcccattatattttgtcagtgcagctgacggcaccaatgtcgtaaagctctttaacgacgcaatacggctcgctgtctcctataaacagaacagccaagactttatggacgaaatcttccaggagctggaaaacttttccttggagcaggaagaggaggatgtgccagatcaggagcaatctagctccatcgaaactccctctgaggaggtggcctccccgcactcctag

SEQ ID NO: 131416 - DNA, 687 bp, synthetic construct
  misc_feature 1..687: note = Description of Artificial Sequence: Synthetic coding sequence
  source 1..687: mol_type = other DNA
atggcagaggataaaactaaacccagtgaactcgatcagggcaaatatgacgccgacgacaacgtcaagatcatctgcctgggcgactcagcagttgggaagtctaaactgatggaacggtttctcatggatggtttccagcctcagcagctgtctacctatgccctgaccttgtacaagcatacagctacagtcgatgggaagaccattctcgttgatttttgggacacagcgggccaggagagattccagagtatgcacgcctcctattaccataaggcccacgcctgcatcatggtgttcgatatacagagaaaggtcacttacaggaacctgtctacgtggtacacagagctgagggagtttaggcctgaaatcccatgcatcgtcgtcgctaacaaaatcgacgacataaatgtgacacagaaatcttttaatttcgccaagaaatttagcctgcctttgtactttgtttctgccgcagatggaacaaatgtcgttaagctgttcaacgatgcgatccgactggctgtgagctataaacagaatagccaagattttatggatgagatcttccaggaactggagaatttctctttggagcaagaagaagaggatgtgcccgaccaggagcagagcagctccatcgaaacaccctctgaggaggtcgctagccctcattcctag

SEQ ID NO: 131417 - DNA, 717 bp, synthetic construct
  misc_feature 1..717: note = Description of Artificial Sequence: Synthetic coding sequence
  source 1..717: mol_type = other DNA
atggccgaggataagaccaagccatccgagctagaccagggtaagtatgatgccgatgacaacgttaagattatatgcctgggcgacagcgctgtgggtaaatccaaattaatggagaggttcctaatggatggcttccagccacagcagctttcaacatatgctctgacactgtacaagcacaccgcaacagtcgatgggaagaccatcctcgtcgatttttgggataccgcgggccaggaacggtttcagagcatgcacgccagctattaccataaagctcacgcttgcatcatggtattcgatatccagcgtaaagttacctaccgcaatctttccacctggtacacagaactccgcgagttccgacccgaaatcccctgtatcgtagtggctaataagatagacgatatcaacgttacgcaaaaatcattcaatttcgccaaaaaatttagtttacctctatactttgtgagcgccgctgatggaactaacgtcgtgaaagtctggctgacggcagaggtcgctagtaaactgtttaacgacgcgattagactggctgtctcctataaacagaactcacaggattttatggatgagatctttcaggagctagagaacttctcccttgaacaagaggaggaagatgtgcccgaccaggaacagagttcttcaatcgaaaccccgtccgaagaagtcgcttctccgcattcctag

SEQ ID NO: 131418 - DNA, 345 bp, synthetic construct
  misc_feature 1..345: note = Description of Artificial Sequence: Synthetic coding sequence
  source 1..345: mol_type = other DNA
atggctgaggacaagaccaagccttccgaactggatcaaggcaagtatgacgccgatgacaacgttaagatcatatgtctgggcgatagcgccgtggggaagagcaaactgatggagcggtttctgatggacggctttcagccacagcaactcagtacctacgcattaaccctgtataagcatactgctaccgtcgacggtaaaacaattctggtcgatttttgggacactgctggccaagagcgcttccagagtatgcacgcctcctactatcacaaggcgcacgcctgcatcatggtctttgatatacagcggaaggtgacctatagaaacctgtcgacctag

SEQ ID NO: 131419 - DNA, 306 bp, synthetic construct
  misc_feature 1..306: note = Description of Artificial Sequence: Synthetic coding sequence
  source 1..306: mol_type = other DNA
atggctgaagataaaacaaagccatctgagttggatcagggtaagtacgatgctgacgataacgtgaaaataatatgcctgggagactctgccgtcggtaagtccaaactcatggagcggtttctgatggatggatttcagcctcagcagctgtccacttacgcactgacattgtataaacacaccgcaactgtggatggtaagactattttggttgatttctgggataccgccgggcaggaacgcttccagagcatgcacgcctcttactatcacaaggcgcacgcctgtataatgcagacatag

SEQ ID NO: 131420 - DNA, 690 bp, synthetic construct
  misc_feature 1..690: note = Description of Artificial Sequence: Synthetic coding sequence
  source 1..690: mol_type = other DNA
atggccgaagacaagacaaaaccatcggaattggaccagggaaaatacgacgctgacgacaacgtgaagattatctgtctgggagattctgccgttgggaaaagtaaactgatggaacggtttttaatggacggatttcagccccagcagctgagtacttatgccctgacactgtacaaacacacggcgacggtcgatggtcgcaccatactggtggacttctgggataccgctggacaggagaggttccaaagcatgcatgcttcttattaccataaagcccacgcatgtataatggtattcgatgtccagagaaaagttacctacagaaatctctctacttggtatactgaactgcgcgagttccgccccgaaatcccatgtattgtggtcgctaataagatcgatgcggacataaatgttacgcagaaatcttttaattttgcgaaaaagttcagcctgccactgtacttcgtgtccgccgcagatggcaccaatgtggtgaaattgtttaacgatgccatccgcctggccgttagttacaagcagaactcccaggattttatggacgaaatttttcaggaattagagaatttctcgttggagcaggaggaggaagacgtacccgatcaggagcagtcgtcctctatagagactccatcggaggaggccgccagcccgcattcttag

SEQ ID NO: 131421 - DNA, 690 bp, synthetic construct
  misc_feature 1..690: note = Description of Artificial Sequence: Synthetic coding sequence
  source 1..690: mol_type = other DNA
atggcagaggacaagaccaagccaagcgaattggaccaaggcaagtacgacgctgacgataatgtgaagatcatctgcttaggtgactctgccgtcggtaagtctaaacttatggagcggtttctcatggacggatttcaacctcaacagttgtccacctacgcactcactctttataaacatacagctacagtagatggcagaacaatcctcgtggatttttgggatacggctggccaggaaaggttccagtctatgcacgcatcctactatcacaaggcacacgcctgcatcatggtgtttgatgttcagcgaaaggtcacatatagaaacctgagcacctggtacacagagcttagagagttcaggcccgagattccatgcatcgtcgtggcaaacaaaatagacgccgacataaatgtaactcagaagagcttcaacttcgcaaaaaaattctctctgccgctttacttcgtcagtgctgctgacggtacaaacgtggtgaaattgttcaacgacgccattcggttagctgtaagctacaagcagaacagccaggactttatggatgaaatatttcaggaattggagaacttttctctggagcaggaggaagaagacgtacccgatcaggagcagtcttcctcaattgaaaccccttccgaggaagcggctagcccacacagttag

SEQ ID NO: 131422 - DNA, 687 bp, synthetic construct
  misc_feature 1..687: note = Description of Artificial Sequence: Synthetic coding sequence
  source 1..687: mol_type = other DNA
atggctgaagacaaaacaaaacctagtgagctggaccaggggaagtacgatgcagatgataatgtgaaaattatctgtctcggcgactcagcagtggggaagagcaagctgatggaacgatttttaatggacggttttcagcctcaacaactttctacatatgccttaaccttatacaagcacactgctacagtggacgggagaaccatcttggtggacttctgggacactgcgggacaggagaggttccagagcatgcatgcaagttactaccacaaggcacacgcttgcatcatggtctttgatgtacagcggaaggttacttaccgtaatctcagtacctggtacactgagcttagagagtttcgcccagaaataccctgcatcgtggtggcaaacaagatcgatgatatcaacgtaactcagaaaagtttcaactttgccaaaaaatttagtctcccactgtatttcgtttctgcagctgacgggactaatgtggttaagctgttcaatgacgctatccgcctcgcagttagctataagcagaactcgcaagactttatggacgagattttccaggaactggagaacttttcactagaacaggaggaagaggatgtccctgaccaggagcaatcttcaagtattgaaaccccctctgaggaagccgcctccccccacagctag

SEQ ID NO: 131423 - DNA, 63 bp, synthetic construct
  misc_feature 1..63: note = Description of Artificial Sequence: Synthetic coding sequence
  source 1..63: mol_type = other DNA
atggccgaggataaaacaaaaccaagcgagctggatcaagggaagtatgacgcggacgattag

SEQ ID NO: 131424 - DNA, 687 bp, synthetic construct
  misc_feature 1..687: note = Description of Artificial Sequence: Synthetic coding sequence
  source 1..687: mol_type = other DNA
atggctgaggataaaacaaaaccatccgagctagaccaaggcaaatatgacgctgacgacaacgtaaaaatcatatgtctcggcgactctgcagtcggcaaaagtaaactgatggagagattcttaatggacgggtttcagccgcagcaactgtccacttatgcattgactttatataagcacacagctactgtcgatgggcgaaccattctagttgacttttgggataccgctggtcaggagcgatttcagagtatgcatgctagctactaccacaaggcccacgcctgtattatggtctttgacgtgcagaggaaggtaacctaccgcaatctttcaacatggtacaccgagctgcgagagtttagacctgaaatcccctgtattgtggttgcaaataagatagacgacattaatgtgacacagaagagttttaacttcgcgaaaaaattctccctgccactgtacttcgtgtccgcagcagacggtactaacgtcgttaagctcttcaatgacgcgatccggctggccgtttcttataaacaaaacagccaagactttatggacgagatcttccaggagctggagaatttttccttggagcaggaagaagaggacgttccagaccaggagcaatcttcgagcattgaaacccccagcgaggaggccgcaagccctcactcatag

SEQ ID NO: 131425 - DNA, 603 bp, synthetic construct
  misc_feature 1..603: note = Description of Artificial Sequence: Synthetic coding sequence
  source 1..603: mol_type = other DNA
atggcaaagaaaacctatgatctcctgttcaaattgctgctgataggtgactctggagttggcaagacttgcgtattgttcaggttctccgatgacgcctttaacaccaccttcattagcaccataggcatcgatttcaaaatcaaaactgtcgagctgcagggcaagaagataaaattacaaatctgggataccgctgggcaggagcggtttcatacgattacaacgtcttattatagaggcgcaatgggcatcatgctcgtttacgatatcacaaatggaaagtcatttgagaatatctcgaagtggctacggaacatcgatgaacatgccaacgaggacgtcgagcggatgcttctcggaaataagtgtgatatggacgataagagagtggttcccaagggaaagggtgagcagatcgcaagggaacacggaattcggttttttgaaactagcgccaaagcgaatatcaatatagagaaagcctttctgacgttggccgaagatatcctgaggaagactcctgtgaaagaacccaattccgaaaacgtggacatcagtagcggcggtggggtgaccggatggaagagtaagtgctgctag

SEQ ID NO: 131426 - DNA, 1950 bp, synthetic construct
  misc_feature 1..1950: note = Description of Artificial Sequence: Synthetic coding sequence
  source 1..1950: mol_type = other DNA
atgtctctgatggtgagtgctggaagggggctgggggctgtgtggtccccgacacatgtacaagtgacagtgctgcaggccagaggcctccgagcaaagggacctggcggcacgagcgacgcttacgcagtgatccaggtgggaaaagaaaaatacgccacttcagtgtccgagcggagccttggggcccccgtgtggcgcgaagaggcaaccttcgaactgcctagcctgctcagtagtgggcctgctgccgccgccactttacaattgaccgttctgcaccgggcattgttgggactggacaagtttctagggagagcagaagtcgatctgcgggatcttcaccgagaccagggtcgcagaaagactcaatggtacaaactcaagagcaaacccggtaaaaaagataaggagaggggcgaaatcgaggtggacatccagttcatgcggaataacatgaccgccagcatgttcgacttgagcatgaaggacaaaagccggaacccgttcggaaaactgaaagataagatcaagggaaaaaacaaggatagcggttctgatacagcctctgcaataatcccctccacaacaccgagtgtggatagcgatgacgagtccgtggtcaaggataaaaagaaaaaaagcaaaattaagacactgctctctaaatcaaatctgcagaagacccctctttcccaaagcatgagcgtgctgcccacctccaagcctgaaaaagtgttgctcagaccaggcgattttcaaagccagtgggacgaagacgacaatgaagacgaatcgagctccgctagcgatgtgatgagtcacaaacggacagcttcaacagatctgaaacagctcaatcaggtcaatttcaccctcccgaaaaaagaaggcttatctttcctcggagggttgcgatccaaaaacgacgtactgtcccggtcaaacgtctgtatcaatggcaatcatgtgtacttagagcaaccggaggcaaagggcgaaatcaaggattcatccccatcctcaagtccatctcctaagggttttcgaaaaaagcacctctttagtagcacagagaatctggcggccggatcttggaaggagcccgctgagggtggggggctctcctccgataggcagctgagtgaatcatcaaccaaagacagcttgaagtcgatgacactgcctagttataggcctgcccccctcgtaagtggagacttaagagagaacatggcccccgccaactccgaggccactaaggaagcaaaggaaagcaaaaagcctgaatccagaaggtcttctctgctgagcctgatgacgggaaaaaaggatgtagccaagggctcagaaggagaaaatccccttacggttcccgggcgcgaaaaagaagggatgctgatgggcgtgaagcccggggaagacgccagtggccctgctgaagatttagtacggcgctcagaaaaagacaccgctgccgtggtcagcaggcagggtagctcattgaacttgttcgaagatgtccaaatcactgagcccgaggcagaacctgaatcaaagtccgagccacggccaccaatctctagcccaagggctccccagacaagggccgtcaaacctcgcctgcatccagttaagcctatgaacgcaatggccacaaaggtcgccaactgttcgctgggtactgctaccataatttccgaaaatcttaataatgaagtgatgatgaaaaagtactccccgtctgaccctgcatttgcttatgcacagttgacacatgatgagctaatccaactcgtactcaagcaaaaggagactatcagtaagaaggagttccaagttcgtgagctggaggactacatcgataatcttttggtaagagttatggaagagacacctaatattctgcgaattccaacccaggtggggaaaaaagccggaaaaatgtag

SEQ ID NO: 131427 - DNA, 3852 bp, synthetic construct
  misc_feature 1..3852: note = Description of Artificial Sequence: Synthetic coding sequence
  source 1..3852: mol_type = other DNA
atgtctctgatggtgagcgctggtcggggactgggggcagtatggtcaccaacacacgtacaagttaccgtgctccaggcacggggtcttagagctaaggggccaggaggaaccagtgatgcatacgcagtaatccaggtgggtaaagagaagtacgccactagtgtgtccgaaaggtccctgggagcccccgtgtggcgtgaagaggcaactttcgagctaccgtccttgctcagttctggaccggcagctgccgccacgcttcagctaacagtcctgcaccgagccctgctgggcctcgataagttcttaggacgggccgaggtggacctgagggaccttcacagagaccagggccgtcgaaaaacgcagtggtataagctcaaaagcaagccgggcaagaaggataaggagagaggggagattgaggtcgatatacagtttatgcgaaataacatgaccgcctcaatgtttgacttaagtatgaaggataagtcccggaacccattcggtaagcttaaggataagatcaagggaaaaaataaggattctggcagcgacaccgccagcgctataattccatctaccaccccatctgtggactccgacgatgaatcggttgtaaaggataaaaagaaaaaaagtaagattaagacgctgttaagcaaaagcaatctgcaaaaaactccactgtcgcaatcaatgagcgtgctgccgactagtaagcccgaaaaggtgctgctgagacccggggactttcagagtcagtgggacgaggatgataacgaggacgagagttccagcgcatccgacgtgatgtcgcacaagcggactgcatccactgacttgaaacagctgaatcaggtcaattttactctgccaaaaaaggagggactttcattcctgggtggactgaggagcaagaacgatgttctgtcacgaagcaacgtgtgtattaatggaaaccacgtatacctggagcaacctgaggccaagggggagataaaggatagcagcccttcctctagccccagccccaagggtttcaggaagaagcacctgttcagttcaacagaaaatctagctgccgggtcgtggaaggaaccagccgaaggggggggactgtccagtgaccgccaactcagtgagtcctctacaaaagattctctcaaatccatgacactcccatcttaccggccagcccctttggtatctggagatctgagggagaatatggcccctgctaacagcgaggccacaaaagaagccaaggaatcaaagaagccagaatcgcgccgtagctcccttctctcactgatgacagggaaaaaggatgtcgcgaagggatctgagggagaaaatccgctaacagtgcctgggcgtgaaaaggagggaatgctgatgggcgtgaaaccaggggaagatgcctccggacctgccgaggacctcgtcaggagatctgagaaagacacagccgccgttgtctcacgtcagggatcttcacttaatctgtttgaagacgttcagattacggagccggaagccgaaccggaatctaagtcagagccgcgaccgcccatttcttcccccagagcaccacagacccgcgccgttaagccaagactggaggtgtcccctgaagcacagcccactgctagacttccaagtccgaccgatagtccaagtagcctgccaccccttcctagcagtagtggtcaggcaagcgtgccatcggagctggggcatggggcagacactcagtcttcagaatcccctagtgtattcagcagtctctctagtccaatagccgctccaatctcaactagtacccccatcgaatcctggcctcttgtagatcgtgggcaggccaaatcggagggccccccactgttgcccaaagccgagctgcaaaccgagtccctcacacctgttcccaactccggaagctcagccttgggctcactgttcaagcagccatcattcccagccaacaagggaacggaagattccctaatgggtaggactagggagaccggaaccgaaaagaatacttcctccctggaacttgaggagtctctcccggagcagccggagactgggaggcaggaagaggaactgccccgcttcccatgtaagaaacaggactactcaccaagctctggggaggctcaggaggtgccctttgcactgagtttgtccagcgacggagccgtgtcccccgtcggggaactggctgcgggcggtgaccgggatcttgaaagtcaagctggctctcttgtggagtcgaaggctcgcgatgcagccgaggaagtcgccccaccattgccaatgggcgcatccgtgcccagtatagattcaatgatgcggaaactagaggagatgggcttgaacctgcggaaggatcagaagaagacaaagaagcgcgtttcattctctgagcagctgtttactgaagaagcggttgctggggccgctctactggtggaaggccatagctcttgtcctcaggaactgaaccccgcatggtcagtggctggtaatgcctccgatggagagccgcccgagtcccctcacgctgaggactccgaaagagagagcgttaccacccccgggcccgctacctgcggggccccggcttcacccgcagaccacctgctgctcccgagccaggaagagtccttcagcgaagtaccaatgagcgaagctagctctgccaaagatactcccctgttcaggatggagggggaggatgcccttgtgactcagtaccaaagcaaagcttccgatcacgaaggccttctgagcgatcccttatcagatttgcagctggtcagtgactttaagtcccccattatggcagacctgaatttgtcactgcccagcataccagaggttgccagtgatgacgaaagaatagaccaagtggaggacgatggtgatcaggtggaggatgacggcgagaccgccaagtcaagtactctagatataggagccctgtctcttggcttggtggtgccctgcccggagcgcggcaaaggcccctccggagaagcggacaggctcgtgttgggcgagggactgtgcgactttcgactgcaagccccccaggcatccgtcacggctccatccgagcagacaactgaatttggaattcataaaccgcacctcggcaagagctctagtctcgataagcaactgcccggaccaagcggcggggaggaggagaagcctatggggaacgggtcaccatctccacccccaggcacatctctggacaatcccgtaccatcgccctcaccaagtgagatatttccagtcactcatagcttccctagctccgcccattctgatactcaccatacatccaccgcagaaagccagaaaaaagcaactgccgagggaagcgccgggcgcgtcgaaaactttggcaagcggaagccccttttgcaagcttgggtgagtccctcagagacccatccagtgtctgcccagcccggggctgggaccgggtccgcgaaacaccgccttcacccagttaagccaatgaatgccatggcgactaaggtggctaattgcagtctgggaacagctactatcatcagcgagaatctgaacaacgaggtgatgatgaagaaatacagcccttccgatcctgccttcgcatacgctcagctaacccatgatgagctcatccagctggtactaaagcaaaaggagaccatctctaaaaaggagttccaggtgcgtgagttagaagattacatcgataacctgttggtgcgggtcatggaggagacaccaaatattttacgcatccctacccaagttggcaagaaagcggggaaaatgtag

SEQ ID NO: 131428 - DNA, 429 bp, synthetic construct
  misc_feature 1..429: note = Description of Artificial Sequence: Synthetic coding sequence
  source 1..429: mol_type = other DNA
atgtccctgatggtgagcgccggacgtggccttggagctgtttggagtccgactcacgtgcaagttaccgtcctgcaggctaggggtcttagagccaaagggcctggcggaactagtgatgcatacgcagtgattcaagtgggcaaggaaaaatacgcgacatccgtgtccgaacgttctctgggcgcacctgtgtggagggaagaggctaccttcgagctgcccagcctgctctctagcggtcccgccgcggcggctactctccagctaaccgtgttgcatcgagctctgctggggctggacaagtttctcggacgggcagaagtggatctgcgggacttgcaccgagaccttggcaagagcttctttaaaaccctaaagaaaagagcctgggcgatattcctgagactttgcctgaaaaaaaactag

SEQ ID NO: 131429 - DNA, 1320 bp, synthetic construct
  misc_feature 1..1320: note = Description of Artificial Sequence: Synthetic coding sequence
  source 1..1320: mol_type = other DNA
atgcggaataacatgacagcctccatgttcgatctctcgatgaaggataaaagccggaatccttttgggaaactcaaggataaaattaaggggaaaaacaaggactccggcagtgacaccgccagcgcaataatcccatctacgactcctagcgtggattcagatgacgaatcagtggtcaaagataaaaagaaaaagtcgaagatcaagacgctactgtccaaatccaacctccagaaaacacctctcagccagagtatgtcggttctgcccacttctaaacccgagaaagtactgctgcgtcctggtgactttcagagccaatgggacgaggatgataatgaggatgagtcatcttccgcctcagacgtgatgtctcataagaggaccgcaagcacggatttaaaacagttgaaccaagttaacttcacactcccaaagaaggaagggctcagtttccttggtggtctgagaagcaaaaatgacgtgctgtcccgatctaatgtgtgtattaatggcaatcatgtgtatttggagcagcccgaggccaagggcgagattaaagactcatccccaagctcctctccatctccaaaaggcttcaggaagaaacacctcttcagcagcacagagaatctggctgccggcagttggaaagagccagcagagggcggaggcctgtcctcagatcgacagctgtcagaaagttcgaccaaggacagcctgaagtcaatgacacttccatcatacagaccggcaccattagtgtccggtgacttgcgagagaatatggcccctgcgaattccgaagctacaaaagaagccaaggaaagtaagaaacccgagagcagaagaagtagtctgctgtccctgatgaccggaaagaaggacgtggccaaaggcagcgagggggaaaatccattgacggtgcctggaagagagaaggaaggaatgctgatgggggtgaagcccggtgaggatgctagcggacccgccgaggatttggtacggaggtctgagaaagatacagcagccgttgtgtctcggcagggctcgtccttgaatttattcgaggatgtccaaattactgagcccgaagcagagcctgagagtaagagtgaaccccgaccacccatttctagccccagagctccccagaccagggccgtgaaaccccggttgcaccctgtgaagcccatgaatgctatggccacaaaagttgcaaactgttctctgggcactgccacaatcatcagtgaaaacctgaacaacgaagtcatgatgaaggtatgccccctccgcagttggtgtgttcgttag

SEQ ID NO: 131430 - DNA, 1539 bp, synthetic construct
  misc_feature 1..1539: note = Description of Artificial Sequence: Synthetic coding sequence
  source 1..1539: mol_type = other DNA
atgatgctatccgaacaggcccagaagtggtttccaacccatgtgcaggtcacggtgttgcaagccaaagacctgaagcctaagggaaaatccggcactaacgatacttatacgatcatccagttaggaaaggagaaatattctacttctgtggctgaaaagaccctggaacctgtctggaaagaggaagcttcttttgaactgccaggcctcttgattcagggatccccagaaaagtacattttatttttgatcgtcatgcacaggtcactggttggtctagacaagtttctgggccaggtggctattaacctcaatgatatcttcgaggataaacaaagaaggaagacagagtggtttaggctggaaagtaagcaggggaaaaggattaagaataggggtgagattaaggtaaatatccagttcatgcgtaacaatatgaccgccagcatgtttgacctttctatgaaagacaagacacggtctccattcgctaagctcaaggacaagatgaagggacggaagaatgacgggacctttagcgatacgtccagcgccatcattccgagcacacacatgcctgacgcgaattcagaattctccagcggcgaaatacagatgaagtctaagccaaagaagcccttccttctggggccccagagactttccagcgcgcacagtatgagtgacttgtccggatcacacatgagctcagagaagctcaaagccggcactattgggcaaactcacttattgggacaccagctggactcatttggcacagtcccagaatctggatcattaaagtctccacataggcgcactctctcctttgacacaagtaagatgaatcagcccgattcaattgtcgacgaaggcgaactctgttttggcagacagaatgatccttttactaacgttaccgccagcctgccacagaagttcgcaactcttccacgcaaaaagaacccattcgaggaaagcagcgagacttgggactcttcaatgaacctgttttcaaaacccattgagataaggaaagagaataaaagggagaagcgcgagaaggtttccctgtttgagagagtcactgggaaaaaggatagcaggagatccgacaagcttaataatggaggctcagattcgccctgcgatctgaagtcaccaaatgcatttagcgagaacaggcaggattatttcgactatgagtccaccaacccatttactgccaagtttcgagcaagcaacataatgccctctagctctttccacatgagccccacctcgaatgaagatctccgtaaaatccctgatagcaacccattcgacgccaccgctggctaccgctctctgacatacgaggaagttctccaggagctggtgaagcataaagaattgctgaggaggaaagacactcacattagggagctggaggactacatcgacaatctgctcgtgcgggtgatggaggagacaccctccatcctaagagtgccctacgagcccagtcggaaagccgggaagttttcaaacagctag

SEQ ID NO: 131431 - DNA, 1599 bp, synthetic construct
  misc_feature 1..1599: note = Description of Artificial Sequence: Synthetic coding sequence
  source 1..1599: mol_type = other DNA
atgatgctgagtgagcaggcccagaagtggtttcccacccacgtgcaagtcacagttttacaagctaaggatttaaagccaaaaggtaagtcaggcacgaacgatacatacacaattattcagctcggcaaagagaaatacagtaccagtgttgcggaaaaaactctggaacccgtgtggaaggaggaggcgtcattcgagctgcctggtctgctgattcagggcagccctgaaaagtatatactgttcctgattgtgatgcatcgatcactggtggggctggataagttcctcgggcaagttgcaataaatctgaatgatatctttgaggataagcagcgaaggaagacagaatggtttcgtctggagagcaagcaggggaagagaattaagaatcgaggagaaatcaaagttaatatccagttcatgcgcaataacatgaccgcaagcatgttcgacctgagtatgaaggacaagactaggtctccattcgctaaacttaaggataagatgaagggtcggaagaatgatggcacgttctcagatacgtcatccgctatcatcccatccactcatatgcccgatgccaatagtgagttctcatccggcgaaatacagatgaagtcaaaacctaagaaaccattcctcctgggaccacagcgactgtccagtgctcactctatgtccgacctgtcaggttctcacatgtcatcagagaagctcaaagcaggcaccattgggcagacacatctcctgggccaccagttggacagctttgggaccgttcccgagtcaggctctctgaagtctccccataggaggacactgtcatttgacacaagtaagatgaatcaaccagactcaattgtcgatgagggagagctgtgcttcggacgtcagaatgatccatttaccaacgttactgcgagcttgccacagaagttcgcgacgttgcccagaaaaaagaatcctttcgaggagagctcagaaacctgggacagctccatgaatctgtttagtaagcctatcgagattcgcaaagagaacaaacgggagaaacgtgaaaaagtttctctgttcgaacgtgtcaccggaaaaaaggactcgcggaggtctgacaaactgaataatggagggagcgatagcccctgtgatctcaagtcccccaacgcttttagcgaaaatcgccaggactatttcgactacgagtccacgaaccccttcaccgcaaagttccgtgccagcaacattatgccatcctcaagaaataccctcctgacaccggctgttgctgaatggaggggcagcctgcgatgggccgaattgttccacatgtcccctactagcaacgaagatctgcgcaagattccggatagtaatccctttgatgctaccgccggctacaggtctctgacttacgaggaggttcttcaggaactcgtgaagcacaaggagctgctgcgacgcaaagacacacatatcagagagctggaagactacatcgataacctgttagtgagagtcatggaagagaccccctctattcttagggttccttacgaaccgtcgcgcaaagctgggaaattctccaatagttag

SEQ ID NO: 131432 - DNA, 2271 bp, synthetic construct
  misc_feature 1..2271: note = Description of Artificial Sequence: Synthetic coding sequence
  source 1..2271: mol_type = other DNA
atggctagtgccccgcccgctagtcctcctggtagcgaacccccaggaccagatcctgaacctggcggacctgacggacctggagccgcacaacttgctccaggccccgccgaactcaggctcggggctcccgtgggcggccccgatcctcagagccccggcctggatgagcctgcaccaggagctgccgctgatgggggggctagatggtcagcaggtccagctcctggtttagaaggagggcctcgcgaccccgggccatctgccccgccaccgcggtctggcccccgcggtcaactcgcctccccagacgctcctggcccggggccccggagcgaagctcccctaccagagcttgaccctctcttcagctggacagaggaacctgaagaatgcggacccgcctcctgtccagaatcggcgccattcaggctacagggctcgagttcatctcacagagcccgcggagaagtggatgtgtttagcccctttcctgcccccaccgcaggcgaactggcactcgagcaagggcctggtagccccccccagcccagcgatctgtctcagacacatccactccctagtgaaccagtggggtcccaggaggatggaccccgcctgagagcagtttttgatgccctggatggcgatggggatggctttgtgagaattgaggatttcattcaatttgcaactgtatatggggctgagcaagtgaaggacctgacgaaatatctggatcctagtggcctcggcgtaatcagctttgaggacttctaccagggaattacggctatacggaacggagatcccgacggacagtgctacggtggtgtcgcctctgcacaggatgaggagcccttggcgtgccctgatgagtttgatgatttcgtgacttacgaggccaatgaagttaccgacagtgcatacatggggtcagagagtacctattctgaatgcgaaacattcactgacgaggacaccagcacccttgtgcatcctgagctgcagcctgagggcgatgccgacagtgctggcgggtcagctgtgccaagcgagtgtctagatgctatggaggagccagatcacggggctcttcttctcttaccaggtagaccccatccccacggccagtcggtgatcacagtcataggtggggaagaacatttcgaagactacggcgagggctccgaagccgagctttcccctgaaacactctgtaacggccagttgggctgtagcgatccagcctttttaacaccatcaccaaccaagagactgagcagtaaaaaagttgccagataccttcaccaaagcggggcactcaccatggaagccctggaagatcctagtcccgagctgatggaaggaccagaagaggatatcgccgataaagtggtgttccttgagaggcgagtactcgaattagagaaagacacagcggcgacaggcgaacagcactcgaggctcagacaggaaaatctccaacttgtccaccgagcgaacgctctggaggaacagttgaaggaacaggagctcagggcctgcgagatggttcttgaggagacgcgcaggcagaaagagctcctgtgcaaaatggagcgagaaaagtccatcgagattgagaatctgcaaactcgtctgcagcagctggacgaggaaaactccgaactcagatcctgtacaccgtgtctgaaggctaacattgaaagactggaagaggagaagcagaagttactggacgaaatagaaagtctgacactccggctgtccgaggaacaggaaaataaaaggcgcatgggtgatagactgagccacgagcgccaccagttccagagagacaaggaggcaacccaggaactaattgaagacctgcggaagcagctggagcatctgcagctccttaagctggaggcagaacagcgcagagggagatcctcatcaatgggtttgcaagagtaccattcaagggctcgcgagtcggaactcgagcaggaagtccgccgcctgaaacaggacaaccggaatctaaaagagcaaaacgaagaactgaatggacagataatcaccctgtcaatccagggagccaagagtctcttctccacagcattcagtgaatccctcgctgctgagatcagctctgtctcaagagacgaactcatggaagccatccagaagcaggaggagattaatttcagactgcaggactatatcgacaggatcatcgtcgcaattatggaaacaaatccttcaattctagaggttaaatag

SEQ ID NO: 131433 - DNA, 1383 bp, synthetic construct
  misc_feature 1..1383: note = Description of Artificial Sequence: Synthetic coding sequence
  source 1..1383: mol_type = other DNA
atgtccttactgagagctaacgaggttacagactctgcttacatgggcagcgaatcaacgtactccgagtgcgaaacttttacagacgaagacacatccaccttggttcatcccgaactacagccagagggtgacgcagactctgctggaggcagcgcagtgccgtccgaatgccttgatgcaatggaagaaccggatcacggtgccctgttactgttgccagggaggccccacccacacggtcagagcgtgattactgtcatcggcggggaggaacacttcgaggattacggagagggcagcgaggcggagctgtccccggagacactgtgcaacggccagctcggctgtagtgatccagcctttttgactcctagtcccacgaagagactatcttcaaaaaaagtggctcgctacctacaccagagcggagctctgacaatggaagctctagaggatccttccccagaactcatggaggggccagaagaggacatcgctgataaggtagtcttcctagaaagacgggttctggagctagagaaagacacagctgcgactggcgaacaacattctagattgaggcaagagaatctccagctggtgcatcgtgcaaacgctcttgaagaacagctaaaagagcaggaactccgagcctgcgaaatggtcttggaggaaacacgcagacagaaagagttgctgtgcaagatggagagggaaaagtctattgagattgaaaatctgcagaccagattgcagcaactcgatgaagagaacagtgaactccgttcatgcactccatgtctgaaagccaacatagagcgcctggaagaagaaaaacagaaactattggacgagattgaatccctgaccttgaggttatccgaggaacaagagaacaagcgtcgcatgggcgacagactctcacacgagcgccatcagtttcagagagataaggaggcaacacaggagcttatcgaagatctcaggaaacagttagaacacctgcaactgctgaagttagaggccgaacagcgtcgcggccgtagtagcagtatgggtctacaggagtatcattctcgagcccgggaaagcgagctggagcaggaggtcaggagactgaagcaagacaatcggaacctgaaggagcagaacgaagagttgaacgggcagatcataactctcagtatccagggagcgaagtccttattctctaccgccttttctgagtccctggcagccgagatctccagtgtgtctagagatgagttgatggaggcaatccagaagcaggaggagatcaattttagactgcaggactatatagaccgcattatcgtggctatcatggagacaaacccgtccattcttgaggtgaagtag

SEQ ID NO: 131434 - DNA, 1383 bp, synthetic construct
  misc_feature 1..1383: note = Description of Artificial Sequence: Synthetic coding sequence
  source 1..1383: mol_type = other DNA
atgccatttctgaaggcaaacgaggtgacggatagcgcatacatggggtctgagtcaacgtactcggagtgtgagacattcaccgatgaggacacttcgaccctcgtccaccctgagctgcagccagaaggcgacgcagactcagcggggggcagtgcagttccttctgaatgcctagacgccatggaggagcccgatcatggcgccctgctcctgttacccggtcgaccccaccctcacgggcaaagtgtgattaccgtgataggcggagaagagcattttgaggattatggcgagggaagtgaggccgagctgtcacccgagactctgtgtaacggccagttaggatgtagcgatccagcttttctgacgcccagtccaacaaaacgcctaagctctaagaaagtggcgcgttacctacaccagtcaggggccctgaccatggaggccctggaggatcctagcccggagttaatggaaggccctgaggaggacatcgccgacaaggtggtgttcctggaacggcgtgtgctcgagcttgagaaagatactgcagccacgggagagcagcatagcagattaagacaggagaacctgcaactggtgcaccgagccaacgcactggaggagcaactgaaagaacaagagctcagggcatgtgagatggtccttgaagaaacacggcgccaaaaggagttgttatgtaagatggagagggaaaaatcgatcgagatcgagaatttacagactcgtttgcagcagctggatgaggagaattcagaacttcggtcctgcacaccgtgtctgaaggctaatattgagcggctggaggaagagaagcagaagctgcttgacgagatcgagagtctgactctgcggctatctgaggaacaggaaaataagcggagaatgggtgaccggctgagccatgagcgccaccaattccagcgagataaggaggccactcaagaactgatagaagatctgcgcaaacagttggagcacctgcagctgctcaagttagaggccgaacagcgtaggggtcggagttccagtatgggattgcaggagtaccatagccgtgccagggagagcgaattagaacaggaagtgcggaggctgaagcaggacaataggaatctgaaagaacagaacgaagagctcaacggacagataatcacactgtccatacagggggccaagagcttattctctacagccttctcagagtccctcgccgctgaaatatcatctgtcagccgagacgagttaatggaggcaatccaaaagcaggaggaaattaattttcgtctgcaggattacatagaccggatcattgttgccataatggaaacaaatcctagcattctggaagtcaagtag

SEQ ID NO: 131435 - DNA, 549 bp, synthetic construct
  misc_feature 1..549: note = Description of Artificial Sequence: Synthetic coding sequence
  source 1..549: mol_type = other DNA
atgggatcggaaagcacttactcagagtgcgagaccttcactgacgaagacaccagcaccctggtccatcctgaactccagcctgagggagacgccgactctgccgggggctctgctgtaccttcagagtgccttgacgcaatggaggagccagaccacggcgcgctgctacttctgccaggtcgccctcacccccatgggcagtcagtaatcaccgttataggcggggaagagcacttcgaagattacggagaagggtctgaagccgagctgagtccggagacgttgtgtaacggccagctaggctgcagcgacccagcttttttgacgccgtctcctacaaagcggctgtcctctaagaaagtcgctcggtatctccatcaatcgggtgctctgactatggaggcgttagaagatccaagcccagaactaatggagggccctgaagaagacattgcagacaaagtggtgttcctcgagaggcgtgtgttggagctggaaaaagatactgcagctactggagaacaacattctagactcagacagtag

SEQ ID NO: 131436 - DNA, 2406 bp, synthetic construct
  misc_feature 1..2406: note = Description of Artificial Sequence: Synthetic coding sequence
  source 1..2406: mol_type = other DNA
atggccagtgctccaccagccagcccgcccggttcagaacctccaggtcctgaccccgaacctggcggtccggacggtcctggtgctgcacaattggcgcctggtccagctgaattaaggctgggtgcacccgttggcgggccagatccccagtcaccaggtctagacgagccagctcctggagcagcggcagacgggggggctaggtggagtgctgggcccgcacctgggttagaaggcggacctagagatcctggaccatctgcccccccaccccgcagtggtcctagagggcagctggcttccccagacgcaccaggccctgggcctagatctgaggccccactacctgagctggatccgctttttagttggactgaagaacccgaggaatgcgggcctgcgtcctgtccggagagcgcccccttccggctgcaaggttcctcatcgtctcacagggcacggggggaggtggatgtcttcagcccatttccagccccaactgctggagaattggccttggagcagggccctggcagtccaccacagcctagcgacttatcccagactcatcctttgccaagcgagcctgtaggatcacaagaagacggcccgcgactcagggcggtttttgacgcactcgatggtgatggtgacggttttgtgagaattgaggacttcatccagttcgccactgtgtacggagcagagcaggtaaaggacctgaccaagtacttggacccaagtggcctcggggtgatcagttttgaagacttttaccaaggtattactgcgatacgcaatggcgaccccgacggacagtgctatggtggggttgccagtgcccaggacgaggagcccttggcgtgccctgacgaatttgacgatttcgtgacttatgaagccaatgaggtgacggacagtgcttacatggggtccgagtcaacgtactctgagtgcgagacttttaccgatgaggatacctcaaccctcgtccaccctgagctgcagccagagggtgacgccgactctgcaggcggatctgctgtgccgagcgaatgtctggatgccatggaggagcctgatcacggtgccctcctcttgctgcctgggcgccctcatccccatgggcagtccgtcataaccgtgatcgggggcgaagaacattttgaggattatggagaggggtctgaagctgagctgtcccccgaaacattatgtaacggtcagctaggctgctctgacccggcatttctcaccccctcaacagaccccctggctgccaaactgcacagcattctcacagatgaggcgttcgagttttattgcagtcagtgtcataaacaaattaatcgcttagaggacctttccgcccggttgtccgatttggaaatgaattctccgaccaaaagattgtcttctaagaaagtcgcgcggtacctccatcagtccggcgcgctcactatggaggccttggaagatccttcaccggagctgatggaaggaccagaggaagacatagcggataaggttgtgttcctcgaaagaagagttcttgagctggaaaaggatacagcagccacaggggagcagcatagccgactccgtcaagagaatctacagctggttcaccgggccaatgccctggaagaacagctgaaagagcaggagttacgagcttgcgagatggtgttagaggaaaccaggcggcagaaagagctgctctgcaaaatggaacgggagaagtctatcgaaatcgaaaatttacaaacgaggctgcagcaactggacgaggaaaactccgaactcagaagttgtaccccctgcttgaaggcaaatattgagagattggaagaggagaagcagaaactgctcgatgaaattgagagcctcactctcaggctttccgaggagcaggagaataagcggcggatgggcgaccggttatcccatgagcgccatcagtttcagcgggataaagaggccactcaagagctcatcgaggatctgagaaaacaactggaacacctgcagctcctgaaattagaagccgagcagaggcgcggaaggtctagctccatgggcttgcaagaatatcattccagagctcgggagagtgagctcgaacaggaggtgagacgcctgaaacaggacaatcgcaacctgaaagagcagaatgaggagctaaacggacagattatcacactgtccattcagggggccaagtctctattcagcaccgcgttttctgagtcgcttgcagcggagatctcatctgtgtcgagggacgagctgatggaagcgatccaaaagcaggaagaaattaactttagactgcaggactacattgatagaattattgtggcaatcatggaaacgaaccccagcattctggaggtgaagtag

SEQ ID NO: 131437 - DNA, 1914 bp, synthetic construct
  misc_feature 1..1914: note = Description of Artificial Sequence: Synthetic coding sequence
  source 1..1914: mol_type = other DNA
atggcaggcggggcaggctggagtggggcaccggcagccctgctccggagtgtgaggcgtctgcgcgaagtgttcgaggtgtgtggccgggacccagatggcttcctgcgggtagaaagggtggcggctttgggacttcgtttcggacaaggagaggaagtggaaaagctcgtgaaatacttggatcctaatgaccttgggcgaatcaattttaaggatttttgccgcggtgtcttcgcaatgaagggctgtgaggaactgctgaaggacgtactgtccgtggaatctgccggaacactgccttgcgcccctgaaattcccgattgcgttgaacaagggagtgaagtgactggaccaacatttgcagatggcgagctgattccgcgggagccgggtttcttccctgaggatgaagaagaggcgatgacattggctccccccgagggccctcaggaactgtacactgattctcccatggagtctactcagagtctggagggctctgtgggatctccagccgagaaggacggaggactgggcggcctgtttctgcctgaggataagtccttagtccatacaccctcaatgaccacgtcagacctgtcaacacacagtacaacttctctgataagcaacgaagaacaattcgaggattatggagaaggtgatgatgtggactgcgccccatcaagcccttgccccgacgatgaaactagaaccaatgtttactccgacctgggaagctccgtgtccagcagcgccggacaaacaccccggaagatgagacatgtgtacaacagcgagctgctagacgtctattgctcacagtgctgtaagaaaatcaatctcctgaatgatctcgaagcccgcctgaaaaacctaaaggccaactctcctaaccggaaaatttcttctacagccttcggcagacaactcatgcactccagcaacttttcctcctcgaatgggtctactgaggatctgtttcgagacagcattgactcctgcgataacgatattacggaaaaggtgtcatttctggagaagaaggtgaccgagctggagaatgacagcctgaccaatggcgatttgaagtccaagttgaagcaagagaatacacagctcgtccaccgagtgcacgagctcgaggagatggtgaaggaccaagaaacaacggctgagcaggccttagaggaggaggctagaaggcaccgtgaggcctacggaaagcttgagagagaaaaggcaaccgaggttgagcttctgaatgcccgagtacagcagcttgaagaggaaaacacagagctgagaacgacagtgacacgcttaaagtctcaaaccgagaagttggatgaggagcggcagcggatgtccgataggctcgaagatacctcactacgcctcaaggatgagatggatctgtacaaacgaatgatggataaattacgacagaaccgccttgagtttcagaaggagcgagaagctacgcaagaactcatagaggatctccgcaaagagctggagcacttacagatgtataaactagactgtgaacggcccggtcgtggacgctctgcttcctcagggctgggagagttcaacgcacgcgccagagaggttgaactggaacatgaggtcaagcggctcaaacaggaaaactacaagttgcgggaccagaatgatgacttgaacgggcagattttgtctctcagtctctacgaggcgaaaaatctcttcgctgcccagacaaaggcccaaagcctggccgccgaaattgacacagcttccagagatgagctgatggaggcactgaaagagcaagaggaaattaacttcaggttacggcagtacatggataagattatcctagccatcctggatcacaatccatccattctcgagatcaaacattag

SEQ ID NO: 131438 - DNA, 1914 bp, synthetic construct
  misc_feature 1..1914: note = Description of Artificial Sequence: Synthetic coding sequence
  source 1..1914: mol_type = other DNA
atggcaggcggcgccggttggagcggtgcccccgccgcactcctgcggagtgtgcggaggctgcgggaggtctttgaagtttgcgggcgagaccctgacggctttctgcgggtcgaacgagtagccgccctagggctgcggtttggtcagggggaggaagtggagaaattggttaaatacctggatcccaacgatctgggtaggatcaacttcaaggacttttgtcgcggagtttttgcaatgaaaggatgcgaggagctcctgaaggatgtcctgtcagtggagagcgccggaacgctgccttgtgcgccggagatacccgactgcgtcgaacagggttccgaagtgaccggaccgacatttgcagacggagagcttatacctcgagagccggggttttttccagaggacgaagaagaggctatgaccctggctccccccgaaggccctcaggagctctacaccgactcacccatggagtcaacacagagtctggaggggtctgttgggtctccagcggagaaagacggggggctgggaggcctgttcctgccagaagacaaaagcctcgtacatacgccctccatgacgacgtctgacttatcaacacactccacaaccagcctcatttccaatgaggagcaatttgaagattacggcgagggtgatgatgtggactgcgcacctagcagcccctgccccgacgacgagacgaggaccaacgtgtattcggatctcggaagctccgtttcgagcagtgcaggccaaacgcctcggaagatgcggcatgtctacaacagcgaactgctggatgtctactgctctcagtgctgtaagaaaattaatcttctaaacgatctagaggcgcgcctcaaaaatctgaaagcaaatagcccgaacaggaaaatcagcagcaccgcatttggtcgtcaactgatgcattcttcaaattttagttcctccaacggaagcacggaagatctgtttcgcgacagcatagactcatgcgataacgatattaccgaaaaagtttcctttctggagaagaaggtcacagaattggagaatgactctctgaccaatggagacctcaagtccaagctgaagcaggagaacacccaattggtgcatcgggtccacgaactggaagagatggtgaaagaccaagaaacaaccgctgagcaggcccttgaggaagaggcccgccgacacagagaagcatatgggaagctggaacgggaaaaggccacagaggtagaactactcaacgcccgcgttcagcagctggaggaagaaaacacggaactgcgtactactgtgacgcggctcaagagtcagaccgagaaacttgatgaggagcgccagaggatgagcgacaggcttgaagatacttcactcagactgaaagacgagatggacctttataagaggatgatggacaagctgcgacagaaccggctcgaatttcaaaaggagagagaggctactcaggaactaatcgaggatttgagaaaagagctcgagcatctgcagatgtataaactggactgtgaacggcccggtagggggaggtcagcctccagtggacttggggagttcaatgcacgggccagggaggttgagttagagcatgaggtcaaacgcctgaaacaagagaattataagttgcgggatcagaacgatgaccttaacggccaaatcctgagtctgagtctttacgaggcgaaaaacttgttcgccgcccagaccaaagcccaaagcctagctgcggaaatcgatacggctagccgggacgagcttatggaagctttgaaggaacaggaagagattaacttccggctgagacagtacatggacaaaataattctggccattttggaccacaacccttcaatactggaaatcaaacactag

SEQ ID NO: 131439 - DNA, 651 bp, synthetic construct
  misc_feature 1..651: note = Description of Artificial Sequence: Synthetic coding sequence
  source 1..651: mol_type = other DNA
atgggaactagagatgatgagtacgattacctctttaaagtggttctgataggggatagtggcgtgggcaagagcaatttactttccaggtttaccagaaacgaattcaacctagagagtaagtccacaattggtgtggagttcgccaccaggtcaatccaagtggacggaaagacaatcaaagcccagatctgggataccgccgggcaggagaggtatcgcgcgatcacatcagcatattatagaggtgccgtcggagccctgctggtatacgacatcgccaagcatctgacgtatgaaaacgtagagcggtggctcaaagaattgagggaccacgcggatagcaatatcgtcatcatgctggtcggtaacaagtcagatctccggcacctccgtgccgtccccacagacgaagcccgcgcctttgccgaaaagaatggcctctcgtttattgaaactagcgcattggactccacgaacgttgaggcagccttccaaacgattttaaccgagatttatagaattgtcagccagaagcagatgtccgatagacgggaaaatgatatgagcccatcaaataatgttgtacctatccacgtccctccgaccactgagaacaaaccaaaggtgcagtgctgccagaacatttag

SEQ ID NO: 131440 - DNA, 468 bp, synthetic construct
  misc_feature 1..468: note = Description of Artificial Sequence: Synthetic coding sequence
  source 1..468: mol_type = other DNA
atggggactcgtgacgacgagtatgactacctgtttaaggtagtgctgattggtgactcgggagtggggaagtccaatctgctgagtcggtttaccagaaacgaatttaatcttgagtcaaagtcgactatcggcgtcgagttcgccaccagatccatccaggtagatggcaagactatcaaagcacaaatttgggatactgcgggccaggagagatatagggctattactagtgcctattatcggggggccgtgggagcactgttggtttatgatattgccaagcacttgacctatgaaaatgtggaacgttggcttaaagaactgcgtgaccatgctgattctaatatagtgattatgctcgtgggcaataaaagtgacctgcgccatctgcgcgcagttccaaccgatgaggcccgggcgtttgctggatataacaaggcgaatgtccgacaaacaaggaaatag

SEQ ID NO: 131441 - DNA, 612 bp, synthetic construct
  misc_feature 1..612: note = Description of Artificial Sequence: Synthetic coding sequence
  source 1..612: mol_type = other DNA
atggcgaaggcttacgaccacctgttcaagctgctgctgatcggggatagcggcgtaggaaagacatgtctgataataagatttgccgaggataatttcaacaacacgtacatatccactattgggattgatttcaagattcgcacagtggacattgaaggtaaaaagatcaagctgcaggtctgggatacggccgggcaggagcggttcaagaccattaccactgcttactatcgtggcgcaatgggaattatattagtctacgatataactgatgagaaaagcttcgaaaatattcagaactggatgaaaagtattaaagagaacgcatcagccggggtggaacggctgctcctcggtaacaagtgcgacatggaagccaagaggaaagtccagaaggagcaagcagataaactcgctagggaacacggcattaggtttttcgagacatctgctaaaagttccatgaatgtggatgaggcgttcagtagtttggcgagggatatactactgaaatcgggcggacgcagatcgggcaacgggaacaagccgcccagtactgacctcaaaacatgcgataagaagaataccaataaatgtagcctgggatag

SEQ ID NO: 131442 - DNA, 648 bp, synthetic construct
  misc_feature 1..648: note = Description of Artificial Sequence: Synthetic coding sequence
  source 1..648: mol_type = other DNA
atggccactgccccctacaactattcttacatattcaagtatataattataggtgacatgggcgtggggaagtcttgcctgttgcaccagttcaccgagaagaaattcatggctgattgccctcacaccatcggtgttgagtttgggacccggatcattgaggtgagtggccagaagatcaagctgcagatttgggataccgccggtcaggagaggttccgcgcggttactaggtcctattacagaggggctgctggggctctcatggtctatgatatcaccaggcggagcacatacaaccatctctctagttggttgaccgacgctcggaacctgaccaatcctaatacagtcattatcctaataggaaataaagcagacttagaggcacaaagagacgtgacatacgaagaagccaaacagttcgctgaagaaaatggcctgttgttcctggaggccagcgcaaagactggagaaaacgtggaagacgccttcctggaggccgctaaaaagatatatcaaaatatccaagacggctccctggatttgaacgccgccgagtccggggtgcaacataaaccttccgccccacagggaggaaggctgacaagcgagccccagccccaacgcgagggttgcggctgctag

SEQ ID NO: 131443 - DNA, 546 bp, synthetic construct
  misc_feature 1..546: note = Description of Artificial Sequence: Synthetic coding sequence
  source 1..546: mol_type = other DNA
atggccactgcgccgtacaactactcatacatcttcaaatacataatcatcggggatatgggggtcggtaaaagctgtttgcttcaccagtttactgagaaaaaattcatggccgactgtcctcataccattggggtggaatttggcacacggatcatcgaggtaagcggacagaagataaagctccagatatgggacacagccggacaggagcgctttagggccgtgactcgctcctactatcgcggcgcagccggggccttaatggtgtatgatataactcggcgctctacgtataaccatctgagtagttggctcaccgatgcacggaacctcacaaacccgaatacggtgatcatcctgatcggcaacaaggctgatctcgaggcccagagggacgtcacatatgaagaggctaagcaattcgctgaagagaatgggctcctgttcctcgaggctagcgctaagacaggagagaatgtagaagatgccttcttagaggccgccaaaaaaatataccagaacatacaggatggcagtctgtag

SEQ ID NO: 131444 - DNA, 711 bp, synthetic construct
  misc_feature 1..711: note = Description of Artificial Sequence: Synthetic coding sequence
  source 1..711: mol_type = other DNA
atgggccagaaagcctctcagcagctggcgttgaaggattcaaaagaagtgcctgtggtgtgtgaggttgttagtgaagcaattgtccacgctgcccaaaagctaaaggagtacctagggtttgaatacccgccctctaaactgtgcccagcagccaatacactgaatgaaatcttcttaatccacttcatcactttttgccaagagaaaggggtggatgaatggctgactacaacaaagatgacaaaacatcaggccttcttattcggagccgattggatttggaccttttggggctcaaataagcagattaagctgcaactggccgtgcaaacccttcagatgagcagccccccgcccgtcgagagtaaaccatgcgacctcagtaatcctgagagccgcgttgaagagtcttcctggaagaaatcgcgcttcgataagctggaagaattttgcaacttgatcggcgaggactgtctcggactcttcatcatctttgggatgcccggcaaacctaaagacattaggggcgtagtgctggattcggtcaagtcccagatggttcgatctcatctgccaggtggcaaagccgttgcccaatttgtcctagaaacagaagattgtgttttcatcaaggagcttcttcgaaattgcctttcaaagaaagacgggctgcgcgaggtggggaaagtttatatcagtattctctag

SEQ ID NO: 131445 - DNA, 639 bp, synthetic construct
  misc_feature 1..639: note = Description of Artificial Sequence: Synthetic coding sequence
  source 1..639: mol_type = other DNA
atggcccaagcccatcgcacccctcagccccgcgctgccccgagccagcctcgggtttttaaactggtgctcttgggtagtggatcagtgggcaaatcctcgctggctctgcggtatgtgaagaatgattttaagtctatccttccgacggtgggatgcgctttctttaccaaagtggtggacgtgggcgctacctcacttaagctagaaatttgggataccgcggggcaggaaaagtaccatagcgtatgtcacctctacttcagaggcgctaacgccgctctgctggtttatgatatcactcgcaaagattcattcttaaaggcccaacagtggctcaaagacttggaagaggagctgcaccccggggaggtcctagtgatgctggttggaaacaagactgatctgagtcaggaacgagaagtaactttccaggaaggtaaggagtttgctgactcccaaaagctgctatttatggaaacctccgcaaagttgaatcaccaggtgagtgaggtgttcaacacagtcgcgcaggagctgttgcagaggtctgacgaagaggggcaggcattacgcggagacgctgccgtggccttgaacaaaggacccgcgagacaagcgaagtgctgtgctcactag

SEQ ID NO: 131446 - DNA, 258 bp, synthetic construct
  misc_feature 1..258: note = Description of Artificial Sequence: Synthetic coding sequence
  source 1..258: mol_type = other DNA
atgctagttggaaataaaacagacctctcacaagagcgcgaggtcacctttcaggagggaaaagaattcgcagactcacagaaattactgtttatggagacctctgcaaaactgaaccatcaagtgtctgaggttttcaacactgtagcgcaggagctactgcaaagaagcgacgaggaggggcaagctttgcgaggcgatgccgcagttgcactgaacaaaggccctgctcgccaggctaagtgctgcgcccattag

SEQ ID NO: 131447 - DNA, 621 bp, synthetic construct
  misc_feature 1..621: note = Description of Artificial Sequence: Synthetic coding sequence
  source 1..621: mol_type = other DNA
atggatgaggacgttctcactacccttaagattctgatcataggtgaaagtggcgtgggaaagtcctcgctattgctacgtttcacagatgacacgttcgaccctgaactggctgccactatcggagttgacttcaaagtgaagacaatcagtgtcgacgggaataaggccaagctggccatctgggacaccgccggccaggaacgcttcaggactctaacccctagctactacaggggcgcacaaggcgtgatcctagtgtatgatgtgaccaggcgtgacacctttgtaaagctggataattggcttaacgaactcgagacctattgtactcggaacgatattgtcaatatgttggtgggcaataaaattgataaagagaatcgtgaggtggacagaaatgaaggactgaagtttgcccgcaaacatagcatgttgtttattgaggcttcagccaagacatgcgatggcgtccagtgcgcctttgaagagctggtggaaaagatcatccagacccctggcctgtgggaatctgagaaccagaacaaaggtgtgaaactgtctcaccgggaagagggccagggcggcggggcgtgcgggggctactgctcggttttgtag

SEQ ID NO: 131448 - DNA, 486 bp, synthetic construct
  misc_feature 1..486: note = Description of Artificial Sequence: Synthetic coding sequence
  source 1..486: mol_type = other DNA
atggatgaagacgttctgacaactctaaagatcttaattatcggggagagcggtgttggtaagtcatccctgctgctgcgctttaccgacgacacatttgaccccgagctggctgctactattgtgtatgatgtgactcgccgcgacacattcgtgaaactcgacaactggctgaatgaactcgagacctactgtacccgcaacgatatcgtgaacatgcttgtagggaataaaattgacaaggagaaccgagaggtggataggaacgagggcctcaagtttgcgagaaaacactcaatgctcttcattgaagccagcgccaagacatgcgatggcgttcagtgtgctttcgaggagctcgtcgagaaaattatccagaccccggggctgtgggaaagcgagaaccagaataaaggggtgaagctgtctcatagggaagaagggcaaggggggggtgcatgcggtggctattgctccgttctgtag

SEQ ID NO: 131449 - DNA, 876 bp, synthetic construct
  misc_feature 1..876: note = Description of Artificial Sequence: Synthetic coding sequence
  source 1..876: mol_type = other DNA
tgacggttgccaggctcacgccctctgcctggcccaagcagcctcgggagaagcccctcttgttctgccgaaaaaacccccttccggggcccacctcttggtcgtcagtccgctgtgaaggagctggacttagtaacagcaggcaagtttcggttcagtgtgcgctccgaatgtttcagtcgggggccgcctctgaagatcaagtgtaattgctacttttctttttgccacatcctttggagacagaaaatctctgtggtgctgtcattctttaccttttccttgggcaaaatcatcctgacggttgagctctctatatcgctgttactcaggtttaccgacgatactttcgatccggaactggctgcaaccatcggcgtagacttcaaagttaaaactattagtgtagatggtaacaaggcgaaacttgccatctgggtgactctgcaccagcaaaccgccaactttttcctcaaaagtcagatcggaaattctccgatcctgaaatgggccatgtggcagtatgatactgccgggcaagagcgatttcggacacttactcctagttactacaggggcgctcaaggcgttatcctggtgtatgacgttacgaggcgggacacctttgttaagctggacaactggctgaatgagctggagacatattgcactagaaacgatatcgtgaacatgctggttggcaataagattgacaaagagaacagagaggtggatagaaatgagggtttaaagttcgctcgtaaacattcaatgttgttcatcgaggcaagcgcaaagacctgtgacggcgttcaatgcgcattcgaggaacttgttgaaaagatcatacagacccccggactgtgggaatcttag

SEQ ID NO: 131450 - DNA, 429 bp, synthetic construct
  misc_feature 1..429: note = Description of Artificial Sequence: Synthetic coding sequence
  source 1..429: mol_type = other DNA
atggacgaggatgtcctaacaaccttaaagattctcatcattggggaaagcggggtcggaaagtcatcactcttgctgagatttactgatgacacattcgatcctgagctggccgcaaccataggggtggatttcaaagtgaaaactatctccgtcgacggaaataaagcaaagctggcgatctgggaaaatcgggaagttgaccgaaacgagggtctgaagtttgcccgcaaacatagcatgctgtttattgaagcttcagcaaagacgtgcgatggggtgcagtgtgctttcgaagaactggtggagaaaattattcagacacccgggctttgggaatccgagaatcagaataaaggcgtgaaattgagccaccgagaggagggccagggaggcggagcttgtggcggatactgttctgtcctgtag

SEQ ID NO: 131451 - DNA, 555 bp, synthetic construct
  misc_feature 1..555: note = Description of Artificial Sequence: Synthetic coding sequence
  source 1..555: mol_type = other DNA
atggatgaggacgtgcttacaaccttgaaaatcctgatcatcggtgagtctggtgtgggcaaaagctcactccttctaaggtttacagatgacactttcgaccctgaactggcagcgactgacactgctggacaggagcgtttccgaaccttgacaccatcctattacagaggcgcacaaggggtgattttggtatacgatgtcaccaggagagatacctttgttaaacttgacaattggttgaatgagctggaaacctactgtacacggaatgacatcgtgaacatgctcgttggaaataaaattgataaagagaaccgggaggttgatcgcaatgagggtttaaagtttgcgagaaaacacagcatgctgttcatcgaggcgagcgccaagacctgtgatggcgtccagtgcgcattcgaggaattagtagagaagatcattcagactcctggcctgtgggagagcgaaaatcagaacaagggcgtgaagctaagccacagagaggagggacaggggggcggggcatgcggcgggtactgttccgtcctgtag

SEQ ID NO: 131452 - DNA, 390 bp, synthetic construct
  misc_feature 1..390: note = Description of Artificial Sequence: Synthetic coding sequence
  source 1..390: mol_type = other DNA
atgagttcaatgaatcccgagtatgactacctgtttaaattactcctcataggggacagcggcgtaggaaagtcttgtctgctgctgcggttcgccgacgatacatacacagaaagctatatcagcacgataggagttgattttaagatacgcacaatcgaacttgacggtaagaccataaagttgcagatcgaatttgctgattccttgggtatacctttccttgagacttcggcaaaaaatgcgactaacgtggaacagtcttttatgaccatggccgctgagatcaagaaacgcatgggacccggagccactgctggcggagcggaaaaaagcaatgttaaaattcagtcaaccccagtgaaacagagtggggggggctgctgttag

SEQ ID NO: 131453 - DNA, 390 bp, synthetic construct
  misc_feature 1..390: note = Description of Artificial Sequence: Synthetic coding sequence
  source 1..390: mol_type = other DNA
atgtcctgcctccatcctaccagcgactatctcttcaaactgttactcatcggagacagcggcgtcgggaagtcttgtctgttactcagattcgcagatgatacctacactgaaagctacatttcaacaatcggcgtggactttaagatccggaccattgaattagatggtaagacgatcaagctgcaaatcgagttcgcggactctcttgggattccatttctcgaaactagcgccaagaatgccacaaacgttgaacagtccttcatgacaatggctgcagagataaagaaacgtatggggcccggggccacagctggcggcgccgaaaaatccaacgtgaagattcagtctacacctgttaagcagtcggggggaggatgctgttag

SEQ ID NO: 131454 - DNA, 522 bp, synthetic construct
  misc_feature 1..522: note = Description of Artificial Sequence: Synthetic coding sequence
  source 1..522: mol_type = other DNA
atgagctccatgaatccggagtacgactatttgtttaaacttcttcttattggagacagcggcgttggcaagagctgcctgctcctccgctttgctgatgatacctacacagagagttacatcagtacaattggcgttgacttcaaaattagaactatcgagctggacggtaagactattaagctacagatagagtcatttaataatgtgaaacagtggctacaggagattgacagatatgcaagcgagaatgttaataagctattggtcgggaataagtgcgacctgaccactaagaaggtggtcgattacacaactgcaaaagagtttgctgattcactggggattcctttcctggaaacctcagccaaaaacgcgacaaatgtggagcagtcctttatgaccatggccgccgaaattaagaaaagaatgggacccggagccaccgccggaggcgcagagaagagtaatgtgaagatacaatccacccccgtcaagcagtcaggcggagggtgctgctag

SEQ ID NO: 131455 - DNA, 522 bp, synthetic construct
  misc_feature 1..522: note = Description of Artificial Sequence: Synthetic coding sequence
  source 1..522: mol_type = other DNA
atgagtagcatgaatccagagtacgattacctgttcaaactgttgctcattggcgactccggcgtgggaaagagctgtctcttgcttagattcgcatgggacaccgctggtcaggaacgattcaggacaatcacttccagttactatcgcggcgcccacgggatcatcgtggtttatgatgtgactgaccaggagtcatttaataacgtgaagcaatggctgcaggaaatagaccggtatgcctctgagaatgttaacaagctactcgtggggaataagtgcgatctgactacaaagaaggtggtggactacacaactgcaaaagagttcgccgattctctcggcattcccttcctcgaaacaagcgctaaaaatgcgaccaatgtggaacagtcattcatgaccatggcggccgagattaaaaaacgcatggggcccggcgccacggctggaggtgccgagaaatctaatgtgaagatacaaagtactccggtgaaacagtcgggaggagggtgctgttag

SEQ ID NO: 131456 - DNA, 618 bp, synthetic construct
  misc_feature 1..618: note = Description of Artificial Sequence: Synthetic coding sequence
  source 1..618: mol_type = other DNA
atgtcctctatgaatcctgaatatgattaccttttcaaacttctgctgatcggtgactccggagttgggaaatcctgtttactgctgcggttcgctgacgatacctatacagagtcatacatcagtaccattggagtggatttcaagatcaggactattgagctggacggaaagacaatcaaactccagatttgggacaccgcaggtcaagagagattcagaaccatcacttcatcttattacagaggagctcacggaatcatcgtcgtatacgatgttaccgatcaggagtccttcaacaatgtaaagcaatggctgcaggaaattgatcgatacgcctcagaaaatgtcaacaagctgctagtcggtaataagtgcgacctcactaccaagaaggtggtggactatactacagccaaggagttcgcagactccctggggattccttttctggagacatcggccaagaacgccaccaacgtcgagcagtcgttcatgaccatggccgctgagattaaaaagagaatgggacccggggccacggcaggaggcgcggaaaagtccaacgtgaagattcagtccaccccagtgaagcagagcggtggcggatgttgttag

SEQ ID NO: 131457 - DNA, 426 bp, synthetic construct
  misc_feature 1..426: note = Description of Artificial Sequence: Synthetic coding sequence
  source 1..426: mol_type = other DNA
atgagctccatgaatccagagtatgactacctgttcaaactgttacttataggagactcaggtgtgggtaagagctgtctactccttcgcttcgctgaatcatttaataatgtgaagcagtggctgcaggagatagatcgttacgccagcgaaaacgttaataaattgcttgttgggaataagtgcgacctgaccaccaaaaaggtggttgactacacaacagcaaaagagtttgccgacagcttaggcattcccttcttggaaacaagcgctaaaaatgccaccaacgtggaacagagtttcatgaccatggcagccgaaatcaaaaagagaatggggccgggcgctactgccgggggtgccgagaaatcaaacgtgaaaattcagagcacccctgtgaagcagtcaggcggaggatgctgctag

SEQ ID NO: 131458 - DNA, 606 bp, synthetic construct
  misc_feature 1..606: note = Description of Artificial Sequence: Synthetic coding sequence
  source 1..606: mol_type = other DNA
atgaaccccgagtatgactacttgtttaagctcctgctcattggcgacagcggtgtggggaagtcttgcctgcttttacgctttgcagacgacacctacactgaatcctatattagcaccataggagttgatttcaagatccggaccattgagctggatggaaagacaataaaactgcagatctgggatacggccggacaggagaggttcaggaccattacaagctcatattacagaggggcccacggaatcatcgttgtgtacgacgtcacagatcaggaatcatacgcgaacgtaaaacagtggctccaggagatagataggtatgcctccgaaaatgtcaataaattattggtgggcaataagtcagatctgactactaagaaggtcgtcgataacactactgctaaagaattcgctgatagtttgggtatacctttccttgaaacctccgccaagaatgccaccaacgtggagcaggccttcatgactatggcggccgagatcaaaaagcgaatggggcccggcgccgcctcaggcggcgaaaggccaaacttaaaaatcgacagtacacccgtgaaaccggcgggcggaggctgctgctag

SEQ ID NO: 131459 - DNA, 489 bp, synthetic construct
  misc_feature 1..489: note = Description of Artificial Sequence: Synthetic coding sequence
  source 1..489: mol_type = other DNA
atgaatccagaatacgattatctgttcaagcttctgctcatcggagacagcggagtcggaaaaagttgtctgctgttgcggtttgctgacgacacgtatacagaatcttacattagtacaatcggagttgacttcaaaattcgcacaatagagctggacgggaagacaattaaacttcaaatctgggataccgcaggtcaagagcgcttccggaccattaccagctcctattaccggggggcacatgggattatcgtcgtgtatgacgtgaccgaccaggaaagctacgccaatgtcaagcagggctgccgccggctaacggccatgcccgctcggacgtctatttcttcatggtgggcaacgcgtgccaccagcccgcctaggcggtggtggacaactccacaaccacgctcattacagacgctgtgggcctcaccctcatggaggcgggctcccagaatgccacccatgtcttcgcgtagaagttag

SEQ ID NO: 131460 - DNA, 360 bp, synthetic construct
  misc_feature 1..360: note = Description of Artificial Sequence: Synthetic coding sequence
  source 1..360: mol_type = other DNA
atgaacccagagtacgactacctctttaagctacttctgataggagactcgggtgttggtaagagttgcctgctcctgagatttgccgatgacacttacactgaatcatacatatccacgattggggtggatttcaaaataaggaccatcgaactcgatgggaagacgatcaaactgcagatctgggacaccgctggacaagagagatttcgaacaatcacctcatcttattaccggggagcccatggaattatcgttgtctacgacgtgaccgatcaggagagctacgccaatgtcaaacagtggttacaggagatcgaccgatacgctagcgagaacgtaaataagctcctggtgtag

SEQ ID NO: 131461 - DNA, 678 bp, synthetic construct
  misc_feature 1..678: note = Description of Artificial Sequence: Synthetic coding sequence
  source 1..678: mol_type = other DNA
atggcagccgccggcggaggtggcggtggagctgcagcagcaggcagagcctacagctttaaggtagttctactaggcgagggatgcgtagggaagacctccctcgtgcttaggtactgcgagaacaagttcaatgacaaacatattactactcttcaggcatcatttttaacgaagaaactcaatatagggggcaaacgagtgaatctggctatctgggacacggctggccaggagcggttccatgccttagggcccatttattaccgggattctaacggcgctattcttgtgtatgacatcactgacgaggactcttttcagaaggttaagaattgggtcaaagagctgagaaagatgttgggtaatgagatctgtctctgtatcgtgggtaataaaatcgatttggagaaagagcggcacgtatcaatccaagaagccgaaagctacgctgaatctgtgggagcgaagcattaccatacctcggcaaagcagaacaaaggcatcgaagaactctttcttgacttgtgcaaaagaatgattgaaactgcgcaggttgacgagcgggccaaaggcaatggtagttcacagcccggaaccgcaaggcgcggcgtgcagattatcgatgacgagccgcaggcccagacctccggaggcgggtgttgcagtagtgggtag

SEQ ID NO: 131462 - DNA, 585 bp, synthetic construct
  misc_feature 1..585: note = Description of Artificial Sequence: Synthetic coding sequence
  source 1..585: mol_type = other DNA
atggcattacgtgaactgaaagtgtgtctgttgggcgacactggggtgggcaagagcagcattgtctggcgctttgtggaagatagcttcgaccctaacattaaccctactatcggcgcatccttcatgacaaaaaccgtccagtatcagaatgaattgcacaaatttcttatctgggacacagcgggccaggaacggtttcgcgcactggctccgatgtattatagaggctctgccgcggccattatcgtttacgacattacgaaggaagagaccttttccaccctgaagaactgggtgaaagaactgaggcaacatggcccccctaacatcgtggtggccatcgctggaaataaatgtgacttgattgatgtgcgggaagttatggaaagggacgccaaagactacgccgatagtattcatgccattttcgtggagacctccgcaaaaaacgcaatcaacatcaacgaattgttcatagagatttcccggcgaataccgagtaccgatgctaacctgccctccgggggcaaggggttcaaattgcgtagacagccctccgagccaaagcggagttgttgctag

SEQ ID NO: 131463 - DNA, 714 bp, synthetic construct
  misc_feature 1..714: note = Description of Artificial Sequence: Synthetic coding sequence
  source 1..714: mol_type = other DNA
atgctggaggaggacatggaggttgcgattaagatggttgtcgtgggcaatggcgcagtgggcaaatctagtatgatccagcgttactgtaagggtatctttactaaggactataagaagacaataggagtggacttcctggagcgacaaatacaggtcaacgatgaagatgtcaggcttatgctgtgggataccgcaggacaggaagagttcgatgcgataactaaagcatattacagaggggctcaggcatgcgtcttggtattctccaccacagaccgcgagtcttttgaagcagtgtcatcctggcgtgagaaagtggtggccgaggtcggggatatccccacagtgcttgtgcaaaacaaaattgatctgctcgacgactcctgcatcaaaaacgaagaagcagaggccttggcgaaacgactgaagttgcgattctaccggacaagtgtgaaggaagatctgaacgtgaatgaggtctttaagtatttagctgaaaagtatctacagaagctgaaacagcagattgctgaggatcctgaactaacacattctagttctaataaaattggagtgtttaatacctccggaggcagccacagcggacagaacagcggaactctaaacggaggagatgtcattaacctgcgccccaacaagcagagaactaaaaagaatagaaatcccttcagttcatgctctattccatag

SEQ ID NO: 131464 - DNA, 714 bp, synthetic construct
  misc_feature 1..714: note = Description of Artificial Sequence: Synthetic coding sequence
  source 1..714: mol_type = other DNA
atgctggaggaagatatggaggtggcaattaagatggtggttgtggggaatggcgccgttggcaagagctctatgatccagaggtattgcaaggggatctttaccaaggactataagaagaccattggagtggatttccttgagagacagatccaggtgaatgatgaagatgttcgcctgatgctgtgggacactgccggacaggaggaatttgacgctattactaaagcctactaccgaggtgcgcaggcctgcgtcctggtcttctctactacagacagggaaagttttgaggccgtgtcgagttggagagagaaagttgttgcagaagttggagatatacccacggtgctggtacagaacaagattgacttgctggacgattcatgcatcaaaaacgaagaagccgaggctctggctaaacgactcaagctcagattctatcgaacctctgtaaaagaggatctgaatgtgaatgaggtgttcaaatatctggcggagaaatacctgcaaaagctcaaacagcagattgctgaggaccccgaactcacccactcttcttccaataaaatcggcgtttttaacacctctggaggaagccactccgggcagaattctggcacactaaatggcggcgacgtaatcaacctccgcccaaacaaacagagaactaaaaagaataggaatcccttctctagctgcagcatcccctag

SEQ ID NO: 131465 - DNA, 612 bp, synthetic construct
  misc_feature 1..612: note = Description of Artificial Sequence: Synthetic coding sequence
  source 1..612: mol_type = other DNA
atgagcggccagcgcgtcgacgtcaaggtggtgatgctcgggaaagagtatgtgggaaagacgtctctggtggagcggtatgtgcacgaccggttcctggtcgggccttatcagaataccatcggagctgccttcgttgccaaggtgatgtccgtaggcgatcgaacggtcactctgggaatttgggataccgcgggcagtgagcgatacgaagccatgtctcgaatctactatcgtggagccaaggcagccattgtatgctacgacttgaccgattcttcatctttcgagcgagccaaattctgggtgaaagagctacgctctctggaagaagggtgtcaaatctacctgtgcggaactaagagcgacctgctggaggaagatcgacggagacgacgtgtggactttcatgacgtccaagactacgccgataatatcaaagcacagctgtttgagaccagcagtaagacggggcaatctgtggacgagctcttccaaaaagttgccgaggactatgttagcgttgctgccttccaggtgatgacagaggacaagggtgtcgacctcgggcagaagcctaacccatacttttactcttgctgtcatcactag

SEQ ID NO: 131466 - DNA, 612 bp, synthetic construct
  misc_feature 1..612: note = Description of Artificial Sequence: Synthetic coding sequence
  source 1..612: mol_type = other DNA
atgtcaggtcagcgagtagatgtgaaggtggtgatgctgggtaaggagtacgtgggaaaaacctcactggttgaaaggtacgtccacgaccggttcctggtcggcccctaccagaacactatcggcgccgctttcgtggccaaggtaatgtctgtgggcgaccgcacagtgactctggggatttgggacacggccgggtccgaaagatacgaggctatgtcgcggatctattaccggggagcaaaagcagccatcgtgtgttatgacttgaccgactcgtcaagtttcgagcgggccaagttctgggtcaaggagcttcgtagccttgaggagggctgtcagatctatctgtgcgggaccaaatccgatctgctggaagaggataggagaagaaggcgggtggatttccatgacgtgcaagactacgccgacaacattaaagcccagctgttcgaaacatccagtaaaaccggccagtcagtagacgagcttttccaaaaagtggccgaagactatgttagtgtcgcggcgtttcaggtcatgacagaggataagggcgtggacttagggcagaaacccaatccgtatttttacagctgctgccatcattag

SEQ ID NO: 131467 - DNA, 201 bp, synthetic construct
  misc_feature 1..201: note = Description of Artificial Sequence: Synthetic coding sequence
  source 1..201: mol_type = other DNA
atgtccggtcagcgggttgacgtcaaggtggttatgctgggaaaggagtacgtggggaaaacaagccttgttgagcgctatgtgcatgatcgctttctggttggtccctatcagaatactatcggagctgccttcgtagcaaaagtcatgtccgtgggcgacaggaccgttacactgggcatctgggatactgcaggctag

SEQ ID NO: 131468 - DNA, 642 bp, synthetic construct
  misc_feature 1..642: note = Description of Artificial Sequence: Synthetic coding sequence
  source 1..642: mol_type = other DNA
atggggaatggaactgaggaagattacaacttcgtattcaaggtagttctcatcggtgaaagcggagtaggtaaaacgaacctactgtctagattcacccggaatgagttttcccatgattctcgtactacaattggcgttgagttctccaccagaaccgtgatgctggggactgctgcagtcaaggctcagatttgggataccgctggattggaaaggtaccgggccatcactagtgcctattatagaggggcagttggggcgctcctggtgttcgaccttactaaacatcaaacttacgctgtagtggagcggtggcttaaggaactctatgaccacgctgaggccactatagtggtgatgctagtgggtaacaagagtgatcttagccaggccagagaagtcccgacagaggaagcccggatgttcgccgaaaacaatggactactgttcctggaaacgtctgccctggattccacaaacgtggagttggcgttcgagactgtgttgaaggaaattttcgccaaggtaagcaaacagcgtcagaacagcatccggacaaatgcaattacactgggcagtgcgcaggccggccaggagccaggcccaggggaaaaacgtgcttgttgcattagcctctag

SEQ ID NO: 131469 - DNA, 1110 bp, synthetic construct
  misc_feature 1..1110: note = Description of Artificial Sequence: Synthetic coding sequence
  source 1..1110: mol_type = other DNA
atggaagggtccctggagagggaagcacctgctggagctttggccgctgtactaaagcactcttcaactctgcccccagagtcaacacaggtgcgtggttatgattttaatcgcggagtcaactaccgggcacttttggaagcctttggcaccacggggtttcaagccacgaatttcggtcgggcggtacagcaagtcaacgccatgattgaaaaaaagctagagcccctcagtcaggacgaagatcaacatgcagatctgactcagagcaggcgccctttgacgtcctgtaccatatttctggggtacacatccaacctgatctcatctgggatccgggagacgatccggtacctagtgcagcacaacatggtcgacgtgctcgtgactaccgccggaggggtagaggaagacctcatcaagtgtttggccccgacatatcttggggagtttagcctgcgaggcaaggagctgcgggaaaatggtatcaatcgtattggaaacctgctggtgcctaatgagaattactgtaaattcgaggactggctaatgcccatcctggaccaaatggtcatggagcaaaacacagaaggtgtcaaatggactcctagcaaaatgattgctcgacttgggaaggagattaataatcctgaaagtgtctactactgggctcagaagaatcacatccccgtgttcagccccgctttgactgatggctctttaggtgatatgatcttttttcactcatataaaaatcccggtctcgttctggacatcgttgaagacctccggctgataaatacacaggcaatttttgccaaatgcacaggtatgatcatcctggggggcggggttgtgaaacaccacatagccaatgccaacttgatgagaaatggggcagactatgctgtctacataaataccgcccaggaatttgatggatctgattcaggcgcccggccagacgaagccgtctcttggggcaaaatacgcgtggatgcccagccagttaaggtttatgccgatgcctcactagtctttcccctgctggtggccgaaacattcgctcagaaaatggatgcatttatgcacgagaagaacgaggattag

SEQ ID NO: 131470 - DNA, 573 bp, synthetic construct
  misc_feature 1..573: note = Description of Artificial Sequence: Synthetic coding sequence
  source 1..573: mol_type = other DNA
atgctggtcggagatagcggcgtaggcaaaacctgtctgttggttcgctttaaggacggcgcctttctggcgggaacgttcatttctactgtgggaatcgactttcggaacaaagtcttggatgtcgatggagtgaaggtgaaactgcagatgtgggacaccgccggccaggagagattcagatctgtgacacacgcctactatcgagatgcccatgccctgctgttgttatacgacgttacaaacaaagccagctttgacaatatccaggcttggctgaccgagatccacgagtacgcacagcatgatgttgctctgatgctacttggaaacaaggttgatagtgcccacgaaagagtcgtgaaacgggaagacggtgagaagttggcgaaagaatatgggctcccttttatggaaacttctgctaagactggcctcaacgtggatcttgcctttacagccattgcaaaagaactaaaacagaggtctatgaaggcgccatccgaacccagattcaggctgcacgactacgttaaacgtgagggtcgcggggccagctgttgcaggccgtag

SEQ ID NO: 131471 - DNA, 666 bp, synthetic construct
  misc_feature 1..666: note = Description of Artificial Sequence: Synthetic coding sequence
  source 1..666: mol_type = other DNA
atgagtgacggcgattacgattacctcataaagtttctagctctcggggactcaggcgtcggcaaaacctccgtgctgtaccagtacacagatgggaagttcaactcaaagttcattacgacagttgggattgattttagagagaagcgtgtggtctatagggctagcggacctgacggcgccaccggacggggtcagcgaatccacttgcagttgtgggacaccgcaggacaggagcgatttaggtcactcaccactgccttctttagagatgctatgggattcctattgttatttgaccttactaatgagcagagtttcctcaacgtcagaaactggatctcccaactgcagatgcacgcttattgcgagaatccagatattgtgctctgtgggaataaaagtgacttggaagaccaacgcgtcgtgaaggaggaggaggccattgccctcgccgaaaaatacggcattccatattttgagaccagcgccgctaatggcacgaacatttcgcaagcaatcgagatgctgcttgatcttatcatgaagaggatggagcgctgtgtggataagagctggatcccagagggcgtggtcagatccaacggtcacgcgagcaccgaccagctgagcgaagagaaggagaagggggcctgcggctgctag

SEQ ID NO: 131472 - DNA, 642 bp, synthetic construct
  misc_feature 1..642: note = Description of Artificial Sequence: Synthetic coding sequence
  source 1..642: mol_type = other DNA
atgtcagacggtgactatgattacttgatcaaatttctggctctgggcgactcgggggtgggtaagactagcgttctataccaatatacagacgggaaattcaacagtaagtttattactaccgtagggattgacttcagagaaaaacgcgtagtctatagggcctccggcccagatggcgcgacaggacggggccagcgcatccatcttcagctgtgggacactgccggtcaagaacgcttcaggtccctgactacagctttttttcgagatgccatggggttccttttgctcttcgacctgactaacgagcagagttttctcaatgtacggaattggatttctcagctgcagatgcatgcttattgtgagaaccccgacatcgtgttgtgtgggaataaatccgacctggaagatcagagagtggttaaggaaaagtacggaatcccatactttgaaacatcggccgctaatggcacaaatattagccaggccatcgagatgctcctggacctgattatgaagcggatggagaggtgcgtcgataagtcttggatccccgagggggtggttcgcagtaacgggcatgcaagcaccgaccagctgtccgaagaaaaggagaaaggagcgtgtggatgctag

SEQ ID NO: 131473 - DNA, 666 bp, synthetic construct
  misc_feature 1..666: note = Description of Artificial Sequence: Synthetic coding sequence
  source 1..666: mol_type = other DNA
atgagtgacggggattacgactacttaattaagtttctcgccctgggcgactcaggggtcggcaagacatcagtgctgtatcagtacaccgacggaaagttcaattctaagttcattactactgttggcatagactttcgggaaaagagagttgtgtaccgggcgtcaggtccagatggggccacggggaggggtcagaggatacacctccagctgtgggacaccgccggccaagagcgcttccgatccttgacaacagccttcttccgtgacgccatgggtttcctactccttttcgacctcacaaatgagcagagctttctcaatgtgagaaactggatcagtcagttgcaaatgcacgcgtactgtgaaaaccctgacatcgtgttgtgcggcaacaagtctgacttggaagatcagcgggtggtgaaagaagaagaggcaatcgccctggcagaaaagtacggcataccttacttcgagacatccgctgccaatggaacaaacatttcccaggcgatcgagatgttgctagatctgatcatgaaacggatggaacggtgcgtggataagtcttggattcctgagggtgttgtacgctcaaatggacacgctagtacggaccagctgtcggaggagaaggagaaaggtgcttgcggatgctag

SEQ ID NO: 131474 - DNA, 663 bp, synthetic construct
  misc_feature 1..663: note = Description of Artificial Sequence: Synthetic coding sequence
  source 1..663: mol_type = other DNA
atgagcgactccgaagaggaatcacaagacaggcagctgaagattgttgtgctgggcgatggagcttccggtaaaaccagcctgaccacttgttttgcccaagagacctttggaaaacagtacaagcagactatcggcctcgacttcttcctcaggagaatcacacttccgggaaatctgaacgtgactttgcagatttgggacataggaggccagacgattgggggcaagatgctagacaagtacatctacggtgctcagggggtgctgctggtctatgacatcaccaattaccaatcattcgaaaacttggaggactggtacaccgtggtgaagaaggtgtctgaagaaagtgaaacgcagcctctcgtagcacttgtgggtaacaaaatcgatctggaacatatgcgcacaatcaagccagaaaaacacctacggttctgccaagaaaatgggttcagcagtcactttgttagtgccaaaaccggggattctgtcttcctgtgctttcagaaggtggcggctgaaatcttggggatcaagctcaacaaagctgaaattgaacaatctcagcgcattgtgcgtgcagagatcgtcaaatatcccgaggaggagaaccaacacaccacttccactcagagtaggatttgttcagtccagtag

SEQ ID NO: 131475 - DNA, 666 bp, synthetic construct
  misc_feature 1..666: note = Description of Artificial Sequence: Synthetic coding sequence
  source 1..666: mol_type = other DNA
atgagtgattccgaagaggagtcacaagacagacagctgaagatcgtggtgctgggcgacggagcttcgggcaagacaagtttaactacgtgcttcgcccaggagactttcggcaaacagtacaaacagaccattggcctcgactttttccttcgcagaattacccttcccgggaatcttaatgtgaccctccagatatgggacatcgggggtcagaccatcggggggaagatgctggataaatacatttatggcgcacagggggttttgctcgtttacgacatcaccaactaccagtctttcgaaaacctggaagattggtatactgtggtgaagaaggtttctgaagagagcgagacacaacctctggtggcactggtgggcaacaaaatagacctggagcatatgcggaccatcaagcctgagaaacacttgcggttctgtcaagaaaatggcttcagtagccacttcgtctccgccaagactggggacagcgtttttctctgtttccagaaggtggcagcagagatcctcgggattaagttgaataaggctgagattgaacagtctcagcgtgtggtgaaagctgatatagtgaactacaatcaagagccaatgtcgcgtaccgtgaaccctccacggagtagcatgtgcgcagtgcagtag

SEQ ID NO: 131476 - DNA, 615 bp, synthetic construct
  misc_feature 1..615: note = Description of Artificial Sequence: Synthetic coding sequence
  source 1..615: mol_type = other DNA
atgagtgacagtgaagaagaaagccaggaccggcagctgaaaatcgtggttctgggtgacggcgctagcggcaaaaccagtttgaccacatgttttgctcaggaaaccttcgggaagcagtataagcagaccattggactggatttcttccttcgccgcatcaccctgccaggcaatcttaacgtcacactccaaatatgggatattggcggtcagaccatcggaggcaagatgctggataagtacatatatggagcccaaggtgtactactagtatacgacattaccaactatcagtccttcgaaaatctcgaggattggtatacagtggtgaaaaaagtttcggaagaatctgagacccaaccacttgtggctttggttgggaacaagatagatcttgagcacatgaggaccataaaacccgaaaagcacctgcgcttttgccaggagaatggattttccagccattttgtctcggccaagaccggggatagcgtcttcctctgcttccagaaggtcgcagcggaaatcctgggtattaaactgaacaaggccgagattgagcagagccaaggccattttatcatctttatttcatctacaaacagggaatag

SEQ ID NO: 131477 - DNA, 288 bp, synthetic construct
  misc_feature 1..288: note = Description of Artificial Sequence: Synthetic coding sequence
  source 1..288: mol_type = other DNA
atgtccgattccgaggaggaatcccaggatcggcagctcaagatcgtggtgctcggggacggcgcgtctgggaagacttccctgacaacctgtttcgctcaggagactttcgggaaacagtataaacaaaccattgggttggatttctttcttagacgcatcaccctgcctgggaacctgaatgtgacacttcaaatatgggatatcggcggacagaccatcggaggcaaaatgctggacaaatacatctatggggcacagctgatctggtcgatatgtgaacagtag

SEQ ID NO: 131478 - DNA, 639 bp, synthetic construct
  misc_feature 1..639: note = Description of Artificial Sequence: Synthetic coding sequence
  source 1..639: mol_type = other DNA
atggcatacgcttatttattcaaatacataataattggggatactggtgtcggtaaaagctgtctcctgcttcagttcaccgacaagcgtttccagcccgtgcacgacctgactatcggtgtcgaatttggcgccagaatgatcacgatcgacgggaaacagattaagcttcaaatctgggacacagctgggcaggagtctttccggagcatcactaggagctactaccgaggtgctgccggagctcttctggtttacgatattacgcggcgggatacatttaatcatctgacaacctggctcgaggatgcgcgccagcacagtaattcaaatatggtcatcatgctgataggcaacaagagcgacctggaaagtcgccgggaagtgaagaaggaggagggggaagcctttgcccgagaacacggactgatctttatggagacgtcggccaagaccgccagcaatgtagaagaggctttcatcaacacagctaaggaaatctatgagaagattcaagagggagtcttcgatatcaataacgaagccaacggaatcaagattggaccccagcatgccgcgactaatgctacccatgccggcaaccaggggggacagcaggccggtgggggatgctgttag

SEQ ID NO: 131479 - DNA, 567 bp, synthetic construct
  misc_feature 1..567: note = Description of Artificial Sequence: Synthetic coding sequence
  source 1..567: mol_type = other DNA
atggcttacgcctatctgtttaaatacataattatcggtgatactggcgtcgaatttggggccagaatgatcaccatcgacggcaagcagattaagcttcaaatatgggatacagctggacaggagtctttcagatccataacccgcagttactataggggggccgccggcgctctgttagtatacgacataactcgaagggatactttcaaccacctgacaacgtggctcgaagatgctaggcagcatagcaattccaatatggtgattatgctcataggaaacaaatccgatctggagtctcgaagagaagtcaagaaggaggaaggcgaggcctttgcacgagaacacggccttattttcatggagactagcgccaaaactgcctctaatgtagaagaagcattcatcaacacagcaaaggaaatctacgagaagatacaggagggggtttttgacataaacaatgaggccaatggcattaagatcgggcctcaacacgctgctacaaatgccacccatgctggaaatcagggcggacagcaagccggagggggatgctgctag

SEQ ID NO: 131480 - DNA, 501 bp, synthetic construct
  misc_feature 1..501: note = Description of Artificial Sequence: Synthetic coding sequence
  source 1..501: mol_type = other DNA
atgattactatcgacgggaaacagataaaactgcaaatatgggacaccgcaggccaagaatccttccggagcatcacccgtagttattaccgaggggcagccggagcactgttggtttatgacataaccaggcgagatacatttaatcacctgacaacttggttggaagatgcaaggcaacatagtaacagcaacatggtcatcatgctcatcgggaacaagtctgatcttgaatcccgaagagaggtgaagaaagaggaaggggaagccttcgctagggagcacggccttatctttatggagactagcgccaagactgcatccaacgtcgaggaggcctttataaacactgcgaaagaaatctacgaaaaaatccaggagggggtctttgacattaacaatgaggctaacggaatcaaaattgggccgcagcatgccgctaccaatgccactcacgcgggcaaccaaggcggacagcaggccggtggtggctgttgctag

SEQ ID NO: 131481 - DNA, 630 bp, synthetic construct
  misc_feature 1..630: note = Description of Artificial Sequence: Synthetic coding sequence
  source 1..630: mol_type = other DNA
atgacctatgcttacctcttcaagtatattattatcggtgacactggagtgggcaaatcatgcctgctcctccaatttaccgacaaacgctttcagcctgtgcatgatctgacaatcggagtagagttcggggccagaatggtcaatattgacggtaaacagatcaaactgcagatatgggacacagctggccaggaatcgttcagatctatcacacgatcctactacaggggggcagccggggctctgctggtgtatgacatcactagacgggagacattcaaccacctgacctcttggctggaagatgcccgacagcattcctcgagcaacatggtaataatgttgatcgggaacaaaagcgacctggagagccgaagagatgtaaagagagaagaaggggaggcgttcgctagagaacacggcctgatctttatggaaacatctgccaaaacggcttgcaatgtcgaggaagccttcattaatacagcaaaagaaatttataggaaaatacagcaggggctctttgatgttcataacgaggcgaacggtattaaaattggtccacaacagagtatttccacctccgtgggaccgtctgcatctcagtccgccggacttcaggtctag

SEQ ID NO: 131482 - DNA, 651 bp, synthetic construct
  misc_feature 1..651: note = Description of Artificial Sequence: Synthetic coding sequence
  source 1..651: mol_type = other DNA
atgacatatgcctatctgttcaaatatatcatcatcggcgataccggggtgggtaagtcctgcctgctgttacaattcacagacaaacgttttcaacctgtacacgacctaaccattggggtggagttcggtgctagaatggtgaacatcgacggcaagcagatcaagctgcagatctgggatacagctgggcaggaatcattccgttccataacaagatcgtactaccgcggggctgcaggtgcacttcttgtgtatgacattacccgacgggagacctttaatcacctgacaagctggctcgaagatgccagacaacacagttcctcaaacatggtgataatgctcattggaaataaatctgatttggagtcgagacgcgatgtgaaacgggaggagggagaggccttcgctagagaacatggcctaatttttatggagacgagcgccaaaaccgcgtgcaatgtggaagaggcctttatcaacactgcaaaggaaatctaccgaaagatccagcagggtctgttcgacgtccacaacgaagcaaacggcatcaaaataggaccacaacagagcattagcacatctgtcggaccatcagccagccagaggaactcaagagacatcggtagcaactccggctgctgctag

SEQ ID NO: 131483 - DNA, 189 bp, synthetic construct
  misc_feature 1..189: note = Description of Artificial Sequence: Synthetic coding sequence
  source 1..189: mol_type = other DNA
atgacctatgcatatctttttaagtacattataatcggcgacactggggtaggcaaatcctgcctcctattacagtttactgacaagaggtttcagccagtccatgacctcacaattggagtggagtttggagcacgcatggtgaacattgatggcaagcagatcaagttgcagatttgggacacctag

SEQ ID NO: 131484 - DNA, 2946 bp, synthetic construct
  misc_feature 1..2946: note = Description of Artificial Sequence: Synthetic coding sequence
  source 1..2946: mol_type = other DNA
atggccgccgacagcgagccagagtcggaggtctttgagattactgattttaccactgctagcgaatgggagcgctttatctccaaggtcgaggaggtcctcaatgactggaagttgattggcaattcactgggcaaacctttagaaaagggaattttcactagcgggacatgggaagagaagtcagacgaaatttcattcgcggacttcaaattttctgttacccaccactacctggtccaagaaagcacagacaaggagggcaaagacgaactgctcgaagacgtagtaccacaatcaatgcaagacctgctgggtatgaacaacgattttcctccgcgtgcgcattgcctggtgaggtggtacggcttaagagaatttgttgttatcgctcccgccgcacattcagacgccgttctctcagagtccaaatgtaacctcctgctgagcagcgtcagcatcgctctgggaaataccgggtgccaagtgccactgtttgtgcagattcatcataaatggcggaggatgtatgtcggagaatgccagggaccaggagtacggaccgactttgaaatggtacacctgagaaaagtgcctaatcagtatactcatctgtctgggctgctggacatcttcaagagtaagattggttgccccctgactcctctcccccccgtgtcaatcgcaatccggtttacttatgtgctgcaggattggcaacaatacttttggcctcaacagccaccagatatcgatgcactggttggcggagaggtgggagggctggaattcgggaaacttccgttcggcgcttgtgaggatcccatttcagagctgcatcttgccactacatggccacacttgactgagggtatcattgtggataacgacgtctacagtgatcttgatccaatccaagctccccattggtcagtgcgggtgcggaaagccgagaatccccaatgcttgctaggcgatttcgtgaccgaattctttaagatatgtaggagaaaggaatccaccgacgagatcctgggaaggtcggccttcgaggaagagggcaaggagaccgcagacatcacccacgccctgtccaaactcacggagccagcctccgtgcctatacataaattgtcggtcagcaacatggtgcacaccgccaagaaaaagattcgaaaacatcggggtgtcgaagaaagccctctgaataatgatgttcttaacaccattctcctatttctctttccagacgccgtatcggagaaaccgttagatggcactaccagcaccgataataacaacccacccagtgaatctgaagactacaacctgtacaaccagtttaagtcggcaccatccgactccctcacatacaagttagctctgtgtctgtgcatgatcaatttttatcatggaggcctaaaaggtgtcgcccatttgtggcaagaattcgtcctggaaatgagatttcgctgggagaataatttcctgatccctggacttgcgtctggccctccggacctccgctgctgcctcctccaccagaagctgcaaatgctgaattgctgcatcgagaggaaaaaggctcgggacgagggcaaaaagacatccgcttctgacgtgaccaatatctatcctggcgacgctgggaaggccggggatcaactggtcccagataacctgaaagaaacagataaggaaaagggagaggtggggaaatcttgggactcatggtctgatagtgaagaggaattcttcgagtgcctgagcgacactgaggagctgaaaggtaacggacaggagtccgggaaaaaaggaggcccaaaggagatggcaaaccttcgaccggagggccggctttatcaacatggaaaactgactctgttgcataacggggagcccctgtatattcctgtcacacaggaacccgctccaatgaccgaagacctgctcgaggagcagtcagaagtcctcgcgaaactgggaaccagtgcagaaggcgcacacctgagagccaggatgcagtcggcatgcctcctgtctgacatggagagctttaaagccgcaaaccccggatgctccctggaagattttgtacgatggtacagcccgagagattacatcgaggaagaggtaatcgatgagaagggaaatgtggttctcaaaggggaattgtcagccagaatgaagattccttccaacatgtgggtcgaagcctgggagactgccaagcctattccagcccgcagacagagaagactattcgacgatacccgggaggccgagaaggtgttgcactacctggccatccagaaacccgctgatctggcaagacacctcctgccgtgcgtgatccacgcagctgtgctcaaggtcaaggaagaggagagtttggaaaacatatcctctgtaaagaaaattattaagcagattatctctcattctagcaaggtactgcacttccctaatcctgaagacaaaaagctggaggaaatcatccaccagatcaccaacgtcgaagctctcatcgcccgagccaggagtctaaaggcaaagttcggtacagagaaatgcgaacaagaggaggagaaagaagacctggaacgcttcgtgtcttgtctgctggagcagccggaggttttagtcacaggggcaggccgtggacacgccggccggattattcacaagttgtttgtcaatgcccagagggcagccgctatgactccccctgaggaggagctaaaacgaatgggatccccggaagagaggcgacagaacagcgtgtccgactttcctcccccagcggggcgcgagttcattctgaggaccactgtgcctaggccagcaccttatagtaaggccctgcctcagaggatgtactccgtcctgactaaggaggacttcagactcgccggagcattctccagtgacacatcttttttctag

SEQ ID NO: 131485 - DNA, 2808 bp, synthetic construct
  misc_feature 1..2808: note = Description of Artificial Sequence: Synthetic coding sequence
  source 1..2808: mol_type = other DNA
atgttttcccttattagcggaatattcacgtcaggcacttgggaggaaaagtccgacgaaatctcatttgccgattttaagttctccgtgacacaccactatctggtacaggaatcaacggataaggagggcaaggatgagttgctggaggacgtggttccccagtcaatgcaggatctgctgggaatgaataatgacttcccaccacgtgcacactgtctggtgcgctggtatggcctcagagagttcgtagtgatagcgcctgccgctcacagtgatgccgtgttgagcgagagtaaatgcaatctcctgctttcctccgtaagtatcgcccttggcaacactgggtgccaggtgccactgtttgtccagatacatcacaagtggcgtcgtatgtacgtgggtgagtgccagggccccggtgtgcgaaccgatttcgaaatggttcacctgcggaaagtgcccaatcaatatacgcacttatctgggcttttggacatctttaagagcaagattggctgccccctgacacccctcccacctgtctcaatagctattcgtttcacatacgtgcttcaggattggcaacagtatttctggccacaacagccacctgacatcgatgcactggtgggtggcgaagtgggtggtctcgaattcgggaagctgccctttggggcttgtgaagacccaatcagcgagttgcatctcgctacgacatggccccatctaacagagggaattattgtagataacgatgtttattcagacctggatccaatccaggccccgcactggtcggtgagagtgcgcaaggcagaaaatccacagtgtctcctgggtgacttcgtcactgaatttttcaagatatgtcggcgcaaagaaagtacagatgagatacttggtagatccgccttcgaggaagagggaaaagagaccgcggacattacccacgccctgagcaagttaaccgaacccgcaagtgttcccatccacaagctgagcgtctccaacatggtccacacagccaagaaaaaaattcggaaacaccgtggcgtcgaggagtccccactgaataatgacgtgctgaacaccatactattatttctattcccagacgctgtgagcgaaaaaccactcgatggcacaaccagtaccgataataataacccaccttctgagagcgaagactataatctgtacaaccagtttaaaagcgccccttcggacagcttgacatacaaattggcgttgtgcttatgcatgatcaacttttaccacggaggactcaagggtgttgcacatctatggcaggagtttgttttagaaatgagattccgctgggaaaacaatttcctgatcccagggctcgcgtccggtccacctgatttaagatgctgtcttctgcaccagaaactgcaaatgctcaattgttgcatcgaaagaaaaaaggctcgagatgaggggaagaaaaccagcgcatccgacgttacaaacatatacccaggcgatgctggaaaggccggtgaccagctggtgccagacaacctcaaggaaacagacaaagagaagggggaagtaggaaagtcttgggactcttggagtgacagtgaagaagagtttttcgaatgtctgtccgacacagaagagctaaaaggaaatgggcaggaatctgggaagaaaggggggcctaaagagatggccaatctccggccagaaggtagactttaccagcacgggaaattgactctactgcacaacggagagcccctctacatccccgtgactcaggagccagctccaatgaccgaggatctcctggaggaacagagtgaagtattagctaagctcggcacatcggccgaaggagcccaccttagggcccgaatgcaaagtgcgtgcctgttgagcgacatggagtcctttaaggcagcgaaccctggttgcagcctcgaagattttgtgaggtggtactctcctcgggactatatcgaagaagaagtcatcgacgagaaaggtaacgtggtgctgaaaggcgaactgtctgcacggatgaaaatccccagcaatatgtgggtcgaagcatgggagaccgccaagcctatccctgcacggcgacagcgccgtctgtttgatgatacacgggaagccgaaaaggtcctgcactacctcgccattcagaagcccgccgacctagcacggcatctgttaccgtgcgtgattcacgccgcagttctaaaggtgaaagaggaagagagcctggaaaacatcagttctgtcaaaaagatcatcaaacaaatcatttctcattcctccaaggtcttgcacttccccaatccagaggacaagaaactggaagagattatacatcaaattacaaacgttgaagctctgatcgcaagggcccgttccttgaaggctaagttcggtacagaaaagtgtgaacaggaggaagaaaaagaagacctcgagaggttcgtgtcttgtctgctcgagcagcctgaggtgctggtgaccggagccggcagagggcacgccggccgaatcattcataaactattcgtgaatgcccagcgggccgcagctatgactccaccagaggaagagctgaaacgaatggggagccctgaagaacgtaggcagaactccgtgtccgacttccccccccccgccggaagggaatttatcttgcgcaccaccgtgcctcgtcccgctccttactcgaaggcgctaccacagcgcatgtactctgtgctgacaaaagaggacttcaggttggctgtgaagatcatagatggggatgtctag

SEQ ID NO: 131486 - DNA, 2967 bp, synthetic construct
  misc_feature 1..2967: note = Description of Artificial Sequence: Synthetic coding sequence
  source 1..2967: mol_type = other DNA
atggcagccgactctgaacctgagtcggaagtgttcgaaatcaccgattttactacagcctccgaatgggagcgctttatatctaaagtagaggaggtgctgaatgattggaaacttatcggaaacagcctcgggaagccgttggagaaagggatttttacaagcggtacttgggaggagaaaagtgacgaaatctcattcgcagacttcaaattcagcgtcacacaccattatttggttcaggagagtaccgataaggagggcaaggatgagcttctggaggatgtagtacctcaaagtatgcaagatctgcttggcatgaacaatgattttcctccgagggcgcattgtttggtgcggtggtacggtctgagagagttcgtcgtcattgctcctgccgcacactccgacgcggtgctgtctgagagtaagtgtaatctgctgttaagctccgtgagcattgcgctcggtaacacaggttgtcaggtccctctgttcgtgcagatccaccacaagtggaggcggatgtatgtcggcgaatgccagggaccaggagttcgtactgattttgaaatggtgcacctgagaaaggttccgaatcagtatactcatctctcgggcctgcttgacatctttaaaagtaaaattggatgtcccctcacccctctgccgcccgttagcattgccatccgttttacttacgttcttcaagactggcagcagtacttttggccacagcagccccctgatattgatgctttggttggcggagaggtaggcggtctggagttcggaaagctgcccttcggagcatgtgaagatccaatcagcgagctccacctggctacaacatggccccacctaacagagggtatcatcgtggataacgatgtgtactccgatctcgacccaatccaggcgccacattggtcagtccgggtgaggaaagccgaaaaccctcaatgcctgcttggcgacttcgtgaccgaattcttcaagatatgcaggagaaaagagagcacagacgagattctggggagaagtgcattcgaagaggagggaaaagaaacggctgacataactcatgctctttcaaaactgaccgaacccgcttcggttcctattcacaagctgtccgtatccaatatggttcatactgctaagaaaaaaatccgcaaacacagaggtgtagaggagtcccctcttaataatgacgttctgaatacgatactcctgtttctgtttcccgacgctgttagcgagaaacccctggatggcacgacctcgacagacaataacaatcctcccagcgagagcgaagactacaacttatataaccagtttaaatccgcgcctagtgattcactgacttataagctggctctgtgtctgtgcatgatcaatttctatcacgggggtttaaagggcgttgcccacctatggcaggagttcgtgctggagatgcgatttaggtgggagaataacttcctgatccctggactcgcttctgggccacctgacctcaggtgctgcctgcttcatcagaaactgcagatgctgaattgttgcatagaacgtaaaaaggctagagacgagggcaagaaaacgtccgccagtgacgtcacaaacatttatccaggcgacgcgggcaaagctggcgaccagctggttcccgataacctgaaggaaaccgacaaagaaaagggggaagtgggcaagtcttgggattcctggtccgattccgaggaggagttcttcgagtgcctaagcgataccgaggagctcaaagggaacggccaggagtctgggaagaagggcggccctaaggagatggccaacttgagaccagaaggtagactttatcagcatggcaaactcactctgctgcataatggtgaaccactctatattcccgtcacccaggaacctgcaccaatgacagaggacttgctggaagaacagagtgaggtactcgccaaactaggaacgagtgccgaaggagctcatctgcgggcaaggatgcagagcgcttgtctcctttccgacatggaatcatttaaggctgctaatcccggctgctcgttagaagattttgtgagatggtatagtcctcgggactatatcgaagaagaagtgattgacgagaaaggtaatgtggtgcttaagggcgagctgagtgctcgtatgaaaatcccttcaaacatgtgggtggaagcgtgggaaacggcaaagccaatccctgctaggcgccagagaaggctgttcgacgatactcgggaagcagagaaggttctccattacctggccattcaaaaacctgcggaccttgcaaggcatttattgccttgcgtgatccatgcagctgtattgaaagtgaaggaggaggaatctctggagaatatctcatctgtcaaaaaaatcataaaacagataattagccattcctccaaggtccttcactttcctaatcccgaggacaagaaactcgaggagatcatccatcaaattacaaacgtggaggccctgattgctcgcgcgcgcagccttaaggccaaattcggcacggaaaaatgcgagcaggaggaggagaaggaagacttggaacgatttgtttcctgtctgctggagcagccggaagttctggtgaccggcgcagggcgaggccacgcaggccgcatcattcataaattgttcgtgaatgctcagcgtctgacggagagtagtgacgaggcggccgcaatgactcctccagaggaagagctgaaacggatgggatcccctgaggagcgtcgccaaaacagcgtgtcagactttcctcccccagcagggcgcgagttcatattgagaactactgtgccgcgtccagccccatattctaaagccctccctcagcgaatgtatagcgtgctgaccaaagaggacttccggttggcaggtgccttttccagcgacacctcatttttttag

SEQ ID NO: 131487 - DNA, 4182 bp, synthetic construct
  misc_feature 1..4182: note = Description of Artificial Sequence: Synthetic coding sequence
  source 1..4182: mol_type = other DNA
atggcatgttcgatagtccagttttgctattttcaggatctgcaggcagcgcgggatttcctgtttccccatctgagagaggagattcttagtggcgctctcaggagagacccctccaaatctacagattgggaagatgacggatggggggcatgggaggaaaatgaaccccaagaacctgaggaagaaggaaacacttgtaagacacagaagaccagctggctgcaggattgtgttctttccctgtcaccaactaacgacctcatggtcatcgccagagaacaaaaggcagtgttcctggtccccaaatggaagtactcagataaaggcaaggaggaaatgcaatttgcggtcggctggtccggatcattgaacgtcgaagagggtgagtgcgtcacctcagctctctgtatcccccttgctagtcagaaaagatcaagtaccggacggccagattggacatgcatagtggtggggttcaccagtggttatgtgcgcttttataccgaaaatggagtgttattgcttgcccaattgctgaacgaagaccccgttctgcagctaaaatgccgaacctatgagatccctaggcatccaggagttacagagcagaacgaggagctgtctatcctgtaccccgccgctatcgtgacaatcgacggcttctctctctttcagagcctgcgagcctgtcgcaaccaagttgctaaggctgcggccagtggaaatgagaacatccagccacccccattggcctacaaaaagtggggacttcaggatatcgacactattatcgaccatgcgagcgtggggattatgaccctctccccattcgatcaaatgaaaacagcgtccaatataggggggtttaatgctgcaattaagaattcaccacccgcaatgtcacagtatatcactgttgggtccaatccatttactggctttttttatgccctcgaaggtagcacacagcctttgctctcccacgttgctctcgccgtggcatcaaaactgaccagtgcactcttcaacgctgcttctgggtggctgggttggaagtctaaacacgaggaagaagccgttcagaagcagaagccaaaggtagagcccgcaacccctctcgcagtaagatttggcctgccagacagccgtaggcatggggagagtatttgcctctctccctgcaatactctggccgccgtgaccgacgatttcggccgcgtgatcctactggacgtggctcgtggaattgccatcaggatgtggaagggctacagagacgcccagatcgggtggatccagacagttgaggatctgcatgagcgggtgccagagaaagcagacttctcaccattcggcaacagtcaagggcccagccgcgtagcccagttcctggtcatttatgccccacggagaggcatcttagaggtgtggagcactcaacagggccctcgggttggggcattcaatgtaggcaagcactgccgactgctctaccccggctacaaaattatgggactcaataatgtgacctcacagtcttggcagcctcagacttaccaaatatgtctggtggatcctgtgtccggctccgtcaagacagttaatgtacctttccaccttgcactgtcagataagaaatccgaacgagctaaagacatgcacctcgtgaaaaaactcgctgcactgcttaagacaaaatctcccaatctagatctcgtggagacagagatcaaggagctgattctggatatcaagtaccctgcaactaagaaacaagcactggagtccatcctagcctctgaacggcttcccttcagctgtctccgaaatataacccaaacactcatggacaccttaaagagtcaagaactggagtccgtggatgagggactgcttcagttttgcgcaaacaagctgaaactgttacagctgtacgagtccgtttcccagctgaattcactagacttccatctcgacacaccatttagcgataacgacctggccctcctgctgagattggacgaaaaagagttgctgaaactacaggccctgttagaaaagtacaagcaggagaacactcgaacaaatgtgcggttctcagacgacaaagacggggtgctgccagtgaaaacctttctggaatatctggaatatgaaaaagatgtgctgaacattaaaaagatcagcgaggaggagtacgttgcactaggcagtttttttttctggaagtgcttacacggggaaagttccaccgaagacatgtgccacaccctggagtccgcaggcctgagcccacaactgctgttatcgcttctactgagcgtctggctgagcaaggagaaagacatactcgacaaaccacagtccatttgttgtcttcacacgatgctctcactcctgtccaaaatgaaagttgctattgatgaaacttgggattcccagtccgtctccccctggtggcaacaaatgaggacggcgtgtatacaatccgaaaataatggcgctgccctcctctctgcacacgtggggcacagcgtggcagcccaaatatccaacaacatgactgaaaagaaattctcgcagacagtcttgggggctgatagtgaggccctcacagattcctgggaagccctgtcattggataccgagtactggaaacttctgctcaaacagctggaggattgtctaattctgcaaacactgctgcactcaaagggcaatacccaaacttccaaagtgtcttctctgcaggccgagcccctgccacgcttatcggtgaaaaagctgctcgaggggggcaaggggggtattgctgattccgtggccaaatggatcttcaaacaggatttcagtcctgaggttctcaagctggccaatgaggagagggatgctgaaaaccctgacgagccaaaagagggcgtcaatcgcagtttcctcgaggtcagcgagatggagatggacctaggggccatcccagacctcctccacctcgcatacgaacaattcccatgcagcttagagcttgatgttctgcacgctcactgttgttgggagtacgtggtgcagtggaacaaggaccctgaagaggcccgattcttcgtacgtagtattgaacatctgaaacaaatattcaacgctcatgtgcagaatggaattgcacttatgatgtggaacacctttctagtgaagagattttccgcagcaacataccttatggataaagtgggaaagtctccaaaggatcggctctgccgtagagacgtaggtatgtcagataccgcgatgacctccttcctgggttcatgcctcgatctcctacaaatcctcatggaagctgacgtctcacgggacgaaattcaagtgcctgtcttggatacagaagacgcgtggctgtcggttgaagggccaatctctatagtggagctggccttagagcagaaacatattcattatcctctcgtggaacaccactctatcctgtgtagtatcctgtatgccgtgatgagattctctttaaagaccgtgaagcccctgtctctgttcgattccaaaggtaaaaacgcatttttcaaagacctgacctctattcagcttctaccatcaggagagatggaccctaatttcatctccgtgcggcagcagtttctgctcaaggtggtgtccgcagccgtgcaggcccagcactcagcgaccaaggttaaggaccccacagaagaggccactccgacaccgtttggaaaagaccaggactggcccgcactcgcggtggacttggcgcaccacttacaggtgagtgaggacgtggtgagacggcactacgtcggtgaactatacaattacggtgtggaccacttgggggaagaggccatacttcaggttcacgataaggaagtcctggcctcccagctgctggtattaaccggtcaacggttggcgcacgcactgcttcacactcagaccaaggaggggatggaactgcttgctcgccttccacccactctctgtacttggctgaaagccatggatccccaggacctccaaaatactgaagtcccgattgcaacgacagcgaagctggttaataaggtgattgagctcctgcctgaaaagcacggccagtatggactggcattacatcttatagaggcagttgaggcgatcagcttacctagcctctag

SEQ ID NO: 131488 - DNA, 612 bp, synthetic construct
  misc_feature 1..612: note = Description of Artificial Sequence: Synthetic coding sequence
  source 1..612: mol_type = other DNA
atgagtatggaggattacgacttcctatttaaaattgtgctcataggaaacgcaggcgtgggtaagacttgccttgtgcgccgttttacccaggggctgttccctcccggccagggggccacgataggtgtggacttcatgattaagaccgtggaaataaatggtgagaaggttaagctgcaaatttgggatacagccggacaggagaggttccgttccattacccaaagttactacaggtctgccaacgccctcatactaacctatgatattacatgtgaagagagttttcgttgtctgcccgaatggctccgcgaaatcgaacaatatgcgtccaacaaggtgatcactgttctggtaggcaacaagatagacttggctgagcgcagggaggtttcacaacagcgcgcagaagagttctccgaagcacaggacatgtactacctcgagacctctgcgaaagagtccgataacgtagaaaagcttttcctggatctcgcttgccgcttgatctccgaggcaagacaaaacaccctggtgaacaacgtgtccagccctctgcctggggagggcaaatctatcagctatctgacatgttgcaactttaattag

SEQ ID NO: 131489 - DNA, 345 bp, synthetic construct
  misc_feature 1..345: note = Description of Artificial Sequence: Synthetic coding sequence
  source 1..345: mol_type = other DNA
atgtccatggaagactacgacttcctctttaagatcgtattgatcgggaatgccggagtcggcaagacgtgtttagttcgaagattcacacaagggctgttcccccctgggcagggcgctactattggtgtggacttcatgatcaagaccgtggaaattaatggggaaaaagtgaagttgcagatttgggacaccgctggccaggagaggtttcgctctatcactcagtcttactacagatccgctaacgcactcattctgacttacgatatcacctgcgaggagtcattccgatgtctgcccgagtggctgagggagatcgagcagtatgccagtaataaatag

SEQ ID NO: 131490 - DNA, 612 bp, synthetic construct
  misc_feature 1..612: note = Description of Artificial Sequence: Synthetic coding sequence
  source 1..612: mol_type = other DNA
atgtctatggaagattatgatttcctgttcaaaatagtactgattggcaacgcaggcgtgggtaagacttgccttgtgcgcaggtttacccagggcctgttccctccaggacagggggccaccatcggggtcgactttatgatcaagaccgtcgagattaatggcgagaaggtgaagctccagatatgggataccgccggccaggagagattcagaagcatcacacagtcttattacaggagcgctaatgcactcatactcacgtacgacatcacttgtgaggaatctttccggtgcctgccagaatggctcagagagatcgagcagtacgcctcaaacaaggtgataacagtgctggttgggaacaaaatagacctagcggaaaggagggaggtttcacagcagcgggccgaagaattttcagaggctcaggacatgtactaccttgagacaagtgcgaaagagtctgataacgtcgagaaactgttcctcgacctggcctgcaggttaatatcagaagccagacaaaatacactcgtgaacaatgtgtcctcccccctacccggcgaggggaagtccatctcctatctgacttgctgcaattttaattag

SEQ ID NO: 131491 - DNA, 168 bp, synthetic construct
  misc_feature 1..168: note = Description of Artificial Sequence: Synthetic coding sequence
  source 1..168: mol_type = other DNA
atgagcatggaggattacgactttctgttcaagattgtactaattggtaatgctggcgtgggaaagacgtgtcttgtccgccggttcacacaggggctgtttcctcccggtcagggggccaccatcggcgtggacttcatgataaagactgtagagattaacgggtag

SEQ ID NO: 131492 - DNA, 507 bp, synthetic construct
  misc_feature 1..507: note = Description of Artificial Sequence: Synthetic coding sequence
  source 1..507: mol_type = other DNA
atgagtatggaggattatgacttcttatttaagatcgttctcataggtaacgccggagttgggaagacgtgcttagtgcgtcgcttcactcaaggcttgtttccacccggccagggcgcaaccatcggtgttgacttcatgatcaaaaccgtggagattaatggcgagaaagtgaagctccaaatatgggacacagccggacaggagcgcttccgatcaatcacacagtcatactacagatcagcaaatgccttgatactgacatacgacataacttgtgaggaatctttcagatgtctgcccgagtggctcagggaaatcgaacagtatgccagtaataaggtgataaccgtcctagttggaaataagattgacctggccgaacgccgcgaggtgagccagcaacgggcggaagagttttcagaggctcaggacatgtactacctagaaacctctgccaaggaatctgataatgttgagaagttgttcctggacctggcctgctag

SEQ ID NO: 131493 - DNA, 183 bp, synthetic construct
  misc_feature 1..183: note = Description of Artificial Sequence: Synthetic coding sequence
  source 1..183: mol_type = other DNA
atgagcatggaggactatgacttcctgttcaaaatcgttctgattggaaatgccggagtgggcaagacctgcctggtgcggcgattcactcagggcttatttccgcccgggcagggagccaccatcggagtggattttatgatcaagaccgttgagatcaatggcgaaaaagtgaaactttag

SEQ ID NO: 131494 - DNA, 612 bp, synthetic construct
  misc_feature 1..612: note = Description of Artificial Sequence: Synthetic coding sequence
  source 1..612: mol_type = other DNA
atgagcatggaagactacgacttcctctttaaaattgtgctgatcggaaacgctggggtgggcaaaacttgcctcgtgcggaggtttacacaggggttgtttcctcccggacagggggctacaatcggcgttgatttcatgataaagaccgtggagattaacggggagaaagtgaagttgcagatatgggacacagctggccaggagcgctttagaagtatcacccaaagttactacaggagcgcaaatgcccttatcctgacatacgatatcacatgtgaagaatcatttcgttgcctccccgaatggttaagagaaatcgagcaatatgcttccaataaggtgatcacggtgctggtcgggaataagatcgatctcgcagaaaggcgagaggtatcccagcagcgggctgaagagttcagcgaagcacaagacatgtattatctcgaaacatccgccaaagaatccgataatgtggagaagctgtttcttgacttagcctgtcggctgatatcagaagccagacagaacaccctagttaataacgtgtctagccccctacctggagagggcaagtctataagctacctcacatgttgcaatttcaattag

SEQ ID NO: 131495 - DNA, 303 bp, synthetic construct
  misc_feature 1..303: note = Description of Artificial Sequence: Synthetic coding sequence
  source 1..303: mol_type = other DNA
atgtccatggaggactatgattttttgtttaagatcgtgctcattggaaatgctggcgtcggtaaaacctgcttagtgcggcggtttacccaggggttatttccacctggccagggtgcaaccattggagttgatttcatgattaagacagtcgagattaacggggagaaggtcaagcttcaaatttgggatacagccggacaggagaggtttagaagcattacccagagctattatcggagtgctaatgccctgatactcacctatgatatcacatgtgaagagagctttcggtgtttatag

SEQ ID NO: 131496 - DNA, 495 bp, synthetic construct
  misc_feature 1..495: note = Description of Artificial Sequence: Synthetic coding sequence
  source 1..495: mol_type = other DNA
atgtctatggaggattacgacttcctcttcaaaatcgtgcttattggtaacgcaggagtcggtaaaacatgtctagtgcgacgattcacacagggcctgtttccgcctggtcaaggagctactatcggagtggatttcatgattaaaacagtggaaatcaatggagaaaaagttaagttgcagatttgggataccgctggccaagaacgattccgctctatcacccagagttattaccgctctgcgaacgccctgattctcacttacgacattacttgcgaagaatcgttcaggtgtcttccagagtggcttcgggaaattgaacagtatgcctcaaacaaggtgatcacagttcttgccactcgtttaacatggctgaaaggggaacgcttcccaagttctgagttgaagaactcccagaagttgaggacatgcattatctggcgccctcagccccgaaacttgataatgtggagaaactcaagtctgacctag

SEQ ID NO: 131497 - DNA, 420 bp, synthetic construct
  misc_feature 1..420: note = Description of Artificial Sequence: Synthetic coding sequence
  source 1..420: mol_type = other DNA
atgagcatggaagactacgacttcctgtttaagatagttctaataggtaacgcaggagtaggtaagacctgcctggtgcggaggtttactcagggattgttccctcccggccagggtgctacaattggcgtcgactttatgattaagacagtggaaataaacggagagaaggtgaaacttcaaatctgggacactgccgggcaggagcgcttccgcagcattacacagtcctattacaggtccgccaatgccctcattcttacttacgacatcacctgcgaggagtcttttcgatgcctgcccgagtggctgagggagattgagcagtatgcttccaataaggttataaccgtgctagtggggaataaaatagaccttgcagaacggcgtgaagtgagccagcagagggccgaggagtag

SEQ ID NO: 131498 - DNA, 588 bp, synthetic construct
  misc_feature 1..588: note = Description of Artificial Sequence: Synthetic coding sequence
  source 1..588: mol_type = other DNA
atgatggctattcgggaacttaaagtttgtctgttgggagataccggtgtgggcaaatcaagcatcgtatgcaggttcgttcaggaccactttgaccataatatctccccaactattggtgcctcattcatgaccaagaccgtcccatgcggcaacgagctacacaaattcttgatctgggacacagctggccaagagaggttccattccttggcacctatgtactatcgggggtcagccgcggctgtgatcgtttatgatattacaaagcaggacagcttctacactctgaagaaatgggttaaggagttgaaagaacatgggcccgaaaacattgttatggccatcgccggcaacaagtgcgacctctcagatatacgggaggtcccacttaaggacgccaaagagtacgccgagagcataggcgcaatagtcgtggagactagcgctaagaatgctatcaacatagaggagttgtttcaggggatcagccggcagatccctccactagatccgcacgagaacgggaacaatggtacaatcaaagtagaaaagccaacaatgcaggcatcacggcgctgctgctag

SEQ ID NO: 131499 - DNA, 561 bp, synthetic construct
  misc_feature 1..561: note = Description of Artificial Sequence: Synthetic coding sequence
  source 1..561: mol_type = other DNA
tgcctcttaaatgataccggggtcggcaaatcctccattgtctgccgcttcgtacaggatcatttcgaccacaatatctcgcccaccattggcgcaagttttatgaccaagaccgttccatgtgggaacgaactccataagttccttatctgggacaccgccggacaggaacggtttcacagccttgcacccatgtactatcggggcagcgctgctgccgtgatagtttacgatattaccaaacaggactccttctacacactaaaaaagtgggttaaggagctgaaagaacatgggcctgagaacatcgttatggctatagccggtaacaagtgtgatctcagcgacattagagaagtgcccctgaaagacgcaaaggagtacgcggagtctattggggccattgtggttgagacaagtgcaaagaatgcgatcaacattgaggaactgttccaaggaatctctagacaaattcctccattggatccgcacgagaacggaaataatggaactatcaaagtagagaaacctactatgcaggccagccggcggtgctgctag

SEQ ID NO: 131500 - DNA, 678 bp, synthetic construct
  misc_feature 1..678: note = Description of Artificial Sequence: Synthetic coding sequence
  source 1..678: mol_type = other DNA
atggcaggtggcggagcaggcgatcctgggctcggcgccgctgcggcaccggcccccgagacaagagaacacctgtttaaggtgctcgttatcggcgaactcggggttgggaagacctcaattatcaaacggtacgtgcatcagctcttttctcagcattatagagctaccattggcgtcgacttcgccctgaaagttctgaactgggactcaagaaccttagttcggctccagctatgggacatcgcaggccaagagcgattcggcaacatgactagggtctattataaggaagccgtcggggcctttgtcgtctttgacatctctcggagctctacctttgaggccgtgctgaaatggaagagtgaccttgattccaaggtgcatctacctaacggctcaccaattcccgccgtactgcttgccaataaatgcgaccaaaacaaagactccagtcagtcacccagccaggtggatcagttctgcaaagaacatggcttcgcaggctggttcgaaacttccgcaaaggacaatattaatatcgaggaagcagccagattcttggttgagaagatcctcgtaaatcatcaatcattccccaatgaagagaacgacgttgataagataaagcttgaccaggaaacgttgagagccgaaaataagagtcagtgctgttag

SEQ ID NO: 131501 - DNA, 714 bp, synthetic construct
  misc_feature 1..714: note = Description of Artificial Sequence: Synthetic coding sequence
  source 1..714: mol_type = other DNA
atggctcaacccatcttaggacacggctcactgcagcctgcttcagctgcgggattagccagcctggagctcgatagttctctggaccagtacgtccagatcaggatcttcaagattatcgtgattggtgactccaatgttgggaagacctgcctgacattcagattttgcggggggacattcccagacaaaaccgaggcaaccattggcgtcgactttagagagaagacggtcgaaatcgaaggtgagaagattaaagtgcaggtgtgggataccgcgggccaagaaaggttcagaaagagcatggtggagcactattaccgaaacgtgcatgctgtggttttcgtttacgacgtcacaaaaatgactagcttcaccaacctaaaaatgtggatacaggagtgcaacggtcatgccgtgccccccctggttccgaaggtactggtcgggaacaagtgcgacctgagagagcagatacaggtaccctccaacctggctcttaaatttgccgacgcccacaacatgctgttgtttgaaacaagcgctaaggaccctaaggagagccagaatgtcgagtccatcttcatgtgcctggcctgccgcctgaaagcacagaaatctctgctgtatagggacgctgaaagacagcagggcaaagtgcaaaagcttgagtttccacaggaggctaactctaaaacctcctgcccttgctag

SEQ ID NO: 131502 - DNA, 714 bp, synthetic construct
  misc_feature 1..714: note = Description of Artificial Sequence: Synthetic coding sequence
  source 1..714: mol_type = other DNA
atgaacattctggcacccgtgcggcgtgatcgcgtcttagccgaactgccacagtgtctccgcaaagaagccgctctacatggtcataaagacttccatccccgcgtgacctgcgcttgccaggagcataggaccggcactgtaggattctgcaaagatacctttgacaaaaactacaaagccacaatcggggttgacttcgaaatggagcgcttcgaggtcttggggatacccttctctctgcagctttgggacactgcagggcaggagaggtttaagtgtatcgcatcaacctactacagaggagcacaggcgataatcatagtcttcaacttgaatgacgttgcgagtttggaacacactaaacagtggctggccgatgccctcaaagaaaacgaccccagttctgtgctgttgtttttggtgggctcaaaaaaagacctgtctacacctgcccagtacgctctgatggagaaggatgcactgcaggtagctcaggagatgaaagcagaatattgggccgtcagctccctcaccggagagaatgtgcgtgagttcttcttccgtgtggcagccctaacctttgaagccaacgtgctggctgaactcgagaagagcggtgcccgaagaattggggatgtggtccgcattaattcggatgactccaacctctatctcacagcgtccaaaaaaaagccaacgtgctgtccgtag

SEQ ID NO: 131503 - DNA, 780 bp, synthetic construct
  misc_feature 1..780: note = Description of Artificial Sequence: Synthetic coding sequence
  source 1..780: mol_type = other DNA
atgaacattttagcgcctgttagacgggaccgtgtactggccgagctacctcagtgtctaagaaaagaggccgcactgcatggacataaagatttccaccctcgggtgacttgcgcctgtcaggagcaccggacgggcactgtgggctttaaaatttctaaggtcatcgttgtcggcgatctgtcggtcggaaagacttgcctcatcaatcgattctgcaaggatacttttgacaagaactataaggccactatcggtgtcgattttgagatggagcgtttcgaagtgctcggcatccctttctccctgcagttgtgggacaccgcaggccaggaaaggtttaaatgtattgctagcacatattaccggggcgcccaggccatcattattgtgttcaatctgaacgatgtcgcatcactggagcacaccaaacagtggctggccgacgctctaaaggaaaatgacccctcatcggttctcctgtttttggtaggctctaagaaagatctgagcaccccggcccagtacgctttgatggaaaaagatgcccttcaggtagcacaggaaatgaaggccgagtactgggccgtgagctccttgactggcgaaaacgttagggagttcttcttccgcgtggctgccttgaccttcgaagcgaatgtgctagccgaactcgagaaatcaggcgccagaagaattggggatgtcgtacgcatcaactcagatgattctaacttgtacctgactgccagcaagaaaaaacctacctgttgcccatag

SEQ ID NO: 131504 - DNA, 636 bp, synthetic construct
  misc_feature 1..636: note = Description of Artificial Sequence: Synthetic coding sequence
  source 1..636: mol_type = other DNA
atgaacatactcgcaccagtgaggcgagacagggttctggccgagctcccacagtgtctgcgtaaggaggctgcactccacggacataaggacttccaccccagggtcacttgcgcctgtcaggagcaccgtacaggcactgtcggctttaagatcagcaaggtgatagttgttggagacctttcagtcgggaaaacttgcctaatcaaccggttctgcaaggatacattcgacaaaaactacaaggccacgataggcgtcgattttgaaatggagcgctttgaggtgttgggaattccgttctcactccaactgtgggatacggccggtcaggagcgctttaagtgcatcgcgtctacttattatcgaggggctcaagcaatcataatcgtgtttaacttaaacgacgtggccagtctcgagcacacaaagcagtggctggccgatgctctgaaggagaatgatccatcatcggtcttactgttcctggtgggctccaagaaggatcttagtactcccgcccaatacgctctgatggagaaagatgctctccaagtggcacaggagatgaaagccgagtactgggcagtcagttctcttacaggagagaacgtccgcgaattctttttccgctag

SEQ ID NO: 131505 - DNA, 756 bp, synthetic construct
  misc_feature 1..756: note = Description of Artificial Sequence: Synthetic coding sequence
  source 1..756: mol_type = other DNA
atgaacattctcgcccccgtgagacgcgaccgagtgctggccgagctgccacaatgtctcagaaaggaggcagccctccatggccataaggacttccaccctcgggtcacctgtgcctgtcaagagcacagaaccggcactgtcgggtttaagatttcaaaggttatcgttgtgggggacttatcagttggaaaaacctgtctgatcaatcgcttttgtaaggacacatttgacaaaaattacaaggcgacgattggcgtggactttgagatggaaagatttgaagtactcggaataccattttctttgcagctttgggatacggccggccaggaacgctttaagtgcattgcttccacctactatcgaggagcccaagccatcattatcgtttttaatctgaacgatgtagcaagccttgaacataccaagcagtggcttgcagatgcccttaaggaaaacgatccatcctccgtactgctgtttctcacgcccgcccagtacgcccttatggaaaaagacgccctgcaggtggcccaggagatgaaagcagaatattgggccgtctcctccttgaccggagagaatgtccgtgaattctttttccgagttgccgctctgactttcgaagcgaatgtgcttgctgaacttgaaaaaagtggggcacgaagaattggagacgtggtgcgtatcaatagtgacgactctaacctgtatctcactgcttccaagaagaagcctacgtgttgcccttag

SEQ ID NO: 131506 - DNA, 780 bp, synthetic construct
  misc_feature 1..780: note = Description of Artificial Sequence: Synthetic coding sequence
  source 1..780: mol_type = other DNA
atgaatatcctggctcccgttcgccgcgatagggtgctagccgagctgccccagtgcctgaggaaggaagcggcgctccacggacacaaagattttcaccctcgcgtgacatgcgcctgccaggaacaccgcacgggaaccgttggcttcaagatcagcaaggtgatcgtcgtgggggacttgtctgttggaaagacttgcttgatcaacaggttctgcaaggatactttcgataagaactacaaagctacaataggagtagacttcgagatggagcgtttcgaggttctcggcatccctttttcgctgcagctgtgggatactgcggggcaggagagatttaagtgtatcgcttcaacttattaccggggagcccaagccattattatcgtctttaacctgaatgacgtcgcctccctcgagcataccaagcaatggctggcggacgctttgaaagagaacgacccgtcctctgttttgcttttccttgttggctccaagaaagacttatcgaccccagcccagtatgcgctcatggaaaaagacgcgttacaggtggctcaagaaatgaaggctgaatactgggctgtctcgagcctcaccggcgagaacgtgagagagttctttttcagggtggcagccttgacatttgaggccaacgtgctcgctgaactggagaagtctggcgcccggcggattggtgatgtcgtaagaatcaattctgacgatagcaacctctacctgaccgccagcaagaagaaacctacatgctgcccgtag

SEQ ID NO: 131507 - DNA, 636 bp, synthetic construct
  misc_feature 1..636: note = Description of Artificial Sequence: Synthetic coding sequence
  source 1..636: mol_type = other DNA
atgaatattctggctccagtccgtagagatcgggtgctcgctgaattaccccagtgtcttaggaaagaggccgccttgcacggccacaaggacttccatccacgcgtgacctgcgcttgccaggaacatcggacgggcaccgtaggatttaaaatatcaaaggtgatcgtcgttggcgacctgtccgtgggaaagacttgtctcattaaccggttctgtaaggatacgttcgataagaactacaaagccaccataggcgtcgatttcgaaatggagcggttcgaagttctcggtattccattctccctgcagctttgggataccgccggccaggaacgctttaaatgcatcgcttcaacctattaccgtggggcccaagctatcattattgtctttaaccttaacgacgtcgccagtttagagcacacaaaacagtggctggccgacgctttaaaggaaaatgatccctcttctgtgctgctcttccttgtgggcagcaaaaaagatctcagtaccccagcccagtatgcattaatggaaaaagatgccctgcaggtagcgcaggagatgaaagcagagtattgggcagtgtcgagcttgacaggtgagaatgtaagagagttcttcttcagatag

SEQ ID NO: 131508 - DNA, 696 bp, synthetic construct
  misc_feature 1..696: note = Description of Artificial Sequence: Synthetic coding sequence
  source 1..696: mol_type = other DNA
tgatcccttagatttcccatcaccaatagtgcaggcgcaccttgcaaggccgccggtcgcatgaatatcctggcccccgttcgaagagaccgagtcttggccgagctgccacagtgcctgcgcaaggaggccgcattacatggacataaggatttccacccaagggtaacctgtgcatgccaggagcatcgcactggcaccgtgggccgattcaaaatctcgaaagtgatcgtggtgggggacctgtccgtagggaaaacatgtctaatcaaccggttctgtaaggatacttttgataagaattacaaggccactattggagtcgatttcgagatggagcggttcgaggtgcttggaatccccttctcactgcagctgtgggacaccgctggacaggaacgttttaaatgtattgcatccacctattacagaggagcccaggcaattatcatcgtctttaatctgaacgatgttgcctcgttggaacacaccaaacagtggttggctgatgctctcaaagagaatgaccccagcagcgtcctactatttctagttggatccaaaaaagacttaagtactccagcccagtacgctctgatggagaaggacgctttgcaagtcgctcaagaaatgaaaacagtccagcggctgccatccccccgcgcactgtgccacccacatagttcacgcgcatag

SEQ ID NO: 131509 - DNA, 951 bp, synthetic construct
  misc_feature 1..951: note = Description of Artificial Sequence: Synthetic coding sequence
  source 1..951: mol_type = other DNA
atgagccacttgccaggcttagagcttcggcgggaggctccccccttgttaggacctcttttgtctccttttccgctgccagctggatcgtggcacagacaaatgttgcgttcttctctcaggtttccaataactaactctgctggcgcaccttgtaaggctgcaggtcgcatgaatattttagcgcctgtcagaagggatcgggtgctggccgagttaccacagtgcctcaggaaggaagccgcgctgcacgggcataaagactttcatccaagggtgacttgcgcttgtcaagaacaccgaactggcaccgtaggctttaaaatttctaaggtgatcgtggtaggggatctgagcgtgggcaaaacttgcctgattaatcggttttgtaaggatactttcgataagaattacaaagcgacaattggagtggattttgaaatggagagattcgaagtactcgggatcccttttagtctccagctgtgggacaccgcaggacaagagcgcttcaaatgtattgcttctacttactacagaggagctcaggcaattatcattgttttcaatctgaatgacgtggcaagcctcgaacacaccaagcaatggctggccgatgcacttaaggaaaacgatccttccagtgtcctgctctttcttgtcggctcgaaaaaagaccttagcacacccgcacagtacgctctgatggagaaggatgcgctgcaggttgctcaagaaatgaaggccgagtattgggcagtctcttcactgaccggcgaaaacgtcagagagttctttttcagggtggccgcattgacatttgaagccaacgtgcttgcggaactcgaaaagagtggtgctcggcggattggtgacgtcgtacggatcaactcagatgattctaatttatacctgaccgcaagcaaaaaaaagcctacctgctgtccatag

SEQ ID NO: 131510 - DNA, 825 bp, synthetic construct
  misc_feature 1..825: note = Description of Artificial Sequence: Synthetic coding sequence
  source 1..825: mol_type = other DNA
atgctcagaagttctttgaggttccccattactaactcggcaggtgccccgtgtaaggcggccgggcgaatgaacatcctcgcaccagttcgccgggatcgcgtgttagccgagctgcctcagtgcctgcgcaaagaggccgcactccatggccacaaagacttccacccgcgggtgacctgcgcatgtcaggaacaccggacaggcactgtggggttcaagatttcgaaggttatagtggtgggagacttaagcgtgggaaaaacctgcctcataaatcgcttttgcaaagacactttcgataagaactacaaggcaaccatcggagtagattttgagatggaacgattcgaggtattgggcattcccttttctctccagctctgggacaccgctggccaagagagatttaagtgtatagcttcgacttattataggggcgctcaggcaatcatcatagtcttcaatttaaacgatgtagcgtctttggagcacacaaagcagtggctggcagatgccttaaaagaaaatgatccttcctctgtgcttctgtttctgacaccagcccagtatgcgctaatggaaaaggacgccctgcaagtggcgcaagaaatgaaagcggagtactgggcggtatcatccctcaccggtgagaacgttcgcgaattcttttttagagtcgcagctcttacctttgaagccaacgtacttgccgaacttgagaagagcggcgcccgacgcatcggagatgtggtacgaatcaactcagatgactcaaatctctatctgacagcatccaagaaaaaacctacgtgctgcccttag

SEQ ID NO: 131511 - DNA, 807 bp, synthetic construct
  misc_feature 1..807: note = Description of Artificial Sequence: Synthetic coding sequence
  source 1..807: mol_type = other DNA
atgagccacttgccaggtctcgagctgcggcgagaagccccgcctctgctcgggccattactctccccttttcccttgccagcaggcagttggcataggcagatgcttcgaagttccttgcgctttcctattaccaattcagccggagctccgtgcaaagctgctgggaggatgaacatcctcgcccctgtgcgtcgtgacagggtcctcgccgaactgccgcagtgtctcagaaaagaggccgcgttgcacggtcacaaggattttcacccccgcgttacatgtgcttgtcaggagcacagaaccggcaccgttggtcgattcaagatttctaaggtgatcgttgttggtgacctgagcgtagggaaaacctgtctgatcaatagattctgtaaggatacttttgataagaactacaaggctactataggtgttgacttcgaaatggaacggttcgaggttctcggaataccttttagccttcagctgtgggacacagccgggcaagagagatttaagtgtattgcttctacttattaccgcggagcccaagccatcatcatcgtgttcaacctgaacgacgttgcttctttggagcacaccaagcagtggcttgctgatgcactcaaggaaaacgacccctctagcgtgctgctcttcctcgtaggctcgaagaaggacctcagtacacccgcacagtatgccctcatggaaaaggacgcacttcaagtagcgcaagagatgaaaactgtccagaggttgccgtccccacgcgccctttgccaccctcacagtagcagggcctag

SEQ ID NO: 131512 - DNA, 1002 bp, synthetic construct
  misc_feature 1..1002: note = Description of Artificial Sequence: Synthetic coding sequence
  source 1..1002: mol_type = other DNA
atggtaattgcaggggcatcctggatgctgggaagggcagctgcttctccgactcagacgcctcctactaccagcactattcgagtggccagaaggtcacgcgtagctcttgtagctatggtgattgctgcagccggttccgggggtcctggcagggcagaaccccagcttagccaaccatccctggactgcggcagaatgcgaagcagcctcacccccctcggtccgcccgtatctcgagatagagtgatcgcctcatttccgaagtggtatacaccagaagcgtgtttgcagctgcgggaacacttccatggccaggtcagcgccgcctgccagagacgcaacaccggtaccgtgggtctgaaactgagtaaggtcgtcgtcgttggagatctctatgtgggaaagacttccctgatccaccgcttctgcaagaacgtctttgaccgggattacaaagccaccatcggggtggactttgaaatcgagcgtttcgaaatcgcgggcatcccctatagcctacaaatttgggacacagcaggacaggaaaaattcaagtgcatcgcatctgcctactacagaggcgcccaagtgattatcacagcttttgacctgactgatgtacaaacacttgaacatacccggcaatggttggaggatgcacttagggagaacgaagctggatcatgcttcatcttccttgttgggacaaaaaaggacctgttatccggggcggcctgtgaacaggcagaggctgacgcagtacatctggctcgcgagatgcaggccgaatactggtccgtgtctgctaaaactggagaaaatgttaaggcattctttagccgtgtggctgcgctggcgttcgagcagtcagtgctccaagacttggaacggcagagcagcgccaggttgcaagttggaaacggggacctgatccaaatggaggggtcgcccccagagactcaggaatctaaacggccatcctccttgggttgttgttag

SEQ ID NO: 131513 - DNA, 936 bp, synthetic construct
  misc_feature 1..936: note = Description of Artificial Sequence: Synthetic coding sequence
  source 1..936: mol_type = other DNA
atggtcattgctggcgcctcatggatgctcgggcgtgctgctgcctccccgacgcagacgcctccgactacctcaacaattagagtggctcgtcggtccagagtggcactcgtcgccatggtgattgcagcagctggttctgggggaccaggtcgtgccgagccccaactgagccaaccgtcactggactgcggtcgcatgcggagtagtctcacgcccctggggccaccagtcagtcgggacagagtgattgcaagtttccccaaatggtatacccccgaggcatgtctgcagttaagagagcactttcatggccaggtgagtgccgcctgtcaacggcgaaataccgggactgtcggtttctgcaagaatgtcttcgatcgcgactataaagccacaatcggagtcgatttcgagattgagcgattcgagattgctggcatcccttattctttgcagatttgggacactgccggccaggaaaaattcaagtgcattgcctcggcatactaccgcggagcccaagtgattattacagcttttgaccttaccgacgtacagacattagaacacactagacagtggcttgaagatgcactccgagaaaatgaggccggcagttgctttattttcctggttggcaccaagaaggacctgttgtcaggggctgcgtgcgaacaggcagaagccgatgccgttcacctggccagagagatgcaggccgaatattggagtgtcagtgccaagactggagaaaacgtgaaggcctttttttctagagttgcagcgctcgctttcgaacaatctgttttacaggatcttgaacgacagtccagtgctaggctgcaagtgggcaacggggatctcatccagatggaagggagccctcctgaaacgcaggaatctaaaaggccatcatccctaggatgctgctag

SEQ ID NO: 131514 - DNA, 498 bp, synthetic construct
  misc_feature 1..498: note = Description of Artificial Sequence: Synthetic coding sequence
  source 1..498: mol_type = other DNA
atggtgatcgccgccgcaggaagcggcggccctgggcgcgcggaaccccagctgtcccaaccttctctggactgtggccgtatgaggtccagtctcacccccctcggtcccccagtctctcgggacagagttattgctagttttccaaagtggtatactccagaggcttgcctgcagctccgtgagcattttcatgggcaggtctccgctgcatgccagcggagaaatactggcaccgttgggctgaagctttccaaggtcgtggtggttggggatctctatgtgggcaagacaagcctcagtgcacagtatgctcacccgcagggctttctgaccgctatgaatcagccgcacagtcctcgtcccctgagcccgggctacgctcacagctcccacccctccagggccgttgcaagtagacgctggcgggcaccctgcaggcagcctagcgatcaatattgttctccgcgggcctggcatacggccgcagccctctag

SEQ ID NO: 131515 - DNA, 549 bp, synthetic construct
  misc_feature 1..549: note = Description of Artificial Sequence: Synthetic coding sequence
  source 1..549: mol_type = other DNA
atggacctgcaaagacctgattcctatcagggcggcgccggaccagacttcaacgatcatgtactacataaaacgatcctggtgggagatagtggcgtaggcaaaacatctctgttagtgcaattcgatcaaggaaaattcatacctggcagctttagcgctactgtgggaattggtttcacaaacaaagtggtcactgttgatggcgttagggtgaagctccaaatatgggacacggcgggtcaagaacgcttccgatccgtgacacatgcttattaccgcgacgcccaggcactgctcctgctgtatgatatcaccaacaagagttcctttgacaacattagggcctggctcacagagattcatgagtatgcacagcgggacgtggtaataatgctgctgggcaataaggctgatatgtccagcgaacgggtcatccgcagcgaggacggggagacattggcccgggagtacggcgtcccattcctggagacctccgccaagaccgggatgaacgtagagctggcgtttcttgcgatcgctaaatag

SEQ ID NO: 131516 - DNA, 570 bp, synthetic construct
  misc_feature 1..570: note = Description of Artificial Sequence: Synthetic coding sequence
  source 1..570: mol_type = other DNA
atgaccggaaccccaggcgctgtggctacccgtgatggtgaggctcctgaacgctcgccaccttgcagtccctcctacgacttaacgggcaaggttatgcttttaggtgataccggggtaggaaagacatgcttcctcatacagtttaaggatggcgcattcttgagcggcacatttatagctactgtgggcattgactttcgcaataaggtggttaccgtggacggcgttagagtgaaacttcagatctgggataccgccggacaggaaagattccgatcagtgacccatgcctactaccgggacgcgcaagctctcctgttgttgtatgacatcactaataagtcgtcattcgataacattagggcctggttgactgaaattcatgaatatgcacagcgggacgtagtcatcatgctcctgggaaataaggccgatatgtccagcgagagggtcatacgttcggaggacggagagactttggcacgcgagtatggggttccttttttagaaacctctgctaaaaccggtatgaatgtcgaactggcctttttggctatcgccaaatag

SEQ ID NO: 131517 - DNA, 561 bp, synthetic construct
  misc_feature 1..561: note = Description of Artificial Sequence: Synthetic coding sequence
  source 1..561: mol_type = other DNA
atgacaggcaccccaggagcagttgccacaagggacggtgaagcaccagaacgtagtcctccttgctctccttcctatgaccttaccggaaaaaataaggtggtgacagtcgatggagtgagggtaaaactgcagatctgggacacagctggtcaggagaggttcagatctgtgacacatgcctactaccgagacgcccaggccctgctcctgctatatgatattacaaataagagctccttcgataatattcgagcatggctaactgagatacatgaatacgctcagcgcgacgtcgtgatcatgttattgggcaacaaagcggacatgtctagcgagcgggttatcagatcagaggacggggagactctggcccgcgagtatggcgtaccattccttgaaacgagcgccaagaccgggatgaacgtggagcttgcctttctggctattgcgaaagagctgaagtacagggcagggcatcaagcagatgagccgagctttcagattcgagactatgttgaatcgcagaaaaagaggagcagctgttgcagcttcatgtag

SEQ ID NO: 131518 - DNA, 672 bp, synthetic construct
  misc_feature 1..672: note = Description of Artificial Sequence: Synthetic coding sequence
  source 1..672: mol_type = other DNA
atgaccggcactcccggagctgttgctactagagacggcgaagctccagaacgtagccccccttgttcgcccagctacgacctcacaggcaaggtcatgttgctgggcgacacaggggtgggtaagacctgctttctaatccaatttaaggacggagctttcctttcaggaacttttatcgctacggtgggaatcgatttccgaaacaaagtcgtgactgttgacggggtcagagtaaagctgcagatttgggacacagcggggcaggaacgattcagatccgtgacccatgcctactacagagacgcccaggcccttttgttactgtatgacatcaccaataaatccagtttcgataacattagggcatggctgactgagattcacgaatatgcccaaagggatgtcgtgatcatgctgctgggaaacaaagcagacatgtctagcgagcgggtcattaggtcggaggacggcgaaaccctagctcgagaatacggcgtcccctttctggagaccagcgccaaaactggaatgaacgtcgaactcgcatttctggctatcgcaaaggagctaaaatatagagctggacaccaggctgacgaaccgtcctttcagatcagggattacgtggagtctcagaaaaagcgctcttcttgctgctcctttatgtag

SEQ ID NO: 131519 - DNA, 687 bp, synthetic construct
  misc_feature 1..687: note = Description of Artificial Sequence: Synthetic coding sequence
  source 1..687: mol_type = other DNA
atgtggctcatgagtgaagctcatggcgctgagcctgtactgttaagagaggcagccagaccatttacccagacgctcagactgtgtgttcctagcggaaatagcaaggttatgttattgggcgataccggcgtaggaaagacttgcttcctcattcagttcaaggacggagctttcttaagtggcacttttattgcaacagttggcattgactttcgaaacaaggtggtgactgtggatggtgtgagggtgaaacttcagatttgggacactgccgggcaggagcggtttcgctccgttacccacgcatactaccgagacgctcaggcactcctcttgttatatgatatcaccaataaaagtagtttcgataatatcagagcttggttgactgaaatacatgaatacgcacagagggatgtggtgattatgctgctcggaaacaaggctgacatgtcttcagagcgcgtcataaggtcagaggacggtgagacccttgcccgggaatacggcgtgcctttccttgaaacaagcgcaaagacaggcatgaatgtcgagctggccttcctggctatagccaaggagctcaagtacagggccggacaccaggcagatgaaccaagcttccagattcgagactacgtggagagtcagaagaagcgcagctcttgctgtagcttcatgtag

SEQ ID NO: 131520 - DNA, 576 bp, synthetic construct
  misc_feature 1..576: note = Description of Artificial Sequence: Synthetic coding sequence
  source 1..576: mol_type = other DNA
atgtggttaatgtcggaggcccacggagcagagccagtcctgctgagggaagccgcacgtccattcacccagacgctgaggctttgcgtgccttcaggtaatagcaagaataaggtcgtcacggttgacggcgtccgcgtaaagctgcaaatctgggacaccgccggacaggagcgctttaggagtgttactcatgcttactatcgggacgcgcaggctttgttattgctgtacgatattacgaataaatcaagctttgacaatatccgggcatggctgactgaaatccacgagtatgcccagagagatgtggttatcatgttgctcggtaacaaggcggatatgtcctcggagcgagttattaggtcagaggatggcgaaactctcgcacgtgagtacggcgtaccctttcttgaaacttctgccaaaaccggaatgaatgtcgagctcgctttcctcgccatcgccaaagaactcaagtatcgtgctggccatcaggccgacgagcccagtttccagattagagactacgtcgaatcacagaagaaacggtcttcttgttgctcttttatgtag

SEQ ID NO: 131521 - DNA, 510 bp, synthetic construct
  misc_feature 1..510: note = Description of Artificial Sequence: Synthetic coding sequence
  source 1..510: mol_type = other DNA
atggatttgcagcgtccagatagctatcaaggaggtgcagggcctgatttcaacgaccatgtgctgcataaaaccattctagtgggggactccggagtgggcaaaacctctctgttagtgcagtttgatcagggaaagttcattccaggatctttctcggccacagttggaatagggttcaccaacaaggtggtgacagtggacggcgttagggtgaagcttcaaatttgggacactgccggtcaggagagattcaggagtgtcacccacgcttattatagggacgcccaggcactgctcctgctttatgacataacaaataagtcttcctttgataatatccgggcatggctgaccgagatccacgagtacgcgcagagggacgttgtgatcatgctcctcggcaacaaggtatctggtagtggagctggcagcgcacagccttgtacgtctagcgccctggcagggcccattacgacccaggagcagctgagtagacacccctcctag

SEQ ID NO: 131522 - DNA, 651 bp, synthetic construct
  misc_feature 1..651: note = Description of Artificial Sequence: Synthetic coding sequence
  source 1..651: mol_type = other DNA
atggacctccagcgacccgacagttaccagggcggcgcaggaccggattttaatgaccacgttctgcataagaccattctcgtcggggactctggcgtcggcaaaaccagcctgctggttcagttcgatcagggtaagtttatccctgggtcattctcggcaaccgtgggcatcggcttcacgaataaggttgttaccgtcgatggcgtgagggtgaagctgcagatttgggataccgccggccaagagcgttttcgctcagtcacccatgcctactatcgcgatgcccaggccctcctgctactctacgatatcactaacaagtcttctttcgacaacatccgcgcctggctgaccgagatccacgagtacgcccagagagatgtggtcattatgctgcttggcaacaaggcagacatgagctcagagagggtgattcgctctgaagatggcgagacactggctcgggagtatggtgttccttttctggagacgtccgccaaaacgggcatgaacgtggaactagctttcctcgcaatcgcgaaggagctcaagtatcgtgcagggcaccaggctgacgagccttccttccagattcgagattacgtggagtcccaaaaaaaaaggtctagttgctgctctttcatgtag

SEQ ID NO: 131523 - DNA, 651 bp, synthetic construct
  misc_feature 1..651: note = Description of Artificial Sequence: Synthetic coding sequence
  source 1..651: mol_type = other DNA
atggatcttcaacggccggactcctatcagggcggcgcaggccccgattttaatgatcatgtgcttcataaaacaatcctggtgggcgattcaggtgtcggcaaaacaagcttgttggtgcagttcgatcagggtaagtttataccaggctccttcagcgcaaccgtaggtatcggatttactaataaagtggtgaccgtggacggcgtccgggtcaagctgcagatttgggacaccgcaggtcaagagagattccgcagtgtcacacatgcctattaccgagacgcacaggcgctattgctactctacgacataactaacaagtccagctttgacaacatccgggcttggctgaccgaaattcacgaatacgcccagagagacgtcgtgattatgttattaggaaataaagcagacatgtcatcagagagggtgatacgttctgaggacggagagactcttgcacgcgagtacggcgtgcctttcctggagaccagcgctaaaactgggatgaacgtggagctggcatttttggcaatcgcaaaagagctaaaatatcgggctgggcaccaggccgacgaaccttccttccagattagggactatgtggagtctcagaagaaacgtagctcatgctgctcttttatgtag

SEQ ID NO: 131524 - DNA, 672 bp, synthetic construct
  misc_feature 1..672: note = Description of Artificial Sequence: Synthetic coding sequence
  source 1..672: mol_type = other DNA
atgacagggacccccggagccgttgcgactagagatggtgaggctccagagagatctccaccctgctccccttcctacgaccttaccggcaaggtcatgctgctgggggatactggagtaggaaagacttgctttctgattcagtttaaagatggggcctttctttcaggtacttttatcgctaccgtggggatagacttcagaaacaaggtggtgacagtggacggtgtgcgagtaaaattgcaaatctgggatacggccggccaggaacgcttcagaagcgtgacccatgcatactaccgcgacgctcaggcccttttactactgtacgacatcacaaataagtcctcttttgacaatatccgcgcttggttgaccgagatccatgaatatgcccagagagatgtggtgatcatgctgctggggaacaaagcagatatgagttcagagcgcgtgatcagatcggaagatggagagacgctggcgagagagtatggcgttccttttctagaaacgagcgctaaaaccggcatgaacgtcgagttggcctttctcgccattgccaaagagttgaaataccgcgcgggccatcaagccgatgagccctcatttcagatccgggattacgtcgaaagtcagaaaaaacgatcctcttgttgtagctttatgtag

SEQ ID NO: 131525 - DNA, 591 bp, synthetic construct
  misc_feature 1..591: note = Description of Artificial Sequence: Synthetic coding sequence
  source 1..591: mol_type = other DNA
atgtgttgtaaagttatgctcttgggcgacaccggggtcggcaaaacgtgtttcttgatccagtttaaagacggagccttcctgtcaggcacatttatcgccacagttggtatcgattttaggaacaaagtagtgaccgtggatggtgtccgcgtaaagcttcaaatttgggacactgccggccaggagagatttcgctctgttacccacgcttactaccgggatgcccaggccctgctgttgctgtacgacatcacaaataaatcctcctttgacaacattcgggcttggctgactgagatccatgaatacgcgcagagggatgtggtaatcatgttactagggaataaggcagatatgagtagtgagcgcgtcattaggtctgaggacggcgaaacattggccagggagtatggcgtgccatttctcgaaacctccgctaaaacagggatgaacgttgagctcgcattcctcgctattgccaaggaattgaaataccgggcaggtcaccaggctgacgagccttctttccagatcagagactatgtcgagtcccagaaaaagcggtcctcgtgttgctctttcatgtag

SEQ ID NO: 131526 - DNA, 636 bp, synthetic construct
  misc_feature 1..636: note = Description of Artificial Sequence: Synthetic coding sequence
  source 1..636: mol_type = other DNA
atgcaagcccctcataaggagcacctgtacaaactgctggtgatcggcgacttgggcgtgggtaaaacatctattatcaaacgatacgtccaccagaatttttctagccattatagagctaccattggtgtggattttgctcttaaggttctgcactgggatcctgagactgtggttcgcttgcagctgtgggatatcgctgggcaggaacggtttggcaatatgacccgcgtgtattatagagaggctatgggcgcgttcattgtgtttgatgtcaccaggcctgcaactttcgaggcagtcgcaaagtggaagaatgacctcgatagcaaactgtccttgccgaatgggaagccggtgtccgtggtgctccttgcaaacaagtgtgaccaaggaaaggatgtcctgatgaataatggtctgaaaatggaccaattttgtaaagagcatgggtttgtcgggtggtttgagacctcagccaaggagaacattaatattgatgaagctagccggtgccttgtcaagcacatcctggccaatgaatgtgatttgatggagtctattgaacctgatgttgtcaaaccacaccttacgagcaccaaggtggccagctgcagcggatgtgctaaatcatag

SEQ ID NO: 131527 - DNA, 642 bp, synthetic construct
  misc_feature 1..642: note = Description of Artificial Sequence: Synthetic coding sequence
  source 1..642: mol_type = other DNA
atggaggcgatctggctatatcagttcaggttgattgtgatcggagatagcaccgttgggaagagctgcctgatccgacggtttactgaaggccggttcgcccaggtgagtgaccccaccgtgggagtggatttcttctcacgccttgtagaaatcgagccaggcaaaaggattaaactccagatttgggacacagcaggccaggagcgattccggagtatcacgcgtgcgtactacaggaattctgtaggtggactgctgctgttcgacattaccaacaggagatcatttcagaacgtccatgaatggcttgaagaaactaaagtacacgttcaaccttatcagatcgtgttcgtgctcgtcggacacaagtgcgacctggatacgcaaaggcaggtcactagacatgaagcagaaaagttagccgctgcctacggcatgaaatatatcgaaacttcagctagggacgctatcaatgtggagaaggcctttactgatctgacacgcgacatatacgagctcgttaagcgcggagaaatcactattcaggagggttgggagggggtcaaatccggtttcgtccccaacgttgtgcactcctctgaagaggtcgtgaaatccgagagacgctgtctgtgttag

SEQ ID NO: 131528 - DNA, 2187 bp, synthetic construct
  misc_feature 1..2187: note = Description of Artificial Sequence: Synthetic coding sequence
  source 1..2187: mol_type = other DNA
atggcaggaccagagggttttcagtaccgggccttataccctttcaggcgagaacggcctgaggatctggaattgttgcccggggacgtgctggtcgtctctagggccgcgctccaggcactcggcgttgcagaaggaggtgagaggtgtcctcagtctgttggctggatgccaggactaaatgagcgcaccaggcagagaggggactttcctggaacgtacgtggaatttctcggccctgtcgcactggccaggcccgggccgagaccgcgtggcccccgtcctctccctgctcgacccagagacggtgcccccgagccaggtttaactcttccagacctgccagagcagttttcaccacctgatgtggcgcctccactgttagtaaagttagtggaagcaatcgagagaaccggcctggattctgaatcccattacagacctgaactacctgctccacggaccgattggtctctctcagacgtggatcaatgggatacggccgccctggcagacggcatcaaatcattccttctcgccctaccagctcccctggtgaccccagaagcttcagcggaggcgaggcgggccctgagagaggcagccggaccagtgggtcctgctctggagccacctacgctaccactgcatcgggcactaacattgcgttttctgctgcaacatttagggcgggtggccagtcgcgcaccagcactaggacccgcagtcagggctctcggtgcaacctttggcccccttctgctacgcgctccccctccccccagttcccctcccccgggtggcgcgccagatgggagcgaaccttcaccagacttccctgcccttctggtagagaaattgttacaggagcacctagaagagcaggaagtagcccctcctgcgctgccccctaagcccccaaaggctaaacctgcatcaaccgttctggccaatggcggatcccccccttctcttcaggatgcagaatggtactggggcgacatttcaagggaggaggttaatgaaaaactccgggacacacctgacggaaccttcctggtcagagacgcatctagcaaaattcagggggagtacaccctgactctgagaaagggaggtaacaacaaactcattaaggtgttccacagggacgggcattacgggttctcggagcctttaaccttttgctcagtggtcgatttgataaatcactatcgccacgagagcctggcacagtacaacgctaagctggacacccgtctcctttaccccgtcagtaagtaccagcaggaccaaatcgtcaaggaagattccgtagaggccgttggagcccagctgaaggtttatcatcagcagtatcaggacaaatcacgagaatacgaccagctgtacgaagagtacacgcgtacatctcaggaacttcagatgaagcgtactgcaattgaggccttcaacgaaaccataaagatttttgaagagcagggccaaacccaggagaaatgtagtaaggagtacctcgaaagatttcgtagggaggggaatgagaaagaaatgcagaggatactcctgaatagtgagcgattaaaatccaggatcgccgagatccatgagtcacggacaaagttggagcagcagctcagagcccaggcatcggataatagggaaatcgataagcggatgaatagcctgaagccggacctgatgcagttgaggaagataagagaccagtacctagtttggctaacacaaaaaggagctaggcagaaaaaaatcaacgagtggcttggaatcaaaaacgagacagaagatcagtatgcactaatggaggatgaggatgacctgccacatcatgaggagaggacatggtatgtgggcaaaataaaccgcacacaggctgaagagatgttaagcggtaaacgcgacgggactttcctgatccgggaatcctcacagagaggatgttacgcctgtagcgtagtcgttgatggagacaccaaacactgcgtaatatataggaccgccacaggtttcggattcgccgaaccctataacttatacggttctctgaaggaactcgtcctgcactatcagcatgctagcctggtgcaacacaacgacgccttgaccgttaccttggctcacccagtgcgtgcccccggtccaggccctccccccgcagcccgttag

SEQ ID NO: 131529 - DNA, 660 bp, synthetic construct
  misc_feature 1..660: note = Description of Artificial Sequence: Synthetic coding sequence
  source 1..660: mol_type = other DNA
atggccagtgttactgacggcaaaacaggcgtcaaggatgcctctgaccagaatttcgactatatgttcaaacttttgattatcggaaatagctcagtgggcaagacatcttttctgttcaggtatgctgacgatacctttactcccgcgttcgtgtccacagtcgggattgacttcaaggtcaagaccgtgtaccgccatgagaagagggtaaagcttcagatttgggatactgcggggcaggaaagatatcgcactattacaaccgcctactacaggggagcaatgggattcattctgatgtatgacattactaacgaagagtctttcaacgccgtgcaagactgggctacacagatcaaaacatacagctgggacaatgcacaggtgatattggtcggtaataaatgcgatatggaagaggagcgtgtggtcccgactgaaaaggggcagctcctcgctgaacagctcggattcgatttctttgaagcgagtgctaaagaaaatatcagcgtgcgccaggccttcgaacgactagtcgacgccatttgtgacaagatgtccgattctctagacaccgatcctagtatgttgggctctagcaagaacacccgcttaagcgataccccccccctcctacaacagaattgcagctgctag

SEQ ID NO: 131530 - DNA, 660 bp, synthetic construct
  misc_feature 1..660: note = Description of Artificial Sequence: Synthetic coding sequence
  source 1..660: mol_type = other DNA
atggccagcgtgaccgacggtaagactggagtgaaggacgcaagcgaccagaattttgactatatgtttaagctcctgattatcggcaactctagtgtggggaaaacaagtttcctgttcagatacgctgatgacaccttcacgccggctttcgtatccacagtggggatcgatttcaaggtaaagaccgtgtaccgtcacgaaaagcgggtcaaactccagatctgggacacagcggggcaggagaggtacaggacaattacgaccgcgtattataggggagccatgggatttattcttatgtacgacattactaacgaagaaagctttaacgcagtgcaagattgggctacacagattaaaacttatagctgggataatgctcaggtgatactggtcgggaataagtgcgacatggaggaggaaagggtggtgccgacagaaaaagggcagcttcttgccgaacagctgggatttgatttcttcgaggcttcagccaaggagaacatctctgtgagacaagcctttgagaggctcgtagatgcgatctgcgataaaatgtctgactccttggacaccgacccatccatgctggggtcttccaaaaatacacggctgagcgacaccccaccgcttctgcagcagaattgttcctgctag

SEQ ID NO: 131531 - DNA, 684 bp, synthetic construct
  misc_feature 1..684: note = Description of Artificial Sequence: Synthetic coding sequence
  source 1..684: mol_type = other DNA
atgcgccatgaagcccccatgcagatggcttctgcccaggatgcccggtacggtcagaaagactcatctgatcagaatttcgactatatgttcaagcttttaattatcggcaactcatctgtgggaaagacaagcttcctgtttcgatacgcagacgattcttttacttctgccttcgtgagtacggtgggcattgactttaaggtgaagaccgtgtttaaaaacgagaaaaggataaagctccagatatgggatactgccggccaggaaagatacaggaccatcactactgcgtactaccgtggagcaatggggttcatactgatgtatgatatcaccaatgaggagagcttcaatgccgtccaggattggtccacacagattaaaacatactcttgggataacgcacaggtgatactggtgggcaacaagtgtgatatggaagatgaacgtgttatttctaccgaacgcggccaacacctcggtgaacagctcggctttgaatttttcgagacatcggctaaagacaacattaatgtcaagcagaccttcgaaagactggtggacattatctgtgataagatgagcgagtccctcgaaaccgatcccgccattacagcggccaaacagaacactcgtctcaaggaaacccccccccctccgcagcccaattgtgcctgctag

SEQ ID NO: 131532 - DNA, 783 bp, synthetic construct
  misc_feature 1..783: note = Description of Artificial Sequence: Synthetic coding sequence
  source 1..783: mol_type = other DNA
atggccgggagcccactattatggggcccgcgggcaggtggagtggggctgctcgtcttgctcctgctcgggctgttcaggcccccccctgccctgtgcgcaaggcccgttaaagaacctagagggctttccgccgccagccccccactggcagaaaccggcgcacctcgcagattcaggaggtcagtcccacgcggtgaagctgcaggagcggtgcaggaactcgctagagccttagcccatttgctcgaggctgaacggcaggagcgcgctcgggccgaggctcaggaggcagaagaccagcaggctagggtgctggcacagttgttaagggtgtggggggcgccaaggaattctgaccccgctctcggattggatgacgaccctgacgcgcctgccgctcaactagcgagagccttgctaagagcacggctggaccctgccgccctcgcagcacagcttgttcctgccccggtacccgctgccgcactacgtccgcgccccccagtctacgatgacggcccagctggcccggatgctgaagaagccggagatgaaacacccgatgtggatcctgaactgctgaggtatctcctcggccgtatcctggcgggcagcgcggattctgaaggtgtcgcagcaccaagaagattacgccgagctgccgatcacgatgtgggttccgaactgcctcccgaaggggttctcggggctctacttagagttaagcggctggagacgcctgcaccccaggtgcccgcgagaagattgttgcctccctag

SEQ ID NO: 131533 - DNA, 657 bp, synthetic construct
  misc_feature 1..657: note = Description of Artificial Sequence: Synthetic coding sequence
  source 1..657: mol_type = other DNA
atgagtcaaacggccatgtctgagacatatgacttcctgttcaagtttctggtcattggtaacgccggaacagggaagtcttgtcttctgcaccagtttatcgagaaaaagttcaaagacgactccaatcatactatcggggtggaattcgggagcaaaataatcaacgttggcggtaagtacgtaaaacttcaaatttgggatactgctggccaagaacggtttcggtctgtcacccgcagctactatcggggcgccgctggagctctgcttgtgtacgacatcacttccagggaaacttataatgcgttgacgaactggctcaccgatgcacgaatgttagctagtcagaacattgtcatcattctttgcggcaacaagaaagatctggatgccgacagggaggtgaccttcttggaggcttctaggttcgcgcaggaaaacgagctcatgtttttagagacttctgccttgacgggcgagaacgttgaggaggcttttgtccagtgcgccagaaaaatcctcaataagatagaatcaggcgagttggatcccgaaagaatgggcagtgggatccagtatggagacgccgccctgcggcagctgcgatctccaaggagggcacaggcccccaacgcacaagaatgtggatgctag

SEQ ID NO: 131534 - DNA, 648 bp, synthetic construct
  misc_feature 1..648: note = Description of Artificial Sequence: Synthetic coding sequence
  source 1..648: mol_type = other DNA
atggcgtcccgaggcgcgaccagacccaatggaccgaacacaggcaacaaaatttgtcaattcaagctggtcctgctcggggaatctgctgtgggtaagtccagtctggtccttaggtttgttaagggccagtttcacgagttccaagaaagtaccatcggggccgcctttcttacacagaccgtctgtctagatgatacaaccgtaaaattcgaaatttgggacaccgctggccaggagcgctatcactctctagcacctatgtactaccgaggcgctcaagccgctatcgttgtgtatgatatcacaaacgaagagagctttgccagggcgaagaattgggttaaagagctgcaacgacaggcatctcccaacatcgttattgctctgtctggtaacaaggctgatctcgccaataagagagcagtggatttccaggaggcccagtcatatgctgacgacaattccttgctctttatggagacctcggccaagacctccatgaatgtgaacgagattttcatggcaattgcaaagaaactgccgaaaaacgaaccgcagaaccccggtgctaactctgcaagggggagaggcgtggatttgaccgaacctacacaaccaactcgcaatcagtgctgttccaactag

SEQ ID NO: 131535 - DNA, 606 bp, synthetic construct
  misc_feature 1..606: note = Description of Artificial Sequence: Synthetic coding sequence
  source 1..606: mol_type = other DNA
atggcctcccgaggcgccacacgacccaatggtcccaatacaggaaataaaatttgtcagtttaaactggtcctcctgggagaatccgcagtgggaaagtccagtttagtcctgcggttcgtaaaggggcagttccacgaattccaggaaagcacaataggggtgaagtttgaaatctgggacaccgctggccaagagcggtaccatagtctcgctccaatgtactacagaggagcgcaggcggccattgtcgtgtatgatattacaaacgaagaaagcttcgccagggcgaaaaactgggtcaaagaactgcaacgccaggcttcacccaacatcgttatcgctctgagcggcaacaaagccgacctcgctaataagagagctgtcgacttccaagaggcccagtcctatgccgacgacaacagcctgctctttatggagacctctgcaaagacgagcatgaacgtgaatgagatttttatggccatagctaagaaattgcctaagaacgagccccagaacccgggagcaaatagtgcgagaggcagaggtgtggatttgactgaaccgacccaaccaacccgaaaccagtgctgttcgaattag

SEQ ID NO: 131536 - DNA, 48 bp, synthetic construct
  misc_feature 1..48: note = Description of Artificial Sequence: Synthetic coding sequence
  source 1..48: mol_type = other DNA
atggcctcccgcggggcaacccgcccaaacggtcccaacacagggtag

SEQ ID NO: 131537 - DNA, 648 bp, synthetic construct
  misc_feature 1..648: note = Description of Artificial Sequence: Synthetic coding sequence
  source 1..648: mol_type = other DNA
atgacctcaagatcaacagcgcgtcccaatggtcagccccaagccagtaagatctgccagttcaaattagtgctcttgggcgaatcagctgtgggaaaaagcagcctagttttgcgattcgttaaaggtcaattccatgaataccaggagagtaccataggcgctgcatttcttacccaaagcgtttgtctggacgacactactgtcaagtttgaaatctgggacaccgcaggccaggaacgctatcattccctcgccccgatgtactaccggggagcccaggcagccattgttgtgtatgacattacaaaccaagaaacattcgcaagggccaagacttgggttaaagagctgcaaaggcaggcttctccctccattgtcattgctcttgctgggaacaaggccgacctagctaacaagaggatggtcgaatacgaggaggctcaggcgtatgctgacgataactcccttttgttcatggaaacctccgccaagactgctatgaacgtcaatgatctcttccttgctattgctaaaaagctccctaagtccgagccccagaaccttgggggcgccgcgggacgcagtcggggcgtggacttacacgagcagtctcagcagaataagagtcaatgctgctcaaattag

SEQ ID NO: 131538 - DNA, 525 bp, synthetic construct
  misc_feature 1..525: note = Description of Artificial Sequence: Synthetic coding sequence
  source 1..525: mol_type = other DNA
atgacctcacgctcgacagcccgaccaaatggtcagcctcaggcttccaagatttgccagtttaagctggtgctgctaggcgaatcagctgtcggaaaatcaagtctggtgctgagatttgtcaaggggcaattccacgagtatcaagaaagcaccataggcgcggccttccttacgcagtcagtttgccttgatgataccacagtaaagtttgagatttgggacactgcaggccaggaacggtatcactctctcgctccaatgtactatcggggagcacaagccgctatcgttgtgtatgacattaccaatcaggaggcacaggcgtacgctgatgacaactctctgctgttcatggaaactagtgccaagactgccatgaacgtcaatgacctcttcctcgccattgctaagaagctgccaaagtctgagccccaaaacctcggcggggcagccggacgatctcgcggggtggaccttcatgaacaaagccaacaaaacaaaagccaatgctgtagtaactag

SEQ ID NO: 131539 - DNA, 348 bp, synthetic construct
  misc_feature 1..348: note = Description of Artificial Sequence: Synthetic coding sequence
  source 1..348: mol_type = other DNA
atgacctctcgtagtaccgcgagacctaacggccagccacaggccagcaaaatttgccagttcaagttagtactgcttggggaatctgccgtgggcaagagcagcttggtcctccggtttgtgaaagggcagtttcatgagtaccaggagtctacaattggcgctgcatttctgactcagtctgtgtgcttagatgacactactgtgaagttcgaaatttgggataccgcgggtcaagagcgctaccactccttggccccgatgtactatcgtggggcacaggccgcaatcgttgtgtatgacattaccaaccaggagacctttgcacgcgcaaaaacctgggtctag

SEQ ID NO: 131540 - DNA, 303 bp, synthetic construct
  misc_feature 1..303: note = Description of Artificial Sequence: Synthetic coding sequence
  source 1..303: mol_type = other DNA
atgacctcacggagtactgctcgtccaaatggtcagccacaggcgtcaaaaatttgccagtttaagctggttctgctgggcgagtccgctgtgggaaagagcagtttggtgctacgctttgtgaagggccagttccatgagtaccaggagagcacaattggcgctgcatttttaacacaaagcgtgtgcctggatgatactactgtaaagttcgaaatttgggacactgccggccaagagaggtatcatagcctggcacctatgtactataggggggcccaggcagcaatcgttgtgtattag

SEQ ID NO: 131541 - DNA, 648 bp, synthetic construct
  misc_feature 1..648: note = Description of Artificial Sequence: Synthetic coding sequence
  source 1..648: mol_type = other DNA
atgacttcccgcagtactgcgaggcccaacgggcagccgcaggctagcaagatctgtcagttcaagcttgtgctgctgggggagtctgccgtcgggaagagctcactggtccttaggtttgttaaaggacagtttcacgagtatcaggagagtaccattggggctgccttcctgacccaatcagtgtgcctagatgataccaccgtaaaatttgaaatctgggatactgccggtcaggaaagatatcattcactggcaccaatgtactaccggggtgcccaggctgctatcgttgtctacgatatcactaatcaggaaacatttgcgagagctaagacttgggtgaaggagcttcagaggcaagcctctcctagcatagtgattgccctcgctggaaacaaggctgatctcgccaacaagaggatggtggaatatgaggaggcacaggcatacgcggacgataactctttgctgttcatggagaccagtgccaagactgctatgaacgttaacgatctttttctggcaatcgcaaaaaagctgccaaagagtgaaccgcagaacctgggtggagcagcgggtcggtccagaggtgtggatttacacgagcaaagtcagcagaacaagtctcaatgctgtagcaattag

SEQ ID NO: 131542 - DNA, 651 bp, synthetic construct
  misc_feature 1..651: note = Description of Artificial Sequence: Synthetic coding sequence
  source 1..651: mol_type = other DNA
atggctggccggggtggcgcagctcgacccaatggtcctgcggccggcaataaaatatgccagtttaagctggtcctgttgggggagtcagctgtcggaaagagctccctcgtgctgagattcgtaaaaggtcaattccacgagtaccaagagtcaacgattggtgccgcattcctgacacagaccgtgtgcctggacgatacaaccgtaaagtttgagatatgggacacagctgggcaggagagatatcactccctggctccaatgtactataggggggcccaggcagcaatcgttgtttacgatatcacaaatacagatacgtttgccagggcaaaaaactgggtcaaggaactgcaacggcaggcttccccaaatatcgtgattgctctggcagggaataaggccgatctggcttcaaagagagctgtcgagtttcaggaggcgcaggcatatgccgatgacaattccctgttgttcatggaaacctctgcaaagactgccatgaatgtcaatgaaatattcatggctatcgcgaaaaagctgcccaagaacgagcctcagaacgcaactggcgctcccggccgtaatcgaggtgtagatttacaggaaaacaatccggcatcccgctcccagtgttgcagtaattag

SEQ ID NO: 131543 - DNA, 651 bp, synthetic construct
  misc_feature 1..651: note = Description of Artificial Sequence: Synthetic coding sequence
  source 1..651: mol_type = other DNA
atggccggacgaggaggggcggccaggccaaacggacctgctgcgggaaacaaaatatgccagtttaagctggtgctgcttggagagagcgccgtaggcaagtctagcctggtgctgcggtttgtgaagggtcagtttcacgaataccaagagagcaccattggcgccgccttcctcacgcaaacggtatgccttgacgataccaccgtgaaatttgaaatttgggacaccgccggacaagagaggtatcattccctcgctcccatgtattacaggggcgcacaagctgctatcgtggtgtatgacatcacgaatactgacacctttgctagggctaagaattgggttaaagagttacagcgccaggcttctcctaatatcgtgattgcgctagctgggaacaaagccgatctcgcctctaagcgcgccgtcgagtttcaggaagcacaggcctacgcagacgataattcactactgtttatggagacaagtgcaaaaaccgccatgaacgtgaacgagatctttatggctatcgcaaaaaaactaccgaagaacgaacctcaaaacgctactggtgctcccgggcgaaataggggggtagacctgcaagaaaataatcctgccagtcgctctcaatgttgctccaactag

SEQ ID NO: 131544 - DNA, 750 bp, synthetic construct
  misc_feature 1..750: note = Description of Artificial Sequence: Synthetic coding sequence
  source 1..750: mol_type = other DNA
atggaactatcatggagatctcctagtccactctccgccagcttacactcgacctcaccccacccccatgcactgtggaccactaccgccggccgggccatggcgggtagagggggggcagctaggcccaacgggcccgccgcaggcaacaaaatatgccagtttaagctggtgttgttaggagagtcagcagtcgggaaatccagcctcgttttaaggttcgttaaaggccaatttcatgaataccaagagtccacaatcggggctgccttcctgactcaaacggtgtgtcttgatgacacgaccgtgaaattcgaaatatgggacactgctggtcaggagcgttaccatagcctcgctcccatgtattaccggggcgcccaagcagccatcgtcgtttacgatattacaaacaccgacactttcgccagagccaaaaactgggtgaaggagctgcagcgacaggcctcccctaacatcgtgatcgccttggcaggtaataaagctgatttagcctcaaagagagctgttgagttccaagaggcccaggcctatgcagatgacaatagcttgctgtttatggagacctctgcgaaaactgcaatgaacgtgaatgaaatcttcatggcgattgctaaaaagctccccaaaaacgaacctcagaacgccacgggcgcccccggtcgaaacagaggagtcgacctgcaggagaataaccccgctagtagatcccagtgttgtagcaactag

SEQ ID NO: 131545 - DNA, 225 bp, synthetic construct
  misc_feature 1..225: note = Description of Artificial Sequence: Synthetic coding sequence
  source 1..225: mol_type = other DNA
atggcgggaaggggaggcgccgcccgccccaacggacctgctgctggtaacaagatctgtcagtttaagctggtgctactgggggagagcgcagtgggcaagtcatctctggtcctccggtttgtgaaaggccagttccatgaatatcaggaatctaccatcggcgcagcatttctgacgcagacggtgtgtctagatgatactaccgtcaaatttgaaatctag

SEQ ID NO: 131546 - DNA, 279 bp, synthetic construct
  misc_feature 1..279: note = Description of Artificial Sequence: Synthetic coding sequence
  source 1..279: mol_type = other DNA
atggccggacgaggcggcgctgctaggcctaacggccccgcggccggtaacaaaatctgccaattcaagttggttctcctcggggaaagcgctgtgggtaaatcctccctagttctgaggtttgtcaaagggcagttccacgagtatcaggaaagcacgatcggagctgcttttttgacccagaccgtgtgtcttgatgacaccacggtgaagtttgaaatctgggataccgccggacaggagcggtatcactccctggcccctatgtactaccgctag

SEQ ID NO: 131547 - DNA, 375 bp, synthetic construct
  misc_feature 1..375: note = Description of Artificial Sequence: Synthetic coding sequence
  source 1..375: mol_type = other DNA
atggccggtcgaggaggagcggcccgacccaacggaccagctgccggcaataagatttgccagtttaagctcgtgctcctcggggagtccgccgtgggtaaaagcagtcttgtgctcaggttcgttaagggccagttccacgagtatcaggaatctacaatcggggccgccttcctcacccagacagtgtgcttagacgatactacagtcaagttcgagatctgggataccgctggacaggagcgctatcacagccttgcaccgatgtactaccgcggcgcacaggcagctattgtagtgtacgatattacgaacaccgacacatttgctagggccaaaaactgggtgaaggagttacaacgtcaggccagctag

SEQ ID NO: 131548 - DNA, 627 bp, synthetic construct
  misc_feature 1..627: note = Description of Artificial Sequence: Synthetic coding sequence
  source 1..627: mol_type = other DNA
atgtccacaggtggggatttcgggaaccccctgcggaagttcaaactggtttttctgggcgagcagagtgtgggtaagacgtcactgattacaagattcatgtacgattccttcgacaacacctaccaggctaccatcggcatcgatttcctgagcaagacaatgtatctggaagaccgtactatcagactacagctgtgggataccgcagggcaagaaaggtttcgatcactgatcccgagctatatcagggattcagccgccgcggtggtggtttatgatattactaacgtgaactcatttcagcaaacaactaagtggattgatgacgtgcgaactgagagaggcagtgacgtaattataatgctggtaggtaacaagacagacctggctgataaacggcaggtgtctattgaagagggagagcgaaaagcaaaagagctgaacgtgatgttcattgagacctcagctaaggctgggtataacgtaaaacaattattcaggcgtgtggcagcggcgcttcctggaatggagagtactcaagatagatcaagagaagacatgattgatataaaattggagaaaccccaggaacagcctgtgtcggagggaggctgcagttgttag

SEQ ID NO: 131549 - DNA, 627 bp, synthetic construct
  misc_feature 1..627: note = Description of Artificial Sequence: Synthetic coding sequence
  source 1..627: mol_type = other DNA
atgagcacggggggcgactttgggaatcctttgagaaagttcaaacttgttttcctcggcgaacagagtgtagggaagactagcttgatcactagatttatgtatgactcatttgacaacacgtaccaagcaacgatcggaatagatttcttatcaaagactatgtacctagaggatcgcacagtgcgccttcaactgtgggacaccgctggccaggagaggttcagatctctgatcccttcctatatccgagactctacagtggcagtggttgtgtacgacatcactaacgtaaattccttccaacagacgaccaagtggatcgatgatgtccgaaccgaaaggggaagcgacgtgattattatgctagttggcaacaagacagacctggccgataaaaggcaggtgagtattgaggaaggcgaaagaaaggctaaggaactgaacgtgatgtttattgaaacaagtgcaaaagctggatacaatgtgaaacaacttttccgaagggtggccgcagccctgccggggatggagtcaacgcaggatcgctctagagaggacatgatcgatataaagttggaaaagccccaggagcagccagtgagcgaaggaggttgtagttgctag

SEQ ID NO: 131550 - DNA, 627 bp, synthetic construct
  misc_feature 1..627: note = Description of Artificial Sequence: Synthetic coding sequence
  source 1..627: mol_type = other DNA
atgtctactgggggagacttcggaaaccctctccgaaaatttaagctggtgttcctgggcgaacagtctgtcgggaagacttctcttatcacccgcttcatgtacgattccttcgacaatacttaccaggccactattggcatcgattttctctcaaagactatgtacctggaggatagaacaataaggctgcaactttgggatactgccggccaggaacgattccggtccctgatcccaagttatataagagactccgccgccgccgtggtcgtttatgacatcaccaatgtcaattccttccagcagacaaccaagtggattgacgacgtcaggaccgaaaggggctccgatgtgatcatcatgctcgtggggaacaagactgatttagcagacaaaagacaggtctccatcgaggagggtgagagaaaagccaaagaactgaacgttatgtttatcgaaacatccgcgaaagccggctacaatgtaaagcaactttttagacgggtggcagcggcattacccggcatggaatcgacacaagatagaagccgggaagacatgatagatatcaaactcgagaagccgcaggaacagcctgttagcgagggaggctgctcttgctag

SEQ ID NO: 131551 - DNA, 525 bp, synthetic construct
  misc_feature 1..525: note = Description of Artificial Sequence: Synthetic coding sequence
  source 1..525: mol_type = other DNA
tgaccactgagaaagttcaagcttgtcttcctgggggagcagagtgtgggtaagacatccctcatcactcgttttatgtacgattcgttcgacaatacgtaccaggccaccataggtatcgattttctgtcaaaaaccatgtacctggaggacaggacggtcagactgcagctgtgggacaccgccgggcaggagcggttccgatcactcatcccgtcatacattcgggatagtacggttgccgtggtggtgtatgatataacaaatgttaatagtttccagcaaaccacgaaatggattgacgacgttcggactgagcgaggcagcgacgtcattatcatgctcgttggcaacaagacagaccttgcagataaaagacaggtgagtatcgaagaaggtgaacggaaggccaaagaactgaacgtaatgtttattgagacctccgctaaagcgggctataacgtgaaacagcggatcggctcctgtcacgttgcacaggcttctctcgagctgcttgactcatag

SEQ ID NO: 131552 - DNA, 225 bp, synthetic construct
  misc_feature 1..225: note = Description of Artificial Sequence: Synthetic coding sequence
  source 1..225: mol_type = other DNA
atgagcacagggggtgactttggcaatccgttgagaaaattcaagttggtatttctaggggagcaatccgttggcaagaccagccttataacccgttttatgtacgattccttcgataacacatatcaggcgaccatcggcattgacttcctgtcgaagacaatgtaccttgaggatagaacggtccgactccagctgtgggatacagcaggacaggaacgctag

SEQ ID NO: 131553 - DNA, 528 bp, synthetic construct
  misc_feature 1..528: note = Description of Artificial Sequence: Synthetic coding sequence
  source 1..528: mol_type = other DNA
atgtacgattcctttgacaatacctatcaggccactattgggattgacttccttagcaagactatgtacctggaggatagaaccattaggttgcagctgtgggacaccgctggtcaggagcgcttccggagcctgatccccagctatatacgggacagtgccgctgcagtggtggtctatgacattaccaacgtcaactccttccagcagaccacaaagtggatagatgatgttcggactgagagaggctcagacgtcattatcatgttggtggggaataagacagatttggccgataagcggcaggtgagcattgaggaaggggagagaaaagctaaggaattgaatgtgatgttcattgaaacaagcgccaaggcaggttataatgttaagcagctgtttaggcgggttgccgcggccttgcccgggatggagagcacccaagataggtctcgggaggatatgatcgatatcaagcttgaaaagccgcaggagcaaccagtgagcgaaggaggctgctcatgttag

SEQ ID NO: 131554 - DNA, 429 bp, synthetic construct
  misc_feature 1..429: note = Description of Artificial Sequence: Synthetic coding sequence
  source 1..429: mol_type = other DNA
atgtctactggaggagattttggcaaccctttacgtaaatttaagctggtattcctcggcgagcagtctgttggcaagacctctcttatcacgcggtttatgtatgactcattcgacaatacttatcaggctacaataggaatcgatttcctctcaaaaaccatgtatctggaagacagaactatccgccttcagctctgggatactgccggtcaggaaaggttcagatctcttatacccagctacatacgggactccgccgccgcggttgtggtctacgatatcacaaatgtcaacagcttccagcagaccaccaagtggatagacgatgtccgaacagagcgtgggagcgatgtaattattatgttggtgggcaacaaaaccgatctcgctgataagcgtcaggtcagcatagaagagggtgaatag

SEQ ID NO: 131555 - DNA, 315 bp, synthetic construct
  misc_feature 1..315: note = Description of Artificial Sequence: Synthetic coding sequence
  source 1..315: mol_type = other DNA
atgagcacggggggagacttcggcaacccactgcggaaatttaaactcgtgttcctcggagaacagtctgtcggtaagacaagcctcattacacgctttatgtacgacagttttgacaacacatatcaggccaccattgggattgatttcctgtcaaagacaatgtatctcgaggatcgcaccctgtttcggagagtagccgcagccttgccaggcatggagtctactcaggatcgttccagggaagacatgattgacatcaagctcgagaaaccccaggaacaaccagtctccgagggggggtgctcctgttag

SEQ ID NO: 131556 - DNA, 606 bp, synthetic construct
  misc_feature 1..606: note = Description of Artificial Sequence: Synthetic coding sequence
  source 1..606: mol_type = other DNA
tgagtgtttccaagagggcttgcacttcgctccgctgacgtggtggaggttggcaagacaagtctgattactaggttcatgtacgactcgttcgataacacgtatcaagctaccatcgggattgacttcctgagcaagacgatgtatcttgaggacaggaccattcggcttcagttgtgggacaccgctggccaggaacgcttcagatcactcatccctagctacattcgcgatagtgcggctgccgtcgtggtttacgatatcactaatgttaacagtttccaacagactaccaagtggatcgatgatgttagaacagaacggggttctgatgtcatcattatgctggtcgggaataagacggatctagctgacaaaaggcaggttagtatcgaggaaggtgaaaggaaggccaaggagctgaatgtgatgtttatcgagacctctgctaaagccggttataatgtgaagcagctcttccgacgggtggccgctgccttgcccgggatggagagtacccaagatcgcagcagagaggacatgatcgatatcaagctggagaaacctcaagagcagccagtgtcggagggcggatgtagctgttag

SEQ ID NO: 131557 - DNA, 144 bp, synthetic construct
  misc_feature 1..144: note = Description of Artificial Sequence: Synthetic coding sequence
  source 1..144: mol_type = other DNA
atgagtactggtggggatttcggcaaccccctccgtaaattcaaacttgtattccttggagaacagagtgtggggaagacatcgttgatcacaagatttatgtacgattcgtttgacaacacataccaggcgacaattggatag

SEQ ID NO: 131558 - DNA, 765 bp, synthetic construct
  misc_feature 1..765: note = Description of Artificial Sequence: Synthetic coding sequence
  source 1..765: mol_type = other DNA
atgagcgcagggggcgactttggaaacccacttagaaaatttaaactcgtctttcttggggagcagtccgtggccaaaacttccctcattactcgcttcagatacgattcctttgataacacataccaggctattattggtattgatttcttatcgaaaaccatgtacttggaggacggaacaattggcctgaggttatgggataccgcagggcaggagcgccttcgcagcctaattcctaggtatatcagagactcagcagccgctgtggtcgtatatgacattactaacgtgaatagctttcagcagacaacgaaatggatcgacgatgttagaaccgagcggggaagtgatgttatcattaccctagtgggcaatcggaccgacctggccgacaagcgacaggtctccgtagaggagggagaacgaaaggccaaaggactcaatgttacattcatcgaaacccgggcgaaagccggatataatgttaagcagctgtttcgcagagtcgccgccgccctcccagggatggagtcaacccaggatggcagcagagaggacatgtcagatatcaaactggaaaaaccacaggagcagactgttagtgagggaggatgctcctgctacagtcccatgtccagttccacactaccacagaagccaccgtattcttttatagattgttcagtcaacatcggactgaaccttttcccaagcttgataacattttgcaacagttcactgctccctgtttcctggcgatag

SEQ ID NO: 131559 - DNA, 612 bp, synthetic construct
  misc_feature 1..612: note = Description of Artificial Sequence: Synthetic coding sequence
  source 1..612: mol_type = other DNA
atgggcagccgggatcacctcttcaaggtgttggtagtaggggacgctgcagtgggcaaaactagcctggtgcaaaggtactcgcaagattctttctcaaagcactataagtccacagtaggcgtggattttgctttgaaggtcctgcagtggagcgattatgagatagtgagattacaactgtgggatattgccggacaagagagattcacctcaatgacaaggttgtactaccgcgacgctagtgcctgcgttattatgttcgatgttaccaacgctacaacgtttagtaactcccagagatggaaacaagatctcgactcaaaactaactctgcccaacggtgagccagttccctgtctactgttggcaaataagtgtgacctctcaccatgggctgtcagcagagaccagatcgacagattctcaaaggagaatggctttaccggctggactgaaacttccgtgaaggaaaacaagaatatcaacgaggccatgcgtgttctcatcgaaaagatgatgcggaatagtacggaggatataatgagcttgagtacacagggtgattatataaacctacagacaaagtcatcttcatggtcttgttgttag

SEQ ID NO: 131560 - DNA, 612 bp, synthetic construct
  misc_feature 1..612: note = Description of Artificial Sequence: Synthetic coding sequence
  source 1..612: mol_type = other DNA
atgggctctcgcgatcaccttttcaaagtgctggttgttggtgatgccgcagtcggaaagacatccctagtccagcggtactctcaggactccttttcgaagcactacaaaagtacagtgggagtcgatttcgctctgaaggttctgcaatggtccgactatgaaatcgtgcgtttgcagctgtgggacatcgccggacaggagagatttacttctatgactcgcctctattatcgagacgctagtgcttgtgtgatcatgttcgacgtgacaaacgccaccaccttcagtaattcccaaagatggaagcaagacctcgatagcaagttgacactgccaaatggcgaacccgtcccctgtttgctgctggccaacaagtgtgacctctcaccttgggccgtctccagagatcagattgacaggttttctaaagagaatgggttcaccggctggacggaaacaagcgtgaaggaaaataagaatatcaatgaggccatgagagtgcttatcgaaaaaatgatgagaaattctaccgaagacatcatgtctctaagtacacagggggactatattaacctgcaaacgaaaagctcctcgtggagctgctgctag

SEQ ID NO: 131561 - DNA, 612 bp, synthetic construct
  misc_feature 1..612: note = Description of Artificial Sequence: Synthetic coding sequence
  source 1..612: mol_type = other DNA
atgggctcaagggatcatcttttcaaggtgttggtagtgggtgatgcagccgtaggcaaaaccagtctcgttcagcgatattcacaggattctttcagtaaacactacaagagtaccgtcggggtcgatttcgctctgaaagttctgcagtggtcagactatgaaattgtccggctgcaactgtgggacatcgccgggcaagagcggtttacttctatgacaagactgtattaccgagatgcttccgcatgtgtgatcatgttcgacgtcacaaatgccaccaccttttccaattctcagaggtggaaacaggatctagactcaaagttaacactccccaacggggagcctgtcccatgcctcctgctagccaacaagtgcgatctctcgccctgggcggtgagtagggaccagatcgatcgcttctccaaagagaacggcttcaccgggtggaccgaaacatccgtcaaggaaaataagaatattaacgaggcaatgagagtgctcattgagaagatgatgcggaatagtaccgaggatataatgtctcttagcacccaaggagactatatcaatttacagacaaaaagcagtagctggagctgctgttag

SEQ ID NO: 131562 - DNA, 396 bp, synthetic construct
  misc_feature 1..396: note = Description of Artificial Sequence: Synthetic coding sequence
  source 1..396: mol_type = other DNA
atgacccgcctctattatcgggacgcgtcagcctgcgtgataatgtttgatgttacaaacgcaaccacattctctaattcgcaaagatggaaacaggatctggactcaaaactcaccttgccaaacggtgaacccgtcccctgtctgttgctggcaaacaaatgtgacctgagtccctgggcagtgtcacgagatcagattgaccggttctccaaggaaaatggctttactgggtggacagaaacctcagtgaaggaaaacaaaaatatcaatgaggccatgcgcgtgttaattgagaaaatgatgcgcaactctaccgaggacatcatgagcttatccacacagggcgattatataaacctgcagacgaagagttcatcctggtcatgctgctag

SEQ ID NO: 131563 - DNA, 540 bp, synthetic construct
  misc_feature 1..540: note = Description of Artificial Sequence: Synthetic coding sequence
  source 1..540: mol_type = other DNA
atggggtcccgcgatcaccttttcaaggttctggtagtgggcgatgccgctgtcggcaagacatccttggtgcaacgctactcacaagactccttctcaaagcactacaagtctaccgtggggggacaggagcggtttacatccatgactaggctatattatcgcgatgcctctgcatgcgtcattatgttcgacgtgaccaatgccaccaccttctcaaattcacagcgatggaagcaggacctggactcaaagctaactctgcctaacggagaaccagtaccgtgcctcctgcttgctaacaagtgcgatctctccccatgggccgttagtcgcgatcagattgatcgattttctaaagaaaatggtttcacgggttggaccgaaaccagcgtgaaagaaaacaaaaatatcaacgaggctatgcgtgttctgattgagaagatgatgagaaattctaccgaagacattatgtctctgagcacccagggtgactatatcaatctccaaactaagtcatcctcctggtcttgctgttag

SEQ ID NO: 131564 - DNA, 624 bp, synthetic construct
  misc_feature 1..624: note = Description of Artificial Sequence: Synthetic coding sequence
  source 1..624: mol_type = other DNA
atggcgaagacatacgattaccttttcaaattgttgctgattggcgacagcggggtgggaaagacttgcgtgctgttccgcttttctgaagacgcctttaactctacgttcatatcaacaatcggcattgatttcaagatcaggacaatcgagcttgatggtaagcgcattaaacttcagatttgggataccgccggtcaagagagatttaggacaataacaactgcctactacaggggagcaatgggcattatgctcgtctacgatatcaccaacgaaaagtcattcgataacatcagaaactggattagaaacatagaagagcatgccagcgcagatgttgagaaaatgatactgggtaataagtgcgatgtgaatgacaagaggcaggtgagcaaagaaaggggagagaaattagcccttgactatggcattaagttcatggaaacttccgcaaaggccaatattaatgtagaaaatgccttctttaccttggcaagagacataaaggctaagatggataagaagcttgagggcaatagcccccagggaagcaatcaaggagtgaagatcacccctgatcaacagaagagaagcagctttttccgctgcgttctgctgtag

SEQ ID NO: 131565 - DNA, 606 bp, synthetic construct
  misc_feature 1..606: note = Description of Artificial Sequence: Synthetic coding sequence
  source 1..606: mol_type = other DNA
atgagtggtaagtccctgttacttaaggtgatactgcttggcgatggtggcgtggggaagagcagtctgatgaatagatacgtgacaaacaaatttgattcgcaggcgttccataccatcggggtggaattcctgaacagagatttggaggtggacggtagattcgtcactctccagatctgggatacagcagggcaagaaagatttaagtccttgaggactcctttttaccgtggagccgactgttgtctgcttacatttagcgtggatgatcgccagtctttcgagaacctcggaaattggcagaaggaatttatatattacgccgacgtcaaggaccccgaacacttcccattcgtcgttctggggaacaaggtggacaaagaagaccggcaggtgaccacagaagaagcacagacgtggtgcatggaaaatggtgattatccttatctggagacgagtgcaaaagacgatacgaacgttacggtggcctttgaggaggccgtcaggcaggttctggcggtggaggagcagttggaacactgtatgcttggacacactatcgatctgaacagcggatctaaagcgggatcaagttgctgctag

SEQ ID NO: 131566 - DNA, 2589 bp, synthetic construct
  misc_feature 1..2589: note = Description of Artificial Sequence: Synthetic coding sequence
  source 1..2589: mol_type = other DNA
atggctcagcctggacccgcctcccagcctgacgtgtccttgcagcagagagtcgcggagctggagaagatcaatgctgaattcctacgcgcacaacagcaattagaacaggagttcaatcagaagcgtgccaaatttaaagagctttacctggcaaaagaagaagacctcaaacgacagaacgccgttctgcaggcggcccaagatgaccttggtcacctgcggacccaactgtgggaagcccaggccgaaatggagaacattaaggcaatagccacagtgagtgagaacaccaagcaagaagctattgacgaagtgaagcgccagtggcgcgaggaggtggcctctctgcaggccgtcatgaaagaaacagtaagggattatgagcaccaattccaccttcgcctggaacaggagaggacccaatgggcccagtaccgagaatcagccgagagggagattgccgacttaaggaggcggctctcagaagggcaggaagaagagaatcttgagaacgaaatgaagaaggcccaggaggatgccgagaaactgcgttctgtggttatgcctatggaaaaagagattgcggccctaaaagacaaactgacagaggcggaagataagatcaaggaattggaggcaagcaaggtgaaggagctgaatcattaccttgaagctgaaaaatcttgccggacagatcttgagatgtacgtggccgtcttaaatactcagaagtcggttctacaggaagatgcggagaaactgcggaaggagctgcacgaggtctgtcatctgttggaacaagagcgccagcagcacaatcagctcaagcacacatggcaaaaggctaacgaccagttcctggagtctcagcgactgctaatgagagatatgcagaggatggaaattgtcttgacctcagagcagctaagacaggtggaagagctcaagaaaaaggatcaagaggacgacgagcagcagcgattaaataaaagaaaggatcacaagaaagcagatgtcgaggaggagattaagattcccgtcgtgtgcgctctcactcaggaagaatccagcgcacagctctcaaacgaggaggaacatctggattccacccgcgggagcgtgcactctctcgacgcggggcttcttttgcctagtggagaccccttctcaaagtctgacaacgatatgtttaaagatggcctgaggcgagcgcagtcaaccgattctcttggtaccagtggttctctccagagcaaggctctcggctacaactataaggcaaaatccgcgggcaatctggacgaatccgatttcgggcccctggtgggcgctgacagtgtgtccgaaaattttgacacagccagcttgggttcactgcagatgccttcaggcttcatgctcactaaggatcaggagagggcaattaaagcaatgactcctgagcaggaggaaacagcgtccctgttgagttcagtgactcagggaatggagagtgcatatgtcagtccttcaggctacagacttgtgtccgagactgagtggaacttacttcagaaagaggttcataacgccgggaataagctcggtcgtaggtgcgacatgtgtagtaactatgagaagcagctacaaggaattcagatccaggaggcggagacacgggaccaggtgaagaagctgcagctgatgctgcgccaggccaatgatcagcttgaaaagacgatgaaggacaaacaggaactggaggactttatcaagcagagtagcgaagattctagtcatcagatctcagctcttgttctaagggcacaagcaagtgaaattctgctggaagaactgcagcaaggtctctcccaggcgaagagggacgtgcaggaacagatggccgtgcttatgcagtccagagagcaagtgtctgaggagttggtgcggctgcaaaaggataacgactctcttcaaggaaaacattctttgcacgtgtccctccagcaggctgaggacttcatcctccctgacactacggaggctctacgggagctcgtgcttaaatatagggaagacattataaacgtcagaacagccgccgaccacgtagaggagaaactgaaagccgaaatcttgttcctaaaggaacagatccaggccgaacagtgcctaaaggaaaacctggaggagacactgcagctcgaaattgagaattgcaaggaggaaatcgcctccataagcagtctgaaagctgagttagagagaatcaaggtggaaaaaggtcagcttgagagtacactaagagagaaatctcaacagctggaaagcttgcaggaaatcaaaatcagcctagaggaacagctgaagaaagaaacggcggcaaaggcgacagttgaacaactgatgtttgaagagaaaaataaggcacaaaggttgcagaccgaactcgatgtgtcagagcaggtccaaagagattttgtcaagctcagtcaaaccttgcaagttcagttggaacgcatccggcaggctgattccctggagcgaatcagagctattcttaacgacacaaaactcaccgacataaatcagttgcccgagacgtag

SEQ ID NO: 131567 - DNA, 2490 bp, synthetic construct
  misc_feature 1..2490: note = Description of Artificial Sequence: Synthetic coding sequence
  source 1..2490: mol_type = other DNA
atggcacagccgggaccagcaagccagcctgacgtcagcttgcagcagagggtcgccgaactggagaaaattaatgctgaatttctgagggcccagcagcaattggagcaggagtttaatcagaagcgagccaaattcaaggaactataccttgcaaaagaagaagacctgaagcggcagaatgccgtgttgcaggcagctcaagacgaccttggccatctgcgcacccagctgtgggaagcccaggccgaaatggagaatataaaagccatcgccactgtcagcgagaataccaagcaggaggccatcgatgaagtgaagcggcagtggcgagaggaagtcgcctccctgcaggctgttatgaaggagactgtgagggactacgaacatcagttccacctgcgcttggaacaagagcggacacaatgggctcagtatcgagagagcgctgaaagggagattgctgacttgcgaagacggctgtcagagggccaagaagaggagaatctggaaaacgagatgaaaaaagctcaggaggacgcagagaagttgagatccgtcgttatgccaatggaaaaagaaattgctgccctgaaagacaaacttacagaggcagaagataagattaaagagttggaggcatccaaagtgaaggagctgaaccattatctcgaagcagaaaagtcttgtaggaccgacctggagatgtacgttgccgtgttgaacacgcagaaatccgtgttgcaggaggatgctgaaaagctgcgcaaggagctacacgaggtttgccacctactggaacaagagcgccagcagcacaaccagcttaagcatacatggcagaaagccaatgatcagtttctggagtcacaacggttgctgatgcgtgatatgcagcggatggaaatcgttcttacttccgagcagctgcggcaggtggaggaactgaagaagaaagatcaggaggacgacgaacagcagcggttaaacaaaaggaaggaccataagaaggccgacgtggaagaggaaataaaaattcctgtcgtttgtgctctgactcaggaagaatcctccgcgcagctgtccaacgaggaggaacacctagacagcacaaggggctctgttcactccctggacgcaggactcctcctaccatccggagaccccttttcaaaatccgataacgatatgttcaaggacggtctccgcagagcgcagagtaccgactcattaggaacctcagggagcttacagtcaaaagccctcggatacaactacaaagctaagagtgccggaaatcttgatgaatcagattttgggcctcttgtcggcgcagacagtgtgtcggagaacttcgatacagcctctcttggctctcttcagatgccgagcggcttcatgcttaccaaggaccaggagagggcaattaaagcaatgacccctgaacaggaagagaccgcgagcctgctgtcctcagtgacccaagggatggagagcgcttacgttagcccaagcgggtaccgtttagtgagcgaaactgaatggaacctgttacaaaaagaagtgcacaatgccgggaacaaactgggacgccgctgcgatatgtgctctaactacgaaaaacaactgcaggggatccagatccaagaggctgaaacgagggaccaagttaaaaaactgcaacttatgcttaggcaggccaacgaccagctggaaaagacaatgaaagataagcaggaattagaggattttatcaagcagtcctctgaggattcctcacatcagatctcagccctggtactaagagcccaggcatcagaaatattactggaggaactgcaacaagggctttcccaggcaaaaagggatgtgcaagagcagatggccgttctgatgcagtcccgcgagcaggtgtcggaagagttagttagactgcaaaaggacaacgacagcctgcaggggaagcacagcttgcacgtgagtctgcagcaagccgaagacttcattctgcctgacaccaccgaggctttgagggagttggtcctaaagtaccgggaagacattataaacgttcgaactgctgctgaccacgtggaggagaagctgaaggccgagatactgtttttgaaagagcagatccaagccgagcagtgcctaaaagaaaatttagaggaaactttgcagctggagattgaaaactgcaaggaggagattgccagtatcagcagcctgaaagcagaacttgagcgtattaaagtggaaaaaggtcaggccaccgtggaacaattgatgttcgaagagaaaaataaagcgcaacgcctacagaccgaacttgatgtaagcgaacaggtacaacgtgacttcgtgaagctcagccaaacactgcaggtacagctggaacgaattagacaggctgactccctcgagcgcatccgggccatcctgaacgatacaaagctgacagacattaatcagctacctgagacctag

SEQ ID NO: 131568 - DNA, 2490 bp, synthetic construct
  misc_feature 1..2490: note = Description of Artificial Sequence: Synthetic coding sequence
  source 1..2490: mol_type = other DNA
atggcacagccaggcccggctagtcagccggacgtgagcctgcagcagcgcgttgcagaactggagaagattaatgccgagttcctccgcgctcagcaacagttagagcaagaatttaaccagaagcgggccaagtttaaagagttatatctcgctaaggaggaggatctgaagaggcagaacgccgtgttgcaggccgcgcaggatgatttaggccacttaagaacccagctttgggaagcccaggccgagatggagaacattaaagccattgctactgtgtctgaaaacaccaagcaggaagccatcgatgaggtgaaacggcaatggcgagaagaggtggctagcctccaggccgtcatgaaagagactgtgcgggactatgaacaccagttccatctcagactcgaacaggaaaggacacaatgggcccagtaccgggagtcagcggagagagagatcgcagatctacgccggaggctttcagagggacaagaagaggagaatttagagaacgaaatgaaaaaagcccaggaggatgcagagaaattgcgcagcgtagttatgccaatggagaaggaaatcgcagctctcaaagacaagttaactgaggcagaggacaagattaaagagttagaggcaagcaaggtgaaggagctcaatcactacctagaggctgaaaagagctgcagaacagatctcgaaatgtatgtagcggtacttaatacacagaagtctgtgctacaggaagatgctgagaaactgcggaaagagctccatgaggtctgccacttgctcgagcaggaacgccagcagcacaatcagctcaagcacacatggcagaaagccaatgaccaattcctcgaatctcaacgcctcctgatgcgggacatgcagcgtatggagatcgtgcttacctcagagcagctgcgccaggtggaagaactgaagaaaaaggaccaggaagacgacgaacagcagaggctaaacaaacggaaggaccacaaaaaggcggacgtggaggaggaaataaagatccctgttgtctgcgccctcacccaggaggagtccagcgctcaactctcaaatgaggaggagcacctggacagcacacgcggcagtgtgcatagtctggatgcggggctgttactgccatcaggtgatcctttctctaaaagtgacaacgatatgttcaaggacgggctcaggcgcgcccagtccactgacagcctgggaacatccggcagccttcagtccaaggccctgggatataattataaggccaaatccgcagggaacctcgacgagagtgattttggtccactcgtcggggccgactctgtgagtgagaatttcgacacagccagcttggggtcacttcaaatgccttccggatttatgttgaccaaggatcaggagcgcgcaatcaaggctatgactcccgagcaggaagaaaccgcgtccctcctgtcctcagtgacccaaggcatggagtcagcctatgttagccccagtgggtaccggctggtttcagagactgagtggaatctgctgcagaaagaggtgcataacgccggcaataagctcgggcggcgatgtgatatgtgctccaactacgaaaagcagttacagggtatacagattcaggaagcagagactcgcgaccaggttaaaaaacttcagctcatgctgagacaagccaacgaccagcttgagaaaaccatgaaggataagcaagaactggaggattttattaagcagagtagcgaggactcttcacatcagatttccgcattggtgctaagggctcaggcctccgagatcctcctggaggagctgcagcagggcctctcacaggcaaagcgggacgtacaagagcaaatggccgtgttgatgcagagcagggaacaagtgagtgaggagctcgtgaggctccaaaaagataatgactccctccaaggaaagcatagtctgcacgtttccctacagcaagcggaggacttcatactgccagatactacagaggcgctcagagagttggtgttgaagtaccgcgaagatattattaatgtgagaaccgccgccgaccacgtcgaagagaaactgaaagctgagatcttgttcctgaaagagcagatacaggcggaacagtgcctaaaagaaaacttagaagagactctgcaactcgagatcgaaaactgcaaggaagagattgcttcaatctcctcccttaaggcagagctggagcggatcaaagtggaaaaaggacaagctactgtggaacagctcatgtttgaggagaaaaataaggcgcagcggctgcagaccgaactggacgtgagcgaacaagtccagcgcgacttcgtcaaactaagccagacccttcaagttcagctggaacgcattcgccaggccgactcactggaacgtattagagctatcctgaacgatacaaagctcacggacatcaatcaactgccggaaacctag

SEQ ID NO: 131569 - DNA, 2460 bp, synthetic construct
  misc_feature 1..2460: note = Description of Artificial Sequence: Synthetic coding sequence
  source 1..2460: mol_type = other DNA
atggcccaacccggccccgctagccaaccagatgaggatttaaaacgccagaacgcggtcctccaagccgcccaagacgacctgggtcacctgagaacccagttatgggaagctcaggccgagatggagaacatcaaggccattgctactgtatctgagaatactaagcaagaagccatagatgaagtgaagcgtcagtggcgtgaggaggtggcgagcctccaggcagtgatgaaagaaaccgtacgcgattacgagcatcagtttcacctgcgcctagagcaggaacgcacacaatgggcccaatatcgcgaatcagcggagagagagattgccgacctgcgaagaaggctgtcagaaggccaggaggaggagaatctggaaaacgaaatgaagaaggcgcaggaagatgccgagaaattaaggagtgtggtcatgcccatggagaaggaaatcgccgcactgaaggataagctgaccgaggctgaggacaagatcaaagagctggaggcctccaaggtcaaagagctgaaccactacctggaagccgagaaatcatgccgtacggatctggagatgtacgtggcagtcctcaacacacaaaaatcagtgctccaggaggatgccgaaaagttgcgcaaagaattacacgaggtctgccacttgcttgaacaggagcgccagcagcacaatcagttaaagcatacttggcagaaggcaaatgaccaatttctggagtctcagaggttactaatgagggacatgcagcgtatggaaattgtgctgacctcagagcagttgagacaggtcgaggagttaaagaaaaaagatcaggaggatgatgaacaacagcgcctaaacaaacggaaagatcataagaaggccgacgtcgaggaagaaataaaaatacctgtggtgtgtgccctgactcaagaggagtcttccgctcagctgagcaatgaggaggagcatttggattccacacgaggttctgtccactccctggatgcagggctccttcttccgagcggggatcccttttcgaaatctgacaatgacatgttcaaggacggactgagacgcgctcaaagcacagactccctgggcacatccggatctctgcagagcaaggctctcggctacaactacaaagcaaaaagcgctggtaatcttgatgagagcgactttggcccacttgtgggcgccgattcagtatccgagaattttgatacggcttctttaggctcgcttcagatgccaagcggatttatgctcaccaaagatcaggagcgggcaattaaggcaatgacacctgagcaggaggaaaccgccagtctgttgagttcagttacccagggaatggaatccgcctacgtgtcccccagcggttaccggctcgtgtccgagacggagtggaatctcttgcagaaggaggtccacaatgccggcaacaaacttggacgccgctgtgacatgtgttctaattacgagaaacagttgcagggtatccagatccaggaggctgaaacccgggaccaagtaaaaaaattgcaactgatgctgcggcaagccaacgaccagctcgagaagaccatgaaagataagcaagaactggaagacttcatcaagcagagctcggaagattcctcccaccagatatccgccttagtgttgagagcacaggcaagcgaaatactgctcgaggagctgcagcaaggcttgtctcaggccaaacgagatgttcaggaacaaatggctgttctgatgcagagccgggagcaggtgtcggaggagctcgtgaggctacagaaagataacgattccttgcagggaaagcattccctgcacgtgtcacttcaacaagcggaggacttcatcctcccagataccaccgaggctttgagggagctggtgctgaagtatcgcgaagatataattaatgtacggacagccgccgaccatgtcgaagaaaagttgaaagccgagatcctttttctgaaagaacaaattcaagccgagcagtgcctcaaggagaatcttgaagagacgttgcagcttgaaatcgaaaactgtaaggaagaaattgcatctatctctagcctgaaagccgaactggagcgcataaaagttgaaaaggggcaactcgaaagcaccctgagggaaaagtcccagcagctggaatccctgcaggagataaaaataagcctggaagaacagctcaagaaagagacggccgctaaggctaccgtggagcagcttatgttcgaagaaaaaaataaagctcaaagattgcagactgagctcgatgtgagcgaacaggttcaacgggattttgtaaaactgtctcagaccctgcaggtgcagctggaacgaatcaggcaagcggattcactagagcggatccgagcaattctgaatgatactaaattgaccgatattaatcagctgcccgagacttag

SEQ ID NO: 131570 - DNA, 2151 bp, synthetic construct
  misc_feature 1..2151: note = Description of Artificial Sequence: Synthetic coding sequence
  source 1..2151: mol_type = other DNA
atggcacagccgggtcctgcctcacaaccggatgtttccctgcaacagcgcgtagcagagctggagaaaataaacgccgaattcctaagagcacagcagcagctagaacaggagttcaaccagaagcgggctaagttcaaggaactataccttgcaaaggaagaggacttgaaacgtcagaacgctgtgctgcaggcggcacaggatgacctgggccacttaagaacacagctgtgggaagcgcaggctgagatggagaatattaaagctatagctacggtctctgaaaatactaaacaagaagcaatcgatgaagtaaaacgccagtggcgcgaggaagtggccagtcttcaggctgttatgaaggaaacagtgcgcgactacgagcaccagtttcacttgcggctggagcaggagcgaactcagtgggcgcagtacagggaatccgccgaacgggagatcgcagatctgagaaggaggctgagcgaaggccaagaggaagaaaacctggagaatgaaatgaaaaaggcccaagaggacgccgaaaaacttagaagtgtggtcatgccaatggaaaaggaaattgcggcgctcaaggataagcttaccgaggccgaggacaagattaaggagctggaggcctccaaggtgaaagaactgaaccattatctggaagctgagaagtcgtgccgcacagacctggagatgtacgtggccgtgctgaatactcagaaatctgttctccaggaggacgcagagaagctcaggaaagagctgcatcaggaacggcagcagcacaatcagctcaaacatacatggcagaaagctaatgatcagtttctggaaagccagcgtttgctaatgcgggatatgcagagaatggaaattgtgctgacatccgagcagctccgccaggtcgaagagctcaaaaaaaaggatcaggaagatgacgagcagcagcggttgaataaacgcaaagatcataaaaaagccgatgtggaggaggaaattaagatccccgtggtctgcgcgctaacacaggaggaatccagcgcccagctgagcaatgaagaggagcacctcgatagcacccgcggtagtgttcactccctcgatgccggacttttgttgcctagcggcgacccctttagcaagtcagataacgatatgtttaaagatggactgcgccgagcccagtcaacagattccctgggtacaagcgggagcttgcaaagcaaggcactggggtacaattataaagccaaaagcgccggaaatttggacgaatcggattttggcccgctcgttggggccgatagcgtttccgaaaactttgacactgcctccctgggatcactgcagatgccttctgggttcatgttgactaaggatcaggaacgggctattaaggccatgacccctgaacaagaggaaaccgcaagcctcctcagctccgtaacccaaggtatggagagcgcctatgtttccccgagtggctacaggctggttagtgagacagagtggaatctcctgcagaaggaagtgcacaacgccgggaacaaactgggccgcaggtgcgacatgtgcagtaactatgaaaagcagctgcagggaatccagatacaggaagccgagactagagatcaggtaaaaaaacttcagctcatgctgagacaggccaacgaccagttagaaaaaacaatgaaggacaagcaagaactggaagatttcattaaacagagctctgaagattcttctcaccagatctccgcattggtgcttagagctcaggcatcagaaattctgctggaggagctgcagcaaggcctgtcacaggccaagcgagatgtgcaagaacaaatggcggtgttgatgcagtcccgcgaacaggtaagtgaggagctcgtgcgcctgcagaaggacaatgactctctgcagggtaaacactcgcttcacgtgtcacttcagcaggccgaagattttatcctccccgataccacagaggctcttagggagctagtgctgaagtaccgggaggatatcattaatgtacgcacagccgcagaccacgtcgaagaaaaactcaaagctgaaatattgttcttgaaggagcagatccaagccgagcagtgtctgaagaagaagaaatag

SEQ ID NO: 131571 - DNA, 2589 bp, synthetic construct
  misc_feature 1..2589: note = Description of Artificial Sequence: Synthetic coding sequence
  source 1..2589: mol_type = other DNA
atggctcagcctggccctgcaagccaaccagacgtctccctccagcaaagagtggcagaactagagaaaatcaatgctgagttcttgcgggcgcagcaacaactagagcaggagtttaatcagaaaagggctaaattcaaagagctgtatctggcaaaggaggaggatctcaaacgacagaacgccgtgcttcaggccgcccaggacgatttagggcatcttcgtactcagctttgggaggcacaagccgagatggagaatattaaagcgatcgccacggtctcagagaacacgaagcaggaagccattgacgaggtgaagcgccaatggcgagaagaagtagccagtctgcaggctgtgatgaaggagacagtacgggactacgagcatcagttccacttgcggcttgaacaggagagaacgcagtgggcacagtacagagaatctgccgagagggaaatcgcagatctgagaagacggctcagcgagggccaggaggaagagaacttagaaaatgaaatgaagaaggcccaggaggatgccgagaagttaagaagtgtcgttatgccgatggagaaggagatcgctgccctgaaggataagctcacagaggcggaagacaaaatcaaggagctagaagctagcaaagtcaaagagctgaaccattacctggaggctgaaaaatcttgccgcaccgacttggagatgtatgtcgcagtgcttaatacccaaaaaagcgtgcttcaggaagacgccgagaagcttagaaaagaattacacgaggtttgtcacttgctggagcaagaaaggcaacaacacaatcagctcaaacatacatggcagaaggccaacgaccagtttctcgagtcccagaggttgctcatgagagacatgcaacggatggagatcgtcctgacttctgaacagctgcgccaagtggaggaattgaaaaaaaaagatcaggaggacgatgaacagcagcgcctgaataagagaaaggatcataagaaagcagacgtcgaggaggagataaagatccctgttgtctgcgctcttacgcaggaagaatcttcagctcaactaagtaacgaggaggagcatctggattcaactagaggatctgtgcactctcttgacgccggcttgctcctgcccagcggagatccgttttctaagagtgacaatgatatgttcaaggacggcctgagacgagcgcagagtacagatagtcttggcacgagtggcagcttgcagagcaaggcactcggctataactacaaagcgaagtcagcaggtaacctcgatgaatccgatttcggacccctggttggcgcagactccgtgtccgagaactttgatacggcctctttgggcagcctccaaatgccttcaggttttatgctgactaaggaccaggaacgggccattaaagccatgactcctgagcaggaagagaccgcaagccttttgtcctctgtaacccagggaatggaaagtgcatacgtcagcccgtcaggatataggcttgtctccgagaccgaatggaaccttctgcagaaggaagtgcacaatgcaggtaacaagttgggacgacgctgtgatatgtgctccaactacgaaaagcagcttcaagggatccagattcaggaagctgaaacgagagaccaggtgaagaaacttcagttgatgctccgccaagccaacgaccagttggaaaagacaatgaaggataagcaggagttggaggattttattaagcagagcagcgaagattcctcccaccagatttccgctcttgttcttcgcgcccaagcttccgaaattctgctagaagagctccagcaagggctgagtcaggcgaagagagatgtgcaggaacagatggctgtgctgatgcaaagcagggagcaagtttccgaggaactggtccggcttcagaaggataacgattcactacaaggtaagcacagcctgcatgtcagtctccagcaggccgaagattttatcttgcctgacaccaccgaggctctgcgcgaactcgtgttgaagtatcgtgaggacatcattaatgtccgaactgccgccgatcacgtcgaagagaagctcaaagctgagatactgtttctgaaggaacagatccaggcggagcagtgtctcaaagaaaacctggaggaaacacttcaactggaaattgaaaactgtaaagaagagatcgcctccatttctagcttaaaagccgaactcgagaggataaaagttgagaaagggcagctggagagcaccttaagggagaagtctcagcaattggaatctctgcaggagattaagatttcgctagaagagcagcttaaaaaggagacagccgcaaaagccaccgtggagcagctgatgtttgaggaaaaaaacaaagcgcaacggctacagactgaactcgacgtatccgagcaagtgcagagggacttcgtgaaactttcacagactcttcaagtgcagctggaacgtattcggcaggccgactcactcgaacggattcgcgcaatcctcaatgacacaaagttgaccgatatcaaccagctgcccgaaacatag

SEQ ID NO: 131572 - DNA, 1602 bp, synthetic construct
  misc_feature 1..1602: note = Description of Artificial Sequence: Synthetic coding sequence
  source 1..1602: mol_type = other DNA
atggccgccgcggcccctgtggcagccgatgatgacgagcgccggcggcggccaggagccgccctggaagactccagaagccaggaaggggctaatggagaggcagagtccggagagttgtctcgtctgagggccgaacttgcaggcgctcttgccgaaatggaaacaatgaaagcagtcgcagaagtgtctgagagcactaaggccgaggccgtggccgctgtgcagcgacagtgccaggaagaggttgccagtctgcaagccatcctgaaggactcgatcagctcttatgaagctcagatcaccgccttaaagcaggagcgccaacagcagcagcaggactgtgaagagaaggagcgggaactaggtagactaaagcagctcctctcacgcgcatatccacttgattctctcgaaaaacagatggagaaggcacacgaggactctgagaaattacgcgagatcgtgttacctatggagaaagagatcgaggagctgaaggcaaaacttctcagagctgaggaattgatccaggagatacagcgccggccccgtcacgctccttccctacacggtagcacggaactcttgcccttgagtagggacccaagtccccctcttgaacccctcgaggagctcagtggcgatgggggacccgccgccgaggcatttgcacacaattgcgatgacagcgccagcattagcagtttttctcttggcggtggtgtgggttcctcctcctccttgccgcagagcaggcaaggcctgtcccctgagcaggaggagactgcttccctagtgtcaacaggtacactagtgcctgaaggaatctatctgcctcctccaggctaccagctggtgccagacacccaatgggagcagttgcagaccgagatgcaggtcctattagcgcaggtccagaacagtgagcaactcctgagaaccctgcagggcacagtgtcacaggcccaggaaagggttcaacttcagatggccgagctagtgacaacccataagtgccttcatcacgaggtgaagcgacttaatgaagagaaccaaggcctccgcgcggaacaacttccaagctctgctccccagggctcgcagcaggagcaaggcgaggaggaatctctcccgagtagcgtccctgaactgcagcagctgttatgttgtaccaggcaggaagcaagggctcgcctacaagctcaggagcacggtgctgaaagattacggatcgagatcgtgactttacgcgaggctctcgaagaggaaacagtagctcgggcctctctggagggacagctccgcgtgcagagagaggaaacagcgtcgctatgttcactaagaacagagatggagagagtccagcaggaacagagtaaggctcagctgcctgatctgctttcagagcaacgcgccaaggtgttgcgcctgcaagccgaactcgaaacgagcgagcaggtccagcgtgattttgtccggctgagccaagcactccaggtccgtctggagagaattcgtcaggccgaaacactggagcaggttcggtctattatggatgaggcgccactgaccgatgtgagggatattaaagacacatag

SEQ ID NO: 131573 - DNA, 1710 bp, synthetic construct
  misc_feature 1..1710: note = Description of Artificial Sequence: Synthetic coding sequence
  source 1..1710: mol_type = other DNA
atggcagccgccgcacctgtggctgcggacgacgacgagcggaggcgtaggcccggcgccgccctggaagactctcgcagtcaggaaggcgctaacggggaggccgaatcaggagagctgtcacgcctgcgtgctgaactggcgggagcactggccgaaatggagactatgaaggccgtcgcagaagtctcggaatccacaaaagccgaagccgtcgccgcagtgcagcggcagtgtcaagaagaggtggcctcactccaggccattctcaaggactcgatcagctcctatgaggcccagattactgctctgaagcaggagaggcaacagcagcagcaggattgcgaggagaaggagcgggaattaggtcggctgaagcagctgctgtcacgggcctatccactagactccctggagaagcaaatggagaaagcccacgaggactccgaaaagctccgcgagatagtattgccaatggaaaaggaaattgaggaactgaaggctaagctcctgagagccgaagagctgattcaagagatccagaggcggccaaggcatgctccctcgctgcacgggagtacagagctgctacccctttcaagggacccctctccacccctggagccgttagaagagctctctggagacggcgggcccgccgctgaagcgtttgcccacaactgcgacgatagcgcatccattagttccttctccctgggcggaggagtggggagctcctctagtctgccccaatcccggcaaggcctctcccccgagcaggaggaaacagcttccctagtctccaccgggaccctcgtgccggaaggaatatatctcccgccaccaggttaccagctggtcccagacacccagtgggaacagctgcagacagaggggaggcagctgcagaaggatctggagagcgtgtcccgagagagagatgaactgcaggaggggctcaggcgttctaacgaggactgcgccaaacagatgcaggtgctcttagcccaggtgcagaatagcgaacagctcctgcgtaccttacagggaacagtatcacaggcccaggaaagggtgcagctgcagatggctgagctggttacaacccataagtgtctgcatcatgaggttaaaaggttgaatgaggaaaaccaggggcttcgggctgagcaactcccgagcagtgcccctcagggttcacagcaggagcaaggcgaggaggagtccttgccaagttccgtaccagaactgcagcagctgctctgctgcacccgtcaggaagcccgcgcacgcttgcaggcgcaagagcatggcgccgagagactgagaatcgaaatcgtgacactgcgcgaggctctggaagaagagacagtcgccagagctagtctcgagggacaactccgagtccaacgagaggagactgaagtgctcgaggcctccctctgctctctcaggacggagatggagcgcgtgcagcaggagcagagcaaggctcagctccccgatctgttgtctgagcagagggcgaaagttctccgactgcaagcagaactggagactagtgagcaggtccagagagattttgtccgcttatcacaggccctgcaggtgagactcgagcgtatccgtcaggccgaaactctggagcaagtgcggagcattatggatgaagctcctctgaccgacgttagagatatcaaggacacatag

SEQ ID NO: 131574 - DNA, 1497 bp, synthetic construct
  misc_feature 1..1497: note = Description of Artificial Sequence: Synthetic coding sequence
  source 1..1497: mol_type = other DNA
atggccgcagcagcccccgtggcggctgacgacgatgagagacgccgccggccgggggccgactccatcagcagctatgaggcccaaatcaccgcgttgaaacaggaaaggcaacaacagcagcaggattgtgaagagaaggagagagagctggggcggctgaagcagctgttgtcccgggcttatcctctggattcgctggaaaagcagatggaaaaagcccatgaagactcggagaagctgcgagaaattgtactaccaatggaaaaggaaattgaagagcttaaggccaagctcctccgcgcagaggagctgattcaggagattcagcggaggccaagacacgctccatctttacatggatccactgagctcctgccactatctcgggatccttccccccctctggagccgcttgaagaactatctggtgatggaggacccgctgccgaagcctttgcccataactgcgatgacagtgccagcatctcctcatttagcctgggaggcggagtcggcagctcatcctctctgccccaatcgaggcaggggctgtcgccagagcaggaggaaacagcctcactggtttcaaccggtacactggtccctgaaggtatatacctgcctcctccgggctatcagctcgtgcccgatactcagtgggagcagcttcagacagagggtcgccagctgcaaaaggatctagaatctgtgagtcgagaaagggacgagttgcaggaagggctgcggcggtcaaatgaagactgcgctaagcaaatgcaggtgctcttggctcaggtccagaattctgagcagctcttaaggaccctgcaaggtacagtttcacaggcccaggagcgagtacagctgcaaatggctgagttggtgaccacccataaatgtctacatcacgaggtcaaacgtttgaacgaggagaaccaaggtctgcgcgccgagcagctaccaagctcagcacctcaaggatcacagcaggagcagggggaggaagagtctctgcccagtagcgtgcccgaactgcagcagctgttgtgctgtacccgccaagaagctagggccagactgcaggcgcaggagcacggggcagaacgactgcgcattgagattgttactctgagagaggcattggaggaggagacggtggcgcgcgcctcactggaaggacagttaagagtgcagcgcgaggaaaccgaggtattggaagcttccctgtgtagcctccgaacagagatggagcgggtccaacaggagcagagtaaagcccagctgcctgatctcctgagcgagcagcgggccaaggtgctgcgcctccaagctgaactggaaacgtccgagcaggtgcagcgcgacttcgtgcgcctgagccaagccctgcaggtacgtttggaaagaatcagacaggccgagaccctggagcaggtcagaagcatcatggacgaagcccctcttactgatgtcagagatatcaaagatacttag

SEQ ID NO: 131575 - DNA, 2085 bp, synthetic construct
  misc_feature 1..2085: note = Description of Artificial Sequence: Synthetic coding sequence
  source 1..2085: mol_type = other DNA
atgactgatacggttttcagcaatagctccaaccggtggatgtacccaagtgaccggcctctgcagtccaatgacaaggaacagttgcaagctggttggagcgtgcacccaggaggacaacccgaccgacagcggaaacaggaggaactgacagacgaagagaaagaaatcatcaaccgtgtcatagcaagggccgaaaaaatggaagagatggagcaggagcgaatcggccgactggtagatagattggaaaacatgaggaaaaatgtggccggcgacggcgtgaatcggtgcattctgtgtggagagcagctagggatgctcggcagcgcgtgtgtggtctgtgaggattgtaagaaaaacgtatgcaccaaatgcggcgttgaaacaaataaccggctgcatagcgtctggctttgcaaaatttgtatcgagcaacgtgaggtgtggaagagaagtggcgcttggttttttaagggctttcctaagcaggtgctcccccagcccatgccaatcaagaaaacaaaaccgcagcagcctgtgtccgagcctgccgctcccgagcaacctgcccctgagcctaagcatcccgcaagagctcctgcccgtggagacagcgaggatcgacgcgggccaggccagaagacaggccccgatcccgcctctgctcccggaagggggaattacgggccaccagtaagacgggctagtgaggcacgcatgagctctagctcacgggattcagaatcctgggaccactccggtggcgcgggggattctagcaggtcccctgctggattgcgcagagcaaacagtgtgcaggcctcacgccccgcccccggctcagtccagtccccagcccctccccagcctggccaacccgggacaccaggcggcagtcgcccagggcccggccctgcgggcagatttccagaccagaaaccagaagtagccccctcagatcctggcaccacggccccacctcgcgaggagcgcaccggcggtgtgggcgggtaccccgctgtgggcgcacgagaagaccgaatgtcacatccatccgggccatacagccaagccagcgcggccgcccctcagcctgcggcagcccgtcaaccacccccccctgaagaggaagaggaggaggcaaactcctatgacagtgatgaggcaacgacactcggagcccttgaatttagccttctctacgatcaggataactcatcattgcagtgtacaatcatcaaagccaagggcttgaagccaatggattccaatgggctcgctgatccatatgtcaagctgcacttgcttcccggggctagcaaatcaaacaaactccggacgaaaacgttgcgaaataccagaaatccgatttggaacgagaccctggtgtaccatgggataacggacgaagatatgcagcgcaagactctccgaatctccgtgtgtgacgaagacaagtttggccacaatgaatttatcggcgagacgcggtttagcttaaagaaactgaagcctaaccaacgtaagaatttcaatatctgtctagagcgcgtcatcccaatgaagcgcgctggcaccacagggtccgcaagaggtatggccctctacgaagaagagcaggtggaaagagtgggagacatcgaggagagaggaaaaatcctggtcagcttgatgtattcaacacagcagggcggcttaatcgtgggcatcatcaggtgtgtgcaccttgccgctatggacgccaacggttattctgatcctttcgtgaagttgtggctcaagcccgatatggggaagaaggccaaacacaaaacccaaattaaaaaaaagactctgaatcccgaattcaacgaagagttcttctatgacataaaacactccgatctggctaagaaaagccttgacattagtgtctgggattacgatatagggaagagcaatgactatataggcggttgccagctcggtatttcagccaagggtgaaagactgaagcactggtatgaatgtttgaagaataaagacaaaaagattgagagatggcatcagctccagaacgaaaaccatgtcagcagcgactag

SEQ ID NO: 131576 - DNA, 2085 bp, synthetic construct
  misc_feature 1..2085: note = Description of Artificial Sequence: Synthetic coding sequence
  source 1..2085: mol_type = other DNA
atgacagacaccgtgttctcaaactcaagcaaccgttggatgtacccatccgatcggcctctccagtccaatgacaaggagcagctgcaggccggctggtctgtgcacccaggcgggcagccagatcgccaaaggaagcaggaggagttgaccgatgaggagaaggagattatcaaccgagtcatcgcacgggccgaaaagatggaggaaatggagcaggagagaattggcaggctggtagacagactcgagaatatgcgcaaaaacgtggcgggcgacggagtgaataggtgcatactgtgtggggagcaactcggcatgctcggctcagcgtgcgttgtgtgcgaggactgcaaaaaaaacgtttgcacgaaatgcggtgtagaaactaataataggctgcactcagtgtggctttgcaagatctgtatcgaacagcgagaagtgtggaaacgatccggggcttggttctttaaggggttcccgaagcaggtattgccacagcccatgcctattaagaagactaagccacagcagcccgtgtcagagcctgctgcccctgagcagcccgcgcccgaacccaagcatcccgcacgcgctcctgcccggggtgactcggaggaccgacgaggcccgggccaaaaaacaggacctgacccagcctcagctcctgggaggggtaactatggcccgcccgtgaggcgggcttcagaggctagaatgtctagcagctcccgggattccgaaagctgggatcactccggaggagccggagattcgtcgcgttcaccagccggcctgaggcgcgcgaattctgtccaggcaagtagacccgcaccaggatccgtgcaatctccagctcctccacaaccgggacagccggggacccctgggggatcgaggcccggacccggccctgctggcagattccctgaccagaaaccagaggttgccccttctgatcctggaaccactgctcctccgcgcgaagagcggaccggtggcgttggtggctaccccgctgtcggggcaagggaggatcgaatgtctcacccttccggaccatatagccaggcctccgctgcagctcctcagcccgccgccgcccgccaaccgcctcctcccgaagaagaagaggaggaggccaactcttacgacagcgacgaagcaactaccttgggtgccctcgagttctcacttttgtacgatcaggataactcctcacttcagtgcactatcatcaaggcgaagggtctaaagccgatggactcaaacggattggctgatccatatgtaaaactacacctgctcccaggagcctcaaagagtaataagttgaggaccaagactttgagaaacacccggaatccaatctggaatgaaaccttggtttaccacggaatcacagacgaggatatgcagcgaaagaccctgcgaatctccgtgtgcgacgaggacaagtttggccataatgaattcattggggagacaagatttagcctgaaaaaattaaagccgaatcagaggaagaactttaatatttgcctggagcgtgtgataccgatgaaacgggccggcaccaccggatctgcccggggcatggcactgtatgaggaagagcaggtagagagggtcggagacattgaagagcgtgggaagattcttgtgtctctgatgtacagtacacaacagggaggcctgatagtggggattatacgctgtgttcatcttgcagcaatggatgcaaacggttattcagaccccttcgtaaagctgtggctgaaacccgacatgggaaagaaggctaaacacaagacgcagattaaaaagaagacccttaatccggaattcaatgaagagtttttttatgatatcaagcactctgaccttgctaagaagtcactggatatctccgtctgggactacgatatcggtaaaagcaacgattacattggcggctgccagctggggatttccgccaaaggcgaaagactcaaacactggtacgagtgcttgaagaataaggacaagaaaatagaacgctggcatcagctgcagaatgagaaccatgtgtcttccgattag

SEQ ID NO: 131577 - DNA, 2085 bp, synthetic construct
  misc_feature 1..2085: note = Description of Artificial Sequence: Synthetic coding sequence
  source 1..2085: mol_type = other DNA
atgaccgatacggtcttctccaatagctcgaataggtggatgtacccctcagaccggcccctgcagagcaatgacaaggaacaattgcaagccggatggagcgttcaccctggagggcagcccgatcggcagagaaaacaagaggaactcacagatgaagaaaaggaaattataaaccgggtgattgcacgggccgagaagatggaggagatggaacaggaacgtattggacgcttggtggacagattagaaaatatgaggaaaaacgtggccggagacggagttaaccggtgtatactctgcggggaacagctgggcatgctggggagcgcttgcgtggtatgcgaagattgcaagaaaaacgtttgtaccaaatgcggcgttgagactaacaacaggctccactccgtctggctgtgcaaaatatgcattgaacaaagagaggtgtggaaaaggtccggagcctggttcttcaaggggttccctaagcaggtgctgccccagccaatgcctattaagaaaacaaagcctcagcagcctgtgtccgagcccgccgcccccgaacagccagctccagagcccaaacaccccgcacgcgcccctgcccgtggagattctgaggatcgtcggggccccggacagaaaacaggacctgacccagccagtgcgcctgggaggggaaactacggaccgcccgttcggagggcatcagaggccaggatgtcttcctcaagtagggattcggaatcatgggaccattcaggaggggcgggggacagcagtcgatctccagccggcctgcgacgcgcgaattcagtgcaggcctcccgccccgcgcccggctccgtgcaatcgcccgcccccccccagcctggacagccaggaactcccggcggctcccgccctggccctgggccagctggtagattccctgaccaaaagcctgaggtggctccctccgatccgggaactacagcccccccgagagaggaacggaccggaggtgtcggaggctaccctgctgtgggggcaagagaagaccgaatgtcacaccccagcggcccatactcccaggcctcggctgcagcacctcagccagccgctgcaaggcagccccctccccctgaggaggaagaagaagaagccaattcctatgacagtgacgaggcaaccactctcggagcattagaattctccctgctgtacgatcaggacaactcctcactgcaatgcactatcatcaaagctaaggggctgaaaccaatggactcgaacggcctcgccgacccttacgtgaagctccacctgctgcccggagcctctaaatccaacaaactgagaacaaaaacccttagaaatacgcgaaacccaatctggaacgaaaccctcgtgtaccacgggattaccgatgaagacatgcaaaggaagacgctgaggatatctgtttgtgacgaagataagttcggacacaatgaatttattggagaaacacgtttcagcctcaaaaagctgaagccaaaccagagaaagaacttcaatatctgcctcgagcgggtgataccgatgaagcgagctgggacgacaggtagtgcccggggcatggcgctgtacgaagaggagcaagtcgagagagtgggagacattgaggaacggggcaagatcctggtctccctcatgtatagtacccagcaaggtggcctaatcgtgggtatcatcaggtgcgtgcatctggcagccatggatgccaacggctactctgaccctttcgtgaaactttggctcaagcccgatatggggaagaaagcaaaacataagactcagattaagaagaaaacactcaacccggagtttaacgaggaatttttttatgacattaagcattccgacctggcgaagaagagcctggacatctccgtgtgggactacgacattgggaagagtaacgactacattgggggctgccaactggggatttccgcaaaaggggagcgactgaaacactggtacgagtgccttaaaaacaaggacaagaaaatcgagaggtggcaccagctccaaaatgagaatcatgtgagcagcgactag

SEQ ID NO: 131578 - DNA, 1938 bp, synthetic construct
  misc_feature 1..1938: note = Description of Artificial Sequence: Synthetic coding sequence
  source 1..1938: mol_type = other DNA
atgactgataccgtgttcagtaattcctccaataggtggatgtaccccagcgataggcccctacagagtaagctaaaggaccggaggttagtggatcgtcttgaaaatatgaggaagaacgttgcaggagatggcgtgaaccgttgcatcctgtgtggtgagcagctcgggatgttggggtcagcttgcgtggtttgcgaagattgtaagaaaaatgtgtgtacaaagtgtggtgtggagaccaataataggctgcactcagtttggctctgtaaaatctgtatcgaacagcgggaagtctggaaaagatctggtgcctggtttttcaaggggtttccaaaacaggtcctgccccagccgatgcccatcaaaaagaccaagccacagcaaccagtgtcagaaccagcggctcccgagcagcctgcaccagagcccaagcatccggcccgagctcccgctagaggggattctgaagatcggaggggtcccgggcagaaaacaggtcccgaccctgcctcagcccctggacgcgggaactatggccccccagtgagacgcgcatccgaagctaggatgtcatcctctagcagggacagcgaatcttgggaccacagcgggggggccggagattcgtcgcgcagtcctgccggattaagaagagcaaactccgttcaggcctccagacccgctccaggttctgtccagtcacccgccccaccccagcccggccagccaggcacaccagggggcagccgcccgggacccgggcccgcgggaaggttcccagatcaaaaacccgaggttgccccgtccgaccccggcaccaccgctcctccaagggaggaacggacaggaggcgtcgggggataccccgccgtcggcgcccgggaggacagaatgagccatccatccggcccatattcccaagccagcgctgctgctccccagccagccgcagctcggcagcctcctccccccgaggaggaagaagaggaggcgaactcatacgacagtgatgaagcaaccaccctgggagctctggagttctctttgctctatgaccaagacaactcctctttgcagtgtactattatcaaagctaagggactcaaaccaatggactccaacgggcttgccgatccctacgtgaagttgcacctactccctggcgcatcaaagtccaacaaactgagaaccaaaactttgagaaacactagaaatccgatttggaacgaaaccctagtgtaccacgggattacagatgaggacatgcaaagaaagaccttaagaataagtgtgtgcgatgaggacaagtttggacacaacgagtttatcggtgagaccaggttttctctgaagaaactgaagccaaatcaacgtaagaactttaacatttgcctggagcgggtcatacctatgaagcgggcaggtacgactggcagcgcccgggggatggcgctgtatgaggaagaacaggtggaaagggtgggggatattgaagagcgcgggaaaatcctggtgtctttaatgtattcaactcagcagggcggacttattgtcggaattatcagatgcgtccatctagcggctatggacgctaatgggtattcagacccattcgttaaactctggctgaaaccagatatggggaaaaaggcgaagcataagacccaaatcaagaagaaaacgcttaaccccgaattcaacgaggagttcttttatgacataaagcactctgatttggcgaagaaaagtctggatatatccgtatgggactacgacatcggcaagtccaatgattacatcggcggctgtcagctgggcatttctgcaaaaggcgaacggctcaagcattggtacgagtgtctgaagaacaaggataagaaaatcgagagatggcatcagctgcagaatgaaaaccacgtttcttctgactag

SEQ ID NO: 131579 - DNA, 2085 bp, synthetic construct
  misc_feature 1..2085: note = Description of Artificial Sequence: Synthetic coding sequence
  source 1..2085: mol_type = other DNA
atgacggataccgtgttcagcaacagcagcaatcgctggatgtacccatcggaccggccgctacagtcaaatgataaagaacagctgcaggcggggtggtcggtacaccccggaggccagccggatcgccaacgcaagcaggaggagctgaccgacgaggagaaggaaataattaaccgtgtgatcgcaagggccgaaaaaatggaggagatggagcaggagcggattgggcggcttgtggaccgccttgagaacatgcgtaagaacgtggccggtgatggagtgaatcggtgcatcctatgcggcgagcagctgggcatgcttggatccgcctgcgtggtttgcgaggattgcaaaaagaacgtgtgtacgaagtgtggagtggagactaataataggctgcattctgtttggctgtgcaagatctgcatcgaacagcgcgaagtatggaagcgatcgggcgcttggttctttaagggttttcccaagcaagtactcccgcagccaatgcccattaagaaaaccaagccgcaacagccagtgtccgaacctgctgccccagagcagcctgccccagagccaaagcacccagccagagcacccgcacgcggagacagtgaggataggaggggtcccggacagaagaccggacctgaccccgcctcagccccaggcaggggcaactatggcccccctgttagaagggcatcggaggccagaatgtccagtagttctagagatagcgaatcctgggaccattccggtggggccggagacagttcaagaagtcccgcaggcctgaggagggccaacagcgtccaggcatccaggcccgctccaggttccgtgcagtcccctgctcccccacagcccgggcagcctggtacacccggcgggagtagacccggtcctggccccgcagggcggttcccagaccagaagccagaggtagcccccagcgatcctggcaccacagctcccccgcgggaggaaagaacaggcggagtcggaggataccctgcggtgggtgctcgggaggacagaatgagccatccctccggcccctacagccaagccagcgcagctgcaccccagccagcagccgctcggcagccgcccccccccgaggaagaggaagaggaggccaatagctatgactcagacgaagctaccacactgggcgccctcgagttttcactgttgtatgaccaggacaactcctccttgcagtgcacaatcatcaaggcaaagggcttgaagccaatggacagcaacggactggctgatccttacgttaagttgcaccttcttcctggcgcctctaagtctaacaaacttcgtaccaagaccctcagaaataccaggaatcccatttggaatgaaacactggtgtaccacggcattacagatgaggatatgcagcggaaaactctgcggatatccgtgtgtgacgaggataaattcgggcataatgaatttatcggcgagacacgattttcccttaaaaaattaaaaccaaaccagcggaaaaatttcaatatctgcctggagcgcgtgatccctatgaaaagggccgggaccaccggtagtgcgcggggcatggcactatacgaagaggagcaggttgaacgcgtgggcgacattgaagagcggggcaagatcttagtaagcttaatgtacagcacccagcagggaggactgattgtggggataatacggtgtgtgcatctggccgctatggacgctaatggctacagcgatccattcgtcaagctctggctgaaaccagacatgggtaagaaggcaaaacacaagacgcagataaagaaaaagacactgaaccccgagttcaacgaggagtttttctacgacattaagcatagtgatctggccaaaaagagtttggacatttccgtttgggactacgatattggaaagagcaacgactacatcggaggctgtcagttaggcataagcgctaagggtgaacggctaaagcactggtacgaatgccttaagaacaaagacaagaagattgagagatggcaccagctgcaaaatgagaaccatgtcagtagcgactag

SEQ ID NO: 131580 - DNA, 39 bp, synthetic construct
  misc_feature 1..39: note = Description of Artificial Sequence: Synthetic coding sequence
  source 1..39: mol_type = other DNA
atgaccgacaccgtattcagtaattccagtaaccgctag

SEQ ID NO: 131581 - DNA, 252 bp, synthetic construct
  misc_feature 1..252: note = Description of Artificial Sequence: Synthetic coding sequence
  source 1..252: mol_type = other DNA
atgacagataccgtattcagcaacagttcgaataggtggatgtacccttccgaccgcccactgcagagcaatgataaggagcagctccaagcaggttggagtgtccaccccggcgggcagcccgaccggcaaaggaagcaggaagaactgactgatgaagaaaaggaaatcattaatagggtaatcgcccgtgcagagaaaatggaggagatggagcaggagcgaattgggcgtctggtggaccgactgtag

SEQ ID NO: 131582 - DNA, 285 bp, synthetic construct
  misc_feature 1..285: note = Description of Artificial Sequence: Synthetic coding sequence
  source 1..285: mol_type = other DNA
atgaccgatacagtcttttctaatagctccaacaggtggatgtatccctccgaccgacctctgcaatctaatgacaaagagcaacttcaagccggctggtccgtgcaccctggcggccagcctgatcgccaacggaaacaagaggaattaacggacgaagagaaggagataatcaacagggtgatcgctcgcgccgagaagatggaggagatggagcaggaacgtatcggacggctggtggaccggctggagaacatgaggaagaatgtggctggtgacgggtag

SEQ ID NO: 131583 - DNA, 492 bp, synthetic construct
  misc_feature 1..492: note = Description of Artificial Sequence: Synthetic coding sequence
  source 1..492: mol_type = other DNA
atgaccgatacagtgttctccaactcaagtaacaggtggatgtatcctagcgaccggccactgcagagcaatgataaggagcagctgcaagccggttggtcagtccaccccgggggacagcccgacagacagcggaaacaagaagagttgacagatgaagaaaaggagattatcaatcgggtcatcgcccgagccgagaagatggaggagatggagcaagagcgtatcggcaggctcgttgataggttggaaaatatgagaaagaacgtcgcaggcgacggtgtgaaccgttgtatcttatgcggggaacagctcggtatgcttggttccgcctgtgtggtgtgtgaggattgtaagaagaacgtgtgcactaagtgtggcgtggaaaccaataatagactgcactccgtttggttatgtaagatttgtattgaacagcgggaagtgtggaaacgctcaggtgcatggttcttcaaggggttccccaagtag

SEQ ID NO: 131584 - DNA, 384 bp, synthetic construct
  misc_feature 1..384: note = Description of Artificial Sequence: Synthetic coding sequence
  source 1..384: mol_type = other DNA
atgaccgacactgttttctccaactcatccaaccgatggatgtacccctcagatcgcccgcttcagtctaacgacaaggagcagctgcaggctggatggtcagttcaccctggcggtcagcccgacagacagagaaaacaggaggaactcacagacgaggaaaaggaaattatcaatagggtgattgcccgggcggagaaaatggaagagatggagcaggagcggataggcagactggtggaccggctggaaaacatgcgaaaaaacgtagcaggcgatggcgtcaaccgttgcatcctttgtggcgagcagctgggtatgcttggaagtgcctgcgtcgtttgcgaggactgcaaaaagaacgtgtgtaccaagtgcgggtag

SEQ ID NO: 131585 - DNA, 315 bp, synthetic construct
  misc_feature 1..315: note = Description of Artificial Sequence: Synthetic coding sequence
  source 1..315: mol_type = other DNA
atgactgatacagtgttcagtaactcaagtaacagatggatgtaccccagcgacagacctctgcagtccaacgacaaagagcaactgcaggcaggttggtcagtccaccctggagggcagccagaccgacagcgcaaacaggaggagctgaccgacgaggagaaggaaatcatcaaccgggtcatcgcccgggctgaaaaaatggaggagatggagcaggagcgcatcggaaggctggtagaccgtctggagaacatgcgcaagaatgttgcgggggacggcgtcaaccgttgtatactgtgtggcgaacaatag

SEQ ID NO: 131586 - DNA, 120 bp, synthetic construct
  misc_feature 1..120: note = Description of Artificial Sequence: Synthetic coding sequence
  source 1..120: mol_type = other DNA
atgacagacacggtctttagcaattcttccaaccgctggatgtacccctcagatcggcccctgcagtcaaacgataaggagcagctccaagccgggtggtctgtgcaccccggtgggtag

SEQ ID NO: 131587 - DNA, 348 bp, synthetic construct
  misc_feature 1..348: note = Description of Artificial Sequence: Synthetic coding sequence
  source 1..348: mol_type = other DNA
atgaccgacactgtattcagcaattcatccaacaggtggatgtaccccagcgatcggccactgcaatcgaacgacaaagaacagttgcaggcagggtggagcgttcatcctggaggccagcctgataggcagcgtaagcaagaggaactcactgatgaggagaaggagatcatcaatagggtcattgcccgcgccgaaaaaatggaggagatggaacaggagcgcatcggtaggttagtcgaccgcctggaaaacatgaggaaaaacgtggctggggacggggtgaatcggtgtatcctgtgtggcgagcagctgggtatgctgggatctgcatgtgtcgtgtgctag

SEQ ID NO: 131588 - DNA, 2073 bp, synthetic construct
  misc_feature 1..2073: note = Description of Artificial Sequence: Synthetic coding sequence
  source 1..2073: mol_type = other DNA
atgacagacactgtgttctctaacagctctaaccgctggatgtatccttctgatcgcccccttcaatcaaagctgcaggcaggctggagcgtgcacccaggcggtcagcccgacagacagagaaaacaggaagagctgacagacgaagaaaaggaaatcattaaccgcgtcatcgcccgcgcagagaaaatggaagaaatggagcaggaaagaataggcaggctggtggaccggctggagaacatgagaaagaacgtggcaggcgatggggtgaacaggtgtatcctatgcggagagcaactgggcatgctcggcagtgcctgcgtagtatgtgaagattgtaagaaaaatgtgtgcactaagtgcggagtggaaacaaacaaccgactccattccgtctggctgtgtaaaatttgcatcgaacagagagaggtttggaaacgatccggagcctggttttttaagggcttcccaaagcaggtcctcccccagccgatgcccattaagaagactaaaccccagcagcctgtgtcggagcctgccgcgccagagcaacctgctccggagcccaagcatccggccagggcaccggcaagaggggattctgaggatcggcgcgggcccggccagaagactggtcctgaccccgcttctgcaccgggcagaggaaattacggacctcccgtgagaagggcaagtgaagcccggatgtcaagcagctctcgcgattcagagtcatgggaccactccggcggcgcgggcgacagtagccgttctcccgccggcctccggcgcgcaaattctgtgcaggcaagtcgcccagcccctggttctgtgcagtctccagctccgccccagcctggccagccgggtacacctggtggatcacgccccggaccagggcctgctgggcggttcccggaccaaaagccagaagttgcaccatcggaccctggtacaacggctcctccgcgagaggagagaaccggcggggtcggcggttatccggcggttggtgcaagggaggaccggatgagccatccttcagggccttatagccaggcgtccgccgctgccccacagccagccgcggcccgccagcctccccctccagaggaggaagaggaagaggcaaacagttacgactcagacgaggctactaccctgggcgctctcgagttcagcctgctctacgatcaagacaacagctctcttcaatgtactattattaaggcaaagggattaaagccaatggacagtaatgggctggctgacccatacgttaagctgcacttgctgccaggggccagtaagtccaataaacttcgaacaaagaccctgaggaacacacggaatcctatttggaacgagacactggtctatcatggaatcactgatgaagacatgcagcggaaaacattgcggattagcgtttgcgatgaggataagttcggccacaacgagttcatcggtgagacccgcttcagtctgaagaagctgaaacctaaccagaggaaaaattttaacatctgcctcgaaagagttatccccatgaagcgagcagggactaccggttcagcacgcggtatggctttatatgaagaggagcaggtcgaaagggtgggtgacatcgaagagagagggaagattctggtcagtctaatgtatagcacccagcagggtggtctgattgtgggaatcatcaggtgtgtacatttagccgcgatggatgctaacggctattccgatccctttgtcaagctgtggttgaagcccgacatgggaaagaaggctaagcacaagactcagattaagaaaaaaacactcaaccccgaattcaacgaagaatttttttacgacataaagcactcagaccttgccaaaaagagcctggacatctccgtctgggactatgacataggcaaaagcaatgactacattgggggctgccaacttggcatcagcgcgaagggggaacggctgaaacactggtacgagtgcctgaagaacaaggataagaaaattgaacgctggcatcagttacagaatgagaatcatgtgtcatcggattag

SEQ ID NO: 131589 - DNA, 378 bp, synthetic construct
  misc_feature 1..378: note = Description of Artificial Sequence: Synthetic coding sequence
  source 1..378: mol_type = other DNA
atgactgacactgtattcagcaacagcagcaatcggtggatgtaccccagcgatcgtccactgcagtcaaatgataaagagcagttgcaagctggatggtcagtgcaccccggcggacagccggatcgacagcggaaacaagaggagttgacggatgaggaaaaagagatcatcaacagggtgatcgccagggctgagaagatggaggagatggaacaggagaggattggaagattagtagaccggctggaaaatatgcgcaagaacgtcgccggcgatggagtgaataggtgtatcctctgcggtgaacagcttggcatgcttggatcagcctgcgtggtctgtgaggattgcaaaaagaacgtttgcactaaatag

SEQ ID NO: 131590 - DNA, 546 bp, synthetic construct
  misc_feature 1..546: note = Description of Artificial Sequence: Synthetic coding sequence
  source 1..546: mol_type = other DNA
atgacagataccgttttctctaactcttctaacaggtggatgtacccatccgatcggcctctgcagtctaacgataaagagcagctacaggcggggtggtccgtgcatcccgggggccaacctgatcggcagcgaaagcaggaggagcttaccgacgaggagaaggagatcattaatagggtgatagcacgtgccgaaaagatggaggagatggagcaagagaggatcggacggctcgtcgaccgcctggaaaacatgaggaagaacgtcgctggggacggcgttaaccgctgtattctgtgtggcgaacagcttgggatgctggggtccgcttgcgtggtctgcgaagactgtaaaaaaaacgtttgcaccaaatgcggcgtagagactaataatcggctccacagtgtctggttgtgtaagatatgcattgagcaacgggaagtctggaagagatccggtgcctggtttttcaagggttttcccaagcaggtgctcccacagccaatgccaattaaaaagaccaaaccacagcagcctgtgtag

SEQ ID NO: 131591 - DNA, 285 bp, synthetic construct
  misc_feature 1..285: note = Description of Artificial Sequence: Synthetic coding sequence
  source 1..285: mol_type = other DNA
atgaccgatacagtgtttagtaattcctctaatagatggatgtacccgtctgaccggcctctgcagtcaaatgacaaagagcagctgcaggctggctggtcagttcaccccggcggtcagcccgatcggcagaggaaacaagaggagctaaccgatgaagagaaggagattatcaatcgggtgatagccagagccgagaaaatggaggagatggagcaggaacgcataggcaggctcgtggaccgtctagagaatatgagaaagaatgtcgcgggggacggttag

SEQ ID NO: 131592 - DNA, 363 bp, synthetic construct
  misc_feature 1..363: note = Description of Artificial Sequence: Synthetic coding sequence
  source 1..363: mol_type = other DNA
atgacggacactgtattttccaatagcagcaatcgatggatgtatccctcagaccgccccttacagagtaacgacaaagagcaactgcaggccggatggtctgttcatcctggcggccagcccgaccggcagaggaagcaggaagagttgactgatgaggagaaagaaattatcaatagggtgatcgcgcgggccgagaagatggaggaaatggagcaggagcgaattggaagacttgtagacaggctggaaaacatgagaaaaaatgtcgcaggcgatggagtgaatcggtgcattctctgcggagaacagctcggtatgctggggtcagcttgcgtggtgtgcgaggattgcaaaaagtag

SEQ ID NO: 131593 - DNA, 405 bp, synthetic construct
  misc_feature 1..405: note = Description of Artificial Sequence: Synthetic coding sequence
  source 1..405: mol_type = other DNA
atgaccgacacagtattcagtaacagctctaataggtggatgtatccaagtgatcgccccttgcaaagcaatgataaagagcagctgcaggccggttggagtgtccaccctggggggcaacccgatcgccaacgtaagcaggaggaactgactgatgaggagaaagaaattatcaaccgagtgattgcccgcgccgagaaaatggaagaaatggagcaggagcggatcggaagactagtggaccgccttgagaatatgagaaaaaacgttgcaggagatggtgtcaatagatgcattctttgcggagaacagctcgggatgctgggatctgcatgcgtggtgtgtgaggactgcaaaaagaatgtgtgtacaaaatgcggagtcgagaccaataatagactctag

SEQ ID NO: 131594 - DNA, 948 bp, synthetic construct
  misc_feature 1..948: note = Description of Artificial Sequence: Synthetic coding sequence
  source 1..948: mol_type = other DNA
atggcagacaccatctttggcagtggtaacgatcagtgggtgtgtcccaatgatcgtcagctggcgttgcgtgccaaactgcagacgggctggagcgttcatacataccagaccgaaaagcaacggcggaaacaacacctgtctcctgcagaggtagaggcaattttacaggtgatccagcgagccgagagactagacgttctggaacagcagcggataggccgactcgtggagagattggagaccatgcgacgcaatgtcatgggaaacggcctgagtcaatgcttgctgtgtggcgaagtcttagggtttctggggagttcttctgttttttgtaaggattgtaggaagaaggtctgcacaaaatgcggaatcgaggcttctcccggacaaaagcggccactctggctctgcaaaatctgttcagagcagcgagaagtttggaaacgctctggcgcctggttctataaaggattgccaaaatatattctgcctctgaagacgcccggaagagcagacgacccccacttccggcctctgccaacagagcctgctgagagggagccaagaagcagcgaaacttcacgtatctatacttgggcccggggtcgggtggtttcctctgactcagactccgattccgacctctcttcttcttccctggaagacagactgccttctaccggggtgagagatcggaaaggtgacaaaccttggaaagaatccggcggcagtgtcgaggcccctaggatgggattcacccatccacccgggcatctctctggttgccagagtagcctggcctccggtgagaccggtaccgggtctgccgatccccccggcggcccgagaccaggtctcacgagacgcgccccggtgaaggatactcccggcagagccccggctgccgatgccgctccagcagggccaagctcatgcctaggatag

SEQ ID NO: 131595 - DNA, 861 bp, synthetic construct
  misc_feature 1..861: note = Description of Artificial Sequence: Synthetic coding sequence
  source 1..861: mol_type = other DNA
atggcagatacaatttttggatctggtaatgatcagtgggtctgccccaacgacagacagttagctctcagggccaagctgcaaaccggctggagcgtgcacacatatcaaaccgaaaagcagcggcgtaaacaacatctcagtccggctgaggtggaggctatcttgcaggtgatccagagggccgagcggctggacgtgttagagcagcagcgcatcggccgactggttgagcgactcgaaacgatgagacgaaatgtcatgggcaacggcctgtctcagtgtctactgtgtggcgaggtgttggggttccttggctcatcatccgtcttctgcaaggactgtcgcaaggtctggaaacgctcaggcgcctggttttataagggtctgccaaagtatatcttgcccttgaagaccccaggaagagctgatgatcctcatttcagacccctgccgacagagcctgctgagcgcgaaccgaggtcttccgagacatctagaatatatacctgggcccgagggagggtggttagctctgattcagattcggattccgacctctcttcctccagcctcgaggaccgacttccctccacaggagtacgagacaggaaaggtgataaaccttggaaggagagtgggggcagcgtcgaagctccgcgtatgggtttcactcatccccctggtcacctgtcgggttgccaatcatcgcttgcttccggagaaaccggcactggatcggctgacccacccgggggtccacgcccaggcttgactcggcgggctccagttaaggatacaccggggagggcccccgccgcagacgcagcgccagctggcccttcgagttgtttgggctag

SEQ ID NO: 131596 - DNA, 861 bp, synthetic construct
  misc_feature 1..861: note = Description of Artificial Sequence: Synthetic coding sequence
  source 1..861: mol_type = other DNA
atggctgatacaatctttgggtccggaaatgaccagtgggtctgtcctaatgacaggcagcttgcccttagagcgaaactccagaccggttggagcgtgcacacataccagactgaaaagcaacgacgcaaacagcatctctcacctgctgaagtggaagcaatcctgcaggttatccagagagcagaacgtctggacgtacttgagcaacagaggatcgggcgcctcgtcgagagactggaaactatgagacgcaacgtcatgggaaacggcctgtcacagtgtttgctctgtggtgaagtgttgggatttctggggtcctcctcggtgttctgtaaggactgccgtaaggtgtggaaacggtctggtgcatggttctataaaggactgcctaagtacattttgccgctcaagaccccaggcagagctgatgatccacatttcaggcccctacctaccgaacctgctgagcgtgagcctagatcttctgaaaccagcagaatctatacttgggcgcgcggacgggtggtgtccagtgattcagattccgactctgatctgagctccagctccctggaggataggctccctagcactggcgtaagagatcgcaagggcgataaaccctggaaagagtcagggggcagtgtggaggccccccgcatggggtttacccacccaccgggtcaccttagcggctgtcagtctagtttggcctctggtgagaccggtaccgggtcagcagacccacctggggggcctcggcctgggctcaccaggagggcgccggtgaaagatactcccggcagggcaccggctgctgacgccgctcctgctggacccagcagttgccttggttag

SEQ ID NO: 131597 - DNA, 2331 bp, synthetic construct
  misc_feature 1..2331: note = Description of Artificial Sequence: Synthetic coding sequence
  source 1..2331: mol_type = other DNA
atgaatccagaggagcagatcgtcacttggctgatatccctgggtgtgctggagagtccaaagaaaaccatctgtgatcccgaagagtttctgaagagtagcttgaagaatggcgtggtcctctgcaaacttattaaccgcctaatgccaggctccgtggaaaagttctgtctggacccccagacagaagccgactgcatcaataacatcaacgactttctaaaggggtgcgctactctgcaggtggagatttttgaccccgacgatctctatagcggcgtcaatttttccaaggtgctctctactctgctggccgtgaacaaggcaaccgaggaccagctgagcgagcggccgtgtggcagatcctcatccctgtccgccgcgaacacatcccagaccaacccccaaggggccgtgtcttccaccgtgagcggcctgcagcgacagagcaaaaccgtggagatgactgagaacggctctcaccaactcattgtgaaagcccggttcaatttcaagcagacgaacgaggatgaactgtcggtttgcaagggcgacatcatttacgttaccagggtggaggaaggcggttggtgggagggaaccctcaacgggagaactggctggtttccaagcaattatgtgagagaaatcaaaagtagcgagagacctttgagcccgaaggccgtcaagggatttgagacagctcctttaaccaagaactattataccgtagtgttgcagaacattctcgacaccgaaaaggagtacgccaaggagctgcagagcctccttgtgacctacctccgaccattgcagtccaacaacaatttatccaccgtcgaagtgaccagcctgctgggcaattttgaggaggtgtgcacgttccaacagaccctgtgccaggcactggaggagtgtagcaagtttcctgaaaatcaacacaaggtggggggctgcttgctttcactgatgccccactttaagagcatgtacttggcctactgcgccaaccatccaagtgctgtgaatgttctgacacaacacagtgatgaactggagcaattcatggaaaaccaaggagcgtcctcccccggtatcttgatcctgactactaacctctctaaaccatttatgcggctggagaagtatgtcactttactccaggagttggagcgccatatggaagatacgcatcccgaccatcaagatatattgaaagctatcgtagccttcaagaccctaatgggacagtgccaggatcttcggaagcgaaagcagctggagctgcagatcctgtcagagccaattcaggcttgggagggagaggatattaagaatctgggcaatgttatttttatgagtcaggtgatggttcagtacggcgcgtgcgaagaaaaagaggagcgttatctgatgctgttttccaacgtcctgattatgcttagtgcctcacctaggatgagtgggttcatttatcaaggcaagataccaattgctgggactgtcgttactcgactcgatgagatcgagggcaatgattgtacgtttgaaatcaccggcaataccgtggagagaatcgttgtccattgtaacaacaaccaggatttccaggaatggttagagcaactaaataggctgatacgaggcccagcttcttgcagttctctgtcaaaaacatcgtcttctagctgtagtgcgcattctagcttcagctcgactggtcagcctcggggccctctcgagccccctcagataattaagccttggtccctatcttgtctccggcctgccccccccctccggcctagtgctgcactgggatacaaggaacggatgagctacattctgaaagagagtagcaagtcgcctaagactatgaagaagtttctgcacaagagaaagaccgagagaaaaccttccgaggaagaatacgtgattcgcaaaagtacagcagcacttgaagaggacgcccagatcctcaaagtcatcgaggcttattgtaccagcgcaaattttcaacaaggtcacggctcgagtactcgcaaagactcaatccctcaggtgctcctaccagaagaggagaagctgattattgaggaaacccggagcaatggacagaccatcatggaagaaaaaagtctggttgataccgtatatgccttgaaagatgaggtacgtgaacttaaacaggagaataagaggatgaagcaatgtctcgaagaagaactcaagtctcggagggatctcgagaaattagttcgacgacttttgaagcaaaccgacgagtgcataagaggcgagagctccagtaagactagcatcctgccgtag

SEQ ID NO: 131598 - DNA, 1869 bp, synthetic construct
  misc_feature 1..1869: note = Description of Artificial Sequence: Synthetic coding sequence
  source 1..1869: mol_type = other DNA
atgaccgagaatggttctcaccagctcatcgttaaggcaagattcaatttcaaacagactaatgaagatgagttgtctgtatgtaaaggtgacattatttatgtgacaagagtcgaagagggcgggtggtgggaagggaccctgaacggccggactgggtggttcccatcaaactatgttagggagatcaaaagttccgaaagacccctctcccctaaggccgtaaagggatttgagactgcccccctgaccaagaattactacaccgtcgtactgcagaacatcctggacactgaaaaggagtatgcaaaagaactccagtcactgctcgtcacgtacttgaggcctcttcaaagtaataataatctcagcactgtcgaagtcacctcactgcttggcaacttcgaggaagtgtgtacttttcagcaaacgctttgtcaggctctggaagagtgctctaaattccccgagaatcagcacaaggtcggcggttgcctgctatccctgatgccgcactttaaaagtatgtacttggcttactgtgctaatcatccatccgccgtcaatgtgttaacacagcattccgatgagctggaacagttcatggagaatcagggtgcaagctcacctggaattctgatcctgactacaaatctgtccaagccctttatgagactggaaaagtacgtgaccttgctacaggaattagaacggcatatggaggacacccacccggaccatcaggatatcttaaaggccattgtggcattcaaaacactcatgggacagtgccaggacctcagaaagcgaaagcagctggagttgcagattttgtccgagcccattcaggcatgggagggagaagacatcaagaatctgggaaacgtgatcttcatgtcccaggtgatggtgcagtatggtgcctgtgaggaaaaggaggagcgatatcttatgctcttttccaacgtgctgattatgctgtcagcatcgcctaggatgtccggcttcatttatcagggcaagattcctatcgctggtaccgttgtcactagactggatgagatagaggggaacgactgtaccttcgagatcacaggcaatacagttgagcgcattgtggtgcattgcaacaataatcaggacttccaggaatggctcgagcagctcaacaggcttattcgaggcccggcttcatgctcttccctgtctaagaccagttctagctcatgcagcgcccacagcagcttttccagcacggggcagccacgaggtcccctggagcccccccagataattaaaccctggtcattgtcatgcctccgccccgccccaccactgagaccctccgccgccctcgggtacaaagagagaatgtcctacatactaaaggaaagtagcaagagccctaaaacaatgaagaagtttcttcacaagcggaaaactgaacgaaagccttctgaagaagagtatgtcatccgcaagagcactgcggccttggaagaggatgcccagattctgaaagtaatcgaagcttattgcacatcagccaacttccagcaggggcacggaagcagtacgcgcaaggactcaattccacaagtgctgctgcccgaggaagagaaactgatcatagaggagacacgatccaacggacagaccatcatggaggagaaatcactcgttgacacagtatacgcgctgaaagatgaggtcagggagcttaagcaggagaataagagaatgaagcagtgtttggaggaggaactgaagagcagacgtgacctggaaaaactagtgcgaaggctactcaagcagacagacgagtgcataagaggcgaatcttctagcaagacatcgattctcccttag

SEQ ID NO: 131599 - DNA, 1869 bp, synthetic construct
  misc_feature 1..1869: note = Description of Artificial Sequence: Synthetic coding sequence
  source 1..1869: mol_type = other DNA
atgaccgagaacggatctcaccaactgatcgtcaaagccaggttcaatttcaaacagacgaacgaagacgagctgtctgtgtgtaaaggcgacatcatctacgtgacccgggttgaagagggagggtggtgggagggtaccctgaatgggcgtactgggtggtttcccagtaactatgtgcgcgagattaagtcatcggagaggcctctctcccctaaagcggtgaagggatttgagacagcgcccctgacaaaaaactactacaccgtggtgctgcagaatatcttagacacagagaaagagtacgccaaagagcttcagagtttacttgtgacctacctgcgaccactgcagagtaacaacaacttatccactgtggaagtgacctctctcctggggaactttgaggaggtatgcaccttccaacaaacgctgtgccaagctctcgaggaatgttctaaatttcctgagaatcagcacaaagtcggcggctgtctcctcagcctcatgccacacttcaagtctatgtatctagcgtattgtgccaatcacccctcagcagtgaacgtgctgacccaacatagtgatgagctagaacagttcatggaaaaccaaggtgcgtcttctcctggaatcctcatcctgacaaccaacttatcgaagccatttatgagactggaaaaatatgtcaccttactgcaggaactggagcgtcatatggaagatacgcatcccgaccatcaggatatactgaaagctattgtcgctttcaaaacattgatgggccaatgccaggacttgagaaagaggaagcagctggagttacagatcctcagtgaacccatccaggcctgggagggtgaagatattaagaacctcggcaacgtgatcttcatgtcccaggtcatggttcagtatggcgcttgcgaggagaaagaggaaagataccttatgctgttttccaatgtactcattatgttgagtgcatccccccggatgtctggtttcatttaccagggaaagatacccatcgctggtacagttgtgacccgactggacgagatagagggcaacgactgcacctttgaaatcacaggtaacactgtagagcggattgtggtccattgcaacaacaatcaagacttccaggagtggcttgaacagctgaatcgactgattagaggtcccgcgagctgctccagcctctcaaaaaccagcagctcaagctgcagcgcacacagtagcttcagctcaaccgggcaacctagggggcccctcgaaccacctcagattataaagccgtggagtctgtcttgcttacggcctgctccccctttgagacccagcgccgcccttggatataaggaacggatgagctatatcctcaaggagagctcgaaatcgcccaagactatgaaaaaattcttgcataaacgcaagacagaacggaaaccaagcgaggaagagtatgtgattcgtaagagcactgctgccttagaagaggatgcccagatacttaaagtgatagaagcctactgcacgagtgcaaactttcagcaggggcatgggtcaagtacaagaaaagacagcattccacaagtccttttgccagaagaggaaaaactcattattgaagaaaccagatcaaacgggcagacaattatggaggagaaaagccttgtggataccgtttacgctctcaaagacgaagtccgggagttaaaacaggagaataagagaatgaagcaatgtttggaagaggagctgaagtcaagacgagatttggaaaagctcgtgcggagactgctgaaacaaaccgacgaatgtattcgaggagagtcatcaagtaagaccagcattctcccatag

SEQ ID NO: 131600 - DNA, 1950 bp, synthetic construct
  misc_feature 1..1950: note = Description of Artificial Sequence: Synthetic coding sequence
  source 1..1950: mol_type = other DNA
atgaccgagaacggtagtcaccagctgatcgtgaaggcacgatttaactttaaacagacgaatgaagatgagttgtctgtctgtaaaggtgacatcatctacgttacacgggtagaagaaggtgggtggtgggaaggcacattgaacggccgcactggctggttcccatcaaactatgtgcgcgagataaaatcgtccgacggagtgagtctccttcttccgggcctcgagtgcaatggggccatttcagcccatcataacctctgtttgccgggctctaagcgcccactgtcaccgaaagctgtgaaagggttcgagactgcacctttgacgaaaaactattatacagtagtcctgcaaaatattcttgacaccgaaaaggaatacgctaaagaactgcagagcctcttggtaacctatctgcggcctcttcagtctaataataatctgtcaacggtggaggtgacatccctgctgggcaactttgaggaggtgtgcactttccagcaaactctctgtcaggccttggaggagtgcagcaagtttcctgagaatcaacacaaagtcggggggtgtctgctttcactgatgccacacttcaagtctatgtatctggcctactgcgctaaccacccctcagctgtgaacgtgctaacgcagcactcagacgagctggagcagttcatggagaatcaaggagcaagcagtcccggaatcttgattctcaccaccaaccttagcaagccgttcatgaggctagagaagtacgtcaccttgctacaggagctggagcgccacatggaggacacccaccccgaccaccaggatattctgaaggcaatcgttgcctttaagaccctcatgggccagtgccaggacctgcggaaacgcaaacagctggagcttcaaatcctttctgagccgattcaggcatgggagggagaggacattaagaatctagggaatgtgatttttatgtctcaagtaatggtgcaatacggcgcatgcgaagaaaaagaggagcgctacttgatgctgttctccaacgtgctcatcatgctgtccgcctccccgcgcatgtctggatttatttatcagggcaaaattccgatcgccgggacggtggtgactcgcctggacgagatcgaagggaacgattgcacatttgagataaccggcaatacagtcgagcggattgtggtgcattgcaataacaaccaagatttccaggagtggctggagcagctgaaccgcctgatcaggggacccgcttcatgtagctctttgtccaaaaccagctcttctagctgttctgcacattcttcctttagtagtaccggacagcctaggggtcccctcgagcctccgcagattataaagccttggtctctctcttgcctgaggcccgcacctccactccggccatcggcagccctgggctacaaggaaaggatgagttatattctgaaggagagctccaagagtcccaaaaccatgaaaaagtttctccataaaagaaaaactgagaggaaacctagcgaagaagagtacgttatccgtaagtccaccgctgcgctggaggaggacgcacagatcctcaaggtcattgaagcttactgcacgtcggctaattttcagcaggggcatgggtcctctacacggaaggactcaattccccaggttctgctgccagaggaggagaagctgatcatagaagagacccgctcaaacggccagaccatcatggaagagaagagcctggtagatactgtctacgccttaaaggatgaagtgagggaactaaagcaagaaaacaagcgaatgaagcaatgccttgaagaggaactgaagtctcggcgggacctggagaaactggtcagaagactgttgaagcaaactgatgagtgcatccggggggagagctcaagcaaaacttccatcttgccttag

SEQ ID NO: 131601 - DNA, 1869 bp, synthetic construct
  misc_feature 1..1869: note = Description of Artificial Sequence: Synthetic coding sequence
  source 1..1869: mol_type = other DNA
atgacagaaaatggctcccaccagcttattgtgaaggctcgattcaactttaaacagacgaatgaggacgaattaagcgtgtgtaagggcgacataatttacgtaactagggtagaggagggaggctggtgggaaggcaccctcaacggccggacaggctggttccccagcaattatgtcagggaaatcaagagcagcgaaaggccgctctccccgaaagcagtgaaaggatttgaaacagcacctctcaccaagaactactatacggttgtactgcagaatattctggacaccgagaaggagtacgctaaagaactgcaatcactcctggtgacgtacctccgaccactgcaatcaaacaacaacctgagtaccgtggaagttacaagcctgctggggaattttgaggaggtgtgcactttccagcagaccctgtgccaagcattggaggaatgcagcaaattccctgagaaccagcataaagtcggaggatgcctcctatcattgatgccgcacttcaaatccatgtatctggcttattgcgctaatcatccaagcgcagtcaacgtgcttactcagcattcagatgagctagagcaattcatggagaaccagggagcgtcatctccaggaatcctcatcctgaccacaaatctgagcaaaccattcatgagacttgaaaagtacgtcacattgctgcaggaactcgaacgccatatggaggacacccatccagaccaccaagatatactgaaagcaatcgtggccttcaagacactaatgggtcagtgccaagatctccgcaaacgcaagcaactggaacttcagattctttcagaaccaatccaggcctgggagggcgaagacattaaaaacctcggcaacgtcatcttcatgtctcaggttatggtgcagtacggcgcgtgcgaagagaaggaggagaggtatttgatgcttttcagcaacgttctcataatgctttctgcctccccccgtatgtccggcttcatttaccaaggaaaaattcccatagccgggactgtggtgacacgactcgatgaaatcgagggaaatgactgtacgttcgagatcaccggaaacacagtcgagagaattgtggtccattgtaataacaaccaagacttccaggagtggttggagcagcttaaccggctcataagggggccagcgtcttgctcctccctctcaaaaaccagtagtagcagctgctcggcccattctagttttagctccacaggccagcccagggggcctctcgagcctccccagatcatcaaaccttggagcctgtcttgcctacggcccgcccccccactgcggccttctgccgcgctcggatacaaggaggccttcaccttcgtctttgaagagagtagcaagagtccgaaaacgatgaaaaaatttcttcacaagcggaagaccgagcggaagccttccgaagaggaatacgtgattcggaagtccaccgccgcgctcgaggaggacgctcagatcctaaaggtcatcgaggcctattgtacatccgcaaatttccagcaagggcacgggtcaagtacccggaaagatagcataccccaggtactgctgcctgaggaagagaaactcatcattgaagagactcgatctaatgggcagacaatcatggaggaaaagagccttgtggacactgtctacgcgcttaaagatgaggtgagggaactgaaacaggaaaataaacgcatgaagcagtgcctggaggaggagctgaagtcaaggcgagacttggaaaagctagtgcggaggctactcaaacagacggatgagtgtatacggggggagagctcatccaaaacctcaatcctgccctag

SEQ ID NO: 131602 - DNA, 1896 bp, synthetic construct
  misc_feature 1..1896: note = Description of Artificial Sequence: Synthetic coding sequence
  source 1..1896: mol_type = other DNA
atgttctatgcccactttgtcctgagtaagagaggcccgctggccaagatctggctggccgctcactgggataagaaactcactaaagcacacgtgttcgagtgcaacctggaatcttctgttgagtcaattatctctcccaaggttaagatggccctcagaactagtggccatctgctcctcggggtggtgaggatttaccaccgcaaggcaaagtacctgctagcggactgtaatgaagcctttattaaaatcaaaatggcatttcggcccggggtcgtagacctccctgaggagaaccgggaagcagcctacaatgccatcactttgccagaggaatttcacgactttgaccagcccctgcccgaccttgacgacatagacgtcgcacagcagttttcacttaatcagtcacgcgtggaggagataaccatgcgtgaggaagtgggaaatatttccatactgcaggagaatgacttcggtgattttggcatggacgatcgcgaaataatgcgggagggatcagcttttgaggatgacgatatgttagtgagtacaacgacctccaatcttctactggagtccgagcagtctacttcgaatctgaacgagaaaatcaaccacctggagtacgaagaccaatacaaagacgataacttcggcgagggcaatgacggcggcatacttgatgataaattgatcagcaataacgatggggggattttcgacgacccccccgccctgtctgaggctggtgtcatgcttccagagcaacccgcccatgacgacatggatgaagatgataacgtgagcatgggtggtccagactctcccgacagtgttgaccccgtcgagcccatgcctacaatgaccgaccagaccacgctggtgccaaacgaagaggaggcattcgccctggagccaattgacatcacagttaaggagacaaaagccaaaaggaaacggaagctaattgtggacagcgtcaaagagttggactccaagaccattcgtgcgcagcttagtgattacagtgacattgtaaccacattggatctcgctccacctacaaagaaactcatgatgtggaaagagactggaggggtcgagaaactcttctctctgcccgcacagcccctctggaataataggcttttaaagctgttcacgcgctgtctaacacccttggtgcctgaggacctcagaaagcggagaaaaggcggggaagccgacaatctcgacgagtttctgaaggaattcgagaacccagaggtccccagagaggaccagcagcagcagcaccagcagagagatgtaatcgacgaaccaatcatcgaagagccttcccgcctccaagagtcagtgatggaagccagccgtacaaacattgatgagagcgccatgcctccgcccccaccgcagggagtcaagaggaaggcagggcagatagatcctgaacccgttatgccacctcagcaggtagagcagatggagattccgccagtagagttacctcccgaagaaccacctaacatttgtcagctgattcccgagttggaactacttcccgaaaaggagaaggagaaggaaaaagaaaaagaagatgacgaggaggaggaggatgaggatgcatccggaggggatcaggaccaggaagaacgccgttggaacaaacggacacagcagatgctccacggcctgcagcgggctctggccaagacaggcgcagagtctatttccctactggagctctgtcgaaataccaacaggaagcaggctgctgcgaagttctatagttttctagtcctgaagaagcagcaggcaatcgagctcacacaggaagaaccttactccgacataattgccacacctgggccccgcttccacattatctag

SEQ ID NO: 131603 - DNA, 501 bp, synthetic construct
  misc_feature 1..501: note = Description of Artificial Sequence: Synthetic coding sequence
  source 1..501: mol_type = other DNA
atggctccaaaaaaggccaaaaagagggccggcggggccaactcaaatgttttcagcatgtttgaacagacacagattcaagaattcaaggaagcatttacgatcatggaccaaaacagggacggtttcatagataaaaatgacctgcgcgacacgttcgcagctctcgggagagtgaacgtgaagaatgaggagatcgacgaaatgattaaggaagccccagggcctataaactttaccgtcttcttgacaatgttcggtgaaaagctgaagggtgccgaccccgaggagacaatcctaaacgcctttaaagtcttcgaccccgagggtaagggcgtactcaaagctgattacgtgagggagatgttaaccacccaggctgaaagattctcaaaggaggaggtagatcagatgttcgcggccttccctccggatgtcactggtaacctcgactacaagaatctcgtgcatatcatcactcatggcgaagagaaagattag

SEQ ID NO: 131604 - DNA, 909 bp, synthetic construct
  misc_feature 1..909: note = Description of Artificial Sequence: Synthetic coding sequence
  source 1..909: mol_type = other DNA
atggtccggccagtgcggcacaaaaagccagtcaattacagtcagtttgaccacagtgactccgacgacgactttgtgtccgccacagttccgctgaataaaaagagcagaaccgctcccaaagaacttaagcaggataagcccaaacccaatctgaataatctgagaaaggaggagatccccgtgcaggagaaaacaccgaagaaacggctaccagagggtactttctctattccagcatcagcagtgccatgtactaagatggctcttgatgataagctatatcaaagagacctggaggttgccttggccctgagcgttaaagagctgcccaccgttaccaccaacgtccaaaatagtcaggacaagtctattgagaaacatggctccagtaaaattgaaaccatgaataagtctccacatatttcaaactgtagcgtggcgagtgattatttggacctggacaagatcactgttgaagatgacgtaggcggagtacagggcaagcgaaaggctgcctcgaaggccgctgcacagcagcggaagatactgctggagggttctgacggtgactccgccaatgataccgagccggactttgcacccggcgaggacagtgaagacgattcagacttctgcgaatccgaagataatgacgaggacttcagcatgagaaagagtaaagtcaaggaaattaaaaagaaagaggtgaaggtcaagtctccagtcgagaagaaggagaagaagagtaagtccaaatgcaacgcccttgccgcgtcaggcgggtcgcggagctcttctagtccactagtggtggtgtcagtcaaaagccctaaccagtccttacgcctaggcctgagccgcttggcacgggtgaaacctttgcatccaaacgctacgtctacctag

SEQ ID NO: 131605 - DNA, 1008 bp, synthetic construct
  misc_feature 1..1008: note = Description of Artificial Sequence: Synthetic coding sequence
  source 1..1008: mol_type = other DNA
atggttcgccccgtgaggcacaaaaaacccgtcaattactcacagttcgaccactctgacagcgacgacgacttcgtttctgcgaccgtgccattgaataagaaaagccggacagcgcctaaggagctgaagcaggacaaacccaagcccaatcttaacaacttgcggaaggaagagatacctgtgcaagagaagacccctaaaaaacgcatggcgctggatgataagctttatcagcgggacctggaagttgcgcttgctttatctgttaaggaactgcctactgtgactacgaacgttcagaacagccaggataagtccattgagaagcacggctcctctaagatagagacaatgaataagtctcctcacatttccaattgctcagtcgcatctgattacctggacttggataagatcactgtagaggacgatgtgggcggggtacagggcaaacggaaagccgcttcaaaagcagccgcacagcagagaaaaatcctgctggagggctccgacggggactccgctaacgacacagagcctgatttcgctcccggagaggacagcgaggacgacagcgacttttgtgagtcggaggataatgatgaggacttttccatgaggaagtccaaggtgaaagagattaaaaagaaggaagtgaaagtgaaaagtcctgtggagaaaaaggagaagaagtcaaaatcaaagtgcaacgcactagtgacctcagtggactctgcccccgcagccgtaaaaagtgaatcacagtctctccctaaaaaggtttccttgtcatccgacacgactaggaagccacttgagatccgaagcccatccgccgaaagtaagaagcctaaatgggtgccacccgctgccagcggaggttcccggtcttcgtcaagtcctctggtggtagtttctgtcaagtcccctaatcagagcttgcgtttgggactctcgcggttggcccgcgtgaaaccactgcacccaaatgcaacaagtacatag

SEQ ID NO: 131606 - DNA, 702 bp, synthetic construct
  misc_feature 1..702: note = Description of Artificial Sequence: Synthetic coding sequence
  source 1..702: mol_type = other DNA
atgaataaatcacctcatatcagcaactgtagtgtcgcctccgactatttggatctggacaaaatcacggtggaagacgacgtgggcggagttcaggggaagaggaaggccgcttctaaagccgctgcccagcaacggaaaatcctacttgaagggtctgatggtgattccgccaacgacacggagcccgacttcgctcccggagaggattcagaagacgacagcgatttctgcgaatctgaggataacgacgaggatttttccatgcggaaatctaaagtcaaagagattaaaaaaaaagaagtcaaggtgaagtcgcccgtggagaagaaggagaaaaagtcaaagagcaaatgtaacgcattagtgacaagcgtagactccgcaccggcggccgtgaaatccgaatctcagtccctcccgaagaaagtgtcattatcctccgatacaacacgcaagcctttggagatacggtccccaagtgcagaatccaaaaaacccaagtgggttcctcctggaatggcctacctgtcctcccggaccggcgcttggaagatcattacagctgcttcaggcgggtcgcggtcctcttcaagccccctggtcgtggtgtcagtgaaatccccaaatcagtctctgcgactgggtcttagcaggttggctcgggtgaagccccttcaccccaatgctacttctacttag

SEQ ID NO: 131607 - DNA, 408 bp, synthetic construct
  misc_feature 1..408: note = Description of Artificial Sequence: Synthetic coding sequence
  source 1..408: mol_type = other DNA
atgcgaggaaagactttcagattcgagatgcaaagagacctggtatcattcccgttaagcccggccgtcagagtcaaactggtatccgctggcttccagacagcagaagagttactcgaggttaagccttccgagctaagcaaggaagtgggcatctccaaagctgaggctctggaaaccctccagataatcagacgagaatgtcttactaacaaaccccggtatgctggcacttccgaatctcacaagaagtgcacggctcttgagctgctggaacaggaacacacacagggctttatcatcactttttgctctgccctcgatgatatcttgggcggcggggtaccactcatgaagacaacagaaatctgtggtgcacccggtgtgggcaagacgcaactctggtag

SEQ ID NO: 131608 - DNA, 855 bp, synthetic construct
  misc_feature 1..855: note = Description of Artificial Sequence: Synthetic coding sequence
  source 1..855: mol_type = other DNA
atggccgagcttgttcctttcgcggtgcccatcgaatctgacaagaccctgcttgtatgggagctctcttccggacccaccgccgaggcgctgcaccattctctgtttactgccttctcgcaatttgggcttctttatagcgtgagagtttttcctaatgcagctgtggctcacccaggattttatgccgtaataaaattctatagcgcccgcgccgcacacagggctcaaaaggcctgcgaccggaaacagctgtttcaaaagagtcccgtgaaagttagattaggcacaaggcataaggccgtgcagcaccaggctttagcacttaattccagcaagtgtcaagagctggccaactattacttcggatttaatggatgtagcaaacgcattatcaagctgcaagagctcagcgatctggaagagagggaaaatgaggattcaatggtgcctcttcccaagcagtctcttaaatttttctgcgcgttggaagtggtgttgccctcctgtgactgtcgctccccaggtatcggcctagtggaggaacctatggacaaagtcgaagaagggcccttgtccttcttaatgaaaagaaagacagcacagaagctcgccatacaaaaggcattgtccgacgcattccagaagctgctgatcgtggtactcgaatctggcaagatagcagtggagtatagaccttcagaggatattgttggggtgaggtgtgaagaggagctacatggcctgattcaggtcccttgtagtccgtggaagcagtatggccaagaagaagaagggtatctttccgatttctcacttgaggaggaggaattcagactacccgagctggattag

SEQ ID NO: 131609 - DNA, 351 bp, synthetic construct
  misc_feature 1..351: note = Description of Artificial Sequence: Synthetic coding sequence
  source 1..351: mol_type = other DNA
atgcacttgctggtaccacccccacagcactctctgttcacggctttcagccaattcggccttctgtactccgtgcgcgtgttcccaaatgccgcagtcgcccaccccggcttttacgctgtcatcaaattttactccgcaagagcagctcaccgtgcccagaaggcctgcgacagaaagcagcttttccagaagtctccagtgaaggtcagattgggaactcggcacaaggccgtgcagcaccaggccctcgcgctgaactcttctaaatgtcaggagctggccaattactacttcggcttcaatgggtgcagcaaaaggataatcaaagatcattaccactcactctag

SEQ ID NO: 131610 - DNA, 711 bp, synthetic construct
  misc_feature 1..711: note = Description of Artificial Sequence: Synthetic coding sequence
  source 1..711: mol_type = other DNA
atggccgaattggtaccatttgctgttcccatcgaaagcgataagactttgcttgtttgggagctcagttctgggcccacagccgaggctcttcaccattcccttttcactgccttctcgcagtttggcttgctgtatagcgtaagagtattcccaaacgccgcggtagcccatccaggcttttacgcagtgattaagttctattcagcaagagctgcacatcgcgcccagaaggcctgcgatagaaaacaattgtttcagaaatctccagttaaggtacgcctgggtactcgccataaggccgtacagcaccaggcgctcgctttaaattccagtaagtgtcaggagctcgctaattattattttggttttaacgggtgctcaaagcgcattatcaaactgcaggaactgagcgacctggaagaacgtgaaaatgaggactcgatggtgccattacctaaacagagcctcaaatttttttgcgcactcgaggtagtgctgcccagttgtgattgcagaagccctggtataggcctagtcgaggagcctatggacaaggtggaagaagggccgttgtctttcctcatgaagaggaagaccgcacagaagttagcgatccagaaggcactttcggacgccttccaaaagcttctcatcgtggtcttggggaagactgtgctcataatcctggaagtcctgcagttccaatag

SEQ ID NO: 131611 - DNA, 786 bp, synthetic construct
  misc_feature 1..786: note = Description of Artificial Sequence: Synthetic coding sequence
  source 1..786: mol_type = other DNA
atgcatctgctggttccgccccctcaacactcccttttcactgcatttagccagttcggcctgctctacagcgtgagagtgtttcccaatgcagcagtcgcgcaccccggtttctacgccgtaattaaattctactccgcccgagcggcccaccgagcccagaaggcctgtgacaggaagcagttgttccagaagagcccagtgaaagttcgcctgggtacccggcataaagccgtgcagcaccaagccctcgctttaaatagcagtaagtgtcaagaattagctaattactactttggcttcaatggctgttctaaaagaatcattaaactgcaggagctgtccgatttggaagaaagggaaaacgaggactccatggtgcctctaccaaaacagtcgctgaagttcttttgtgcactggaggtggtgctcccaagttgtgattgtcgaagtccagggatcggactcgtggaagagcctatggacaaggtggaagagggtccgctctcttttctcatgaaaaggaagactgctcaaaagttagccattcaaaaggctctgtccgatgccttccagaagcttctgatcgtcgtattggaaagcgggaagatcgccgtcgaatacagaccctcagaagatatcgtaggagtgcgctgcgaggaagaactccacggcctgatccaggtgccatgctctccgtggaagcagtacgggcaggaggaggagggttacctgagcgacttctctttagaggaggaggagtttcggctgcctgaacttgactag

SEQ ID NO: 131612 - DNA, 393 bp, synthetic construct
  misc_feature 1..393: note = Description of Artificial Sequence: Synthetic coding sequence
  source 1..393: mol_type = other DNA
ttcggattcaacgggtgctccaaacgcatcattaaactccaggaattatcggacttagaagaaagagagaacgaagactctatggtgccgctgcccaagcaaagtttgaaattcttctgtgctctggaagtggtactgccaagctgcgattgccgctcccccgggatcggcctcgtcgaggaaccaatggacaaggtcgaagaggaatcgggtaagatcgcagtagagtatagacctagcgaagacattgtgggcgttcggtgtgaagaggagctgcatggactgatacaggtcccatgcagcccttggaaacaatacggccaagaagaagaaggatacttgtccgacttttccctagaagaggaagaatttcgcctccccgagctggattag

SEQ ID NO: 131613 - DNA, 501 bp, synthetic construct
  misc_feature 1..501: note = Description of Artificial Sequence: Synthetic coding sequence
  source 1..501: mol_type = other DNA
atggctgagttagtacctttcgcagtgccgatcgagtccgacaaaacccttttggtatgggagctctcctcgggccccaccgctgaggccctgcatcattcactgtttaccgccttctctcaatttgggctgttgtacagtgtcagggtgtttccaaatgctgccgtggcgcatcctggcttctacgccgtcatcaagttctattcagcccgggccgcccaccgagctcagaaagcctgtgacagaaagcagcttttccagaagtcgccggttaaggtgcgcttaggaacacgccacaaggcagtccagcaccaggccctcgcgctgaatagctctaagtgccaggagttagcaaattattacttcggatttaacggctgttccaaacgtatcataaaagtgccatgtagcccatggaagcagtatggacaggaggaagaaggatacctgagcgatttctcgctcgaagaggaagaatttcgcttaccggagctggactag

SEQ ID NO: 131614 - DNA, 642 bp, synthetic construct
  misc_feature 1..642: note = Description of Artificial Sequence: Synthetic coding sequence
  source 1..642: mol_type = other DNA
atgcacctcttagtcccacccccacaacactccctgtttacggccttctcccagttcgggctactatactcagtgcgggtatttcccaatgcggctgtggcccaccctggcttctacgctgtgattaaattttattccgcaagggctgcccatcgcgcacaaaaagcatgcgatcggaaacagctcttccagaagtcaccagtcaaggtcagactgggcactagacacaaagccgtacagcaccaggctctcgctctcaactccagcaagtgccaagagctggctaattactacttcgggttcaatggatgttccaagcgaatcattaaactgcaagaactgtccgacctcgaagaaagggaaaacgaggattccatggtgccactgcctaagcaatctctgaagttcttttgtgccctggaggtcgtgttgccatcttgcgattgtcgcagccctgggataggcctggtggaagagcccatggacaaggtggaggaaggaccactttcatttcttatgaagcggaagactgcacagaaactggccatccagaaggcattgagcgatgcttttcaaaagctcttaatagtggtccttggcaagacagtgctgattatattggaggtgctgcagtttcagtag

SEQ ID NO: 131615 - DNA, 756 bp, synthetic construct
  misc_feature 1..756: note = Description of Artificial Sequence: Synthetic coding sequence
  source 1..756: mol_type = other DNA
atggcggaactcgtgccctttgctgtgccaatcgagagtgataaaactcttcttgtatgggagctcagtagcggccctaccgcggaagctctacaccatagcctgttcaccgcttttagtcagtttggccttctgtatagcgtcagggtatttcctaatgccgctgttgcccaccctggattttacgcagttatcaagttctatagcgcccgcgctgctcatcgggcccagaaggcctgtgacaggaaacaattgttccaaaagagtcctgtcaaggtcagactcggtacaaggcacaaggcagtccagcaccaagcattagccttaaactctagcaaatgccaagagctcgccaattattactttgggttcaatggctgctccaagaggattataaagttgcaggagctttccgaccttgaggagagagaaaacgaagacagcatggtgcctcttcctaaacaatccctaaagttcttctgtgcccttgaggtcgtgctgccctcttgtgactgtaggtcaccaggaatcggcctggtagaagagccgatggataaagtcgaggaagagagtgggaagattgccgtggaatatcgacctagtgaggatatcgttggcgtcagatgcgaggaagaactccacggtctcatacaagttccgtgctctccatggaagcagtacggccaggaagaagaaggatacctgtcggatttcagcctggaggaagaggagttccgtcttcccgagctggactag

SEQ ID NO: 131616 - DNA, 420 bp, synthetic construct
  misc_feature 1..420: note = Description of Artificial Sequence: Synthetic coding sequence
  source 1..420: mol_type = other DNA
atggccgaactggtgccatttgcagtccccattgagtctgataagactctcctggtttgggaactgtcttccggcccaaccgctgaggcactgcaccactccctgttcactgctttcagtcagttcggtctgctttattcagtgcgcgtcttccctaatgcagccgtggcacacccagggttctatgcggttatcaagttctattctgctagggctgcgcatcgcgcccaaaaggcatgtgatcggaagcaactgttccagaagtcccccgttaaagtgagacttgggacaaggcacaaggcagtccagcatcaggcccttgcccttaacagtagcaaatgccaggaactcgccaactactatttcggatttaatggctgttccaagcgtattattaaagatcattatcactcgctgtag

SEQ ID NO: 131617 - DNA, 432 bp, synthetic construct
  misc_feature 1..432: note = Description of Artificial Sequence: Synthetic coding sequence
  source 1..432: mol_type = other DNA
atgcacctgctggtgcccccacctcagcactccctgttcaccgccttcagtcagttcgggctgttgtactccgtgagagtgtttcctaacgccgcagtggcacatccagggttctacgcagtgattaaattctattcggcaagggcagcccatcgagctcagaaagcatgcgatcggaaacagctttttcaaaaaagccccgtgaaggtcagactgggcactcgacacaaagcggtccagcaccaggccctagccctgaacagttctaaatgtcaggagctcgccaactattacttcgggttcaatgggtgtagtaaacggattattaaggtcccttgtagcccttggaagcaatatggacaggaggaagagggataccttagcgacttcagcctcgaggaggaggagtttagactgccggagcttgactag

SEQ ID NO: 131618 - DNA, 2733 bp, synthetic construct
  misc_feature 1..2733: note = Description of Artificial Sequence: Synthetic coding sequence
  source 1..2733: mol_type = other DNA
atgcggcgctccgcagctccctctcaactgcagggtaattcattcaaaaagccaaaattcatccctccaggaagaagcaacccaggcctgaatgaggagatcacaaaactgaaccctgacataaagctgtttgagggagtagccatcaataatactttcttacctagccaaaacgatctgcggatttgcagcctcaatctgccctcagaagaatccaccagggagatcaataacagagataactgcagtggaaagtattgcttcgaggcccccactctagccacactagaccctccccatacagttcatagtgcgcctaaggaggtggctgtaagcaaagaacaagaggaaaagagcgacagtctggttaagtatttttccgtggtgtggtgcaagccgagcaaaaagaaacacaagaagtgggagggtgacgcggttctgattgtgaaggggaagtccttcattctgaaaaacctggaaggtaaagacataggacggggaataggctacaaattcaaagagttagagaaaatagaagaagggcagaccctgatgatctgcgggaaagaaattgaggtgatgggggttatttctccggacgatttcagctccgggcgctgttttcagctgggcggcggctcgaccgcaataagccattccagccaagtcgcacgaaagtgtttcagcaatcctttcaagagcgtatgtaaaccgagctccaaagaaaacaggcaaaacgatttccagaactgtaaaccgaggcatgatccctatactccaaactccctggtgatgccaaggcctgataaaaatcaccagtgggtgtttaataagaactgttttcccctggttgacgtcgtcattgacccttatctagtttaccatctgcgcccgcaccagaaagagggcattatcttcctctatgagtgcgtgatgggcatgcgcatgaatggcaggtgtggcgcaatcctggcagatgagatggggcttggaaaaaccctgcagtgcatttccttgatttggactttacagtgtcagggaccctatggtggtaaacctgtaattaagaagacacttatcgtcactcctgggtccttggtgaataattggaagaaggaattccagaaatggttaggttctgaacgaataaagatcttcacggtggatcaagatcataaagtggaggagtttatcaaatctattttttactcagtgctaatcatatcttatgagatgttattacggagcctggaccagattaaaaatatcaagttcgacctgctgatctgcgacgaaggacacagacttaaaaatagcgccatcaagacaaccacagcactcattagcttgtcctgcgaaaaaagaatcatactcacggggactccaatccagaacgacctgcaggagttcttcgccctgattgactttgttaatccagggatccttgggtccctctccagttacagaaagatttatgaggaacctattatactgtctagggagccatctgctagcgaggaagaaaaggaactcggagagagaagggccgctgagctgacatgcctgactggtctatttatattgcgaagaacacaggaaatcataaataagtacttaccgccaaagatcgaaaacgtggtgttctgccgccctggggccctgcagatcgaactgtatcgcaagttactgaattcacaggtagtgcgtttctgtctccagggcttactggagaacagtccccatctgatttgcatcggagctcttaaaaagctctgtaaccacccttgcttacttttcaactcaataaaggaaaaagagtgttcttccacgtgcgacaaaaacgaggagaagtccttgtacaaaggactcctctcagtgtttccagcagactacaaccctttacttttcacagagaaagagtcgggcaagcttcaagtgctgtccaaactcctggccgtgattcacgagctgagacccactgagaaagtggtgctggtcagcaactatacacagacactgaacattctccaagaagtctgtaagcgccacggctatgcatatactaggcttgacggtcagactcccatatctcagcgccagcagatcgttgacgggttcaattcccaacactcttctttctttatctttctcctttcttcaaaggctggcggagtcggtctgaaccttatcggaggttctcacctaatcctctacgatatcgattggaatccagcaactgatatccaggcaatgtcccgggtatggagagatgggcaaaaataccctgtccacatttacaggttgttgacgaccggcacgattgaggaaaagatttatcagcgacaaatctctaaacagggcctgtgcggggctgtggtcgacctcacaaaaacaagcgagcacattcaattttcagtggaagaactgaagaatctctttaccctgcacgagtcctccgattgtgtgactcatgatctattggactgcgagtgtacgggggaagaagtgcacacgggggactcgttagagaaatttatcgtcagcagagattgtcagctgggcccccatcaccagaagtctaatagcctgaaaccattgagtatgagccaactgaaacagtggaagcactttagtggcgaccatcttaatctcaccgatccattccttgagcgtataactgaaaatgttagtttcattttccagaacatcacaactcaggccacaggtacatag

SEQ ID NO: 131619 - DNA, 900 bp, synthetic construct
  misc_feature 1..900: note = Description of Artificial Sequence: Synthetic coding sequence
  source 1..900: mol_type = other DNA
atggtagggaaggcgcgctcatctaactttaccctctcagagaagctggacttgttgaaactagtaaagccctatgttaaaattctcgaggagcacacgaacaagcacagtgtcattgtggaaaagaatcgttgctgggacatcatcgccgtcaattacaatgctatcggcgtcgatcggcctcctcgaacggcccagggcctgaggacactgtacaagcggttgaaagagtacgccaagcaggagcttctgcagcagaaagagacccaaagcgacttcaaatcaaatattagcgaaccaaccaagaaggttatggagatgatcccccagatttcctcattctgcctggtgcgcgaccgcaaccatatccagtctgcgaacctggatgaagaagcgcaggccgggacatccagcctgcaggttatgctggaccaccaccccgtggctatcacagtggaagtgaaacaggaggaagatattaagccccctcctccactagtgctgaacagtcaacagagtgataccctggaacagcgggaagaacacgagctggtgcatgtgatggagagaagtctgagtccctccttgtcttcggtggatatgcgaatgacttccagcccttcgagtattccccggagggacgacttctttaggcatgaaagcggagaacattttaggtctcttctaggatacgaccctcaaattcttcaaatgctcaaagaagagcaccagatcatcctggagaaccaaaaaaatttcggactctatgtacaggaaaagagggacggtctgaaacggcgacagcagttagaagaagagctgctgagagcaaagattgaagtggagaaattaaaggccatcagactgagacacgatctcccggaatacaactctctgtag

SEQ ID NO: 131620 - DNA, 378 bp, synthetic construct
  misc_feature 1..378: note = Description of Artificial Sequence: Synthetic coding sequence
  source 1..378: mol_type = other DNA
atgaggaggtctgccgctccgtctcagctccagggaaattcattcaagaagcctaagttcatccctcccgggagatctaatcccggcttaaatgaggaaataacgaagctcaacccagacataaagttgtttgagggcgtcgcaattaataatacattcctccccagtcagaatgatctgcgcatttgtagcctgaacctacctagtgaagaaagcacccgggaaatcaataatcgggacaactgctctggcaagtactgtttcgaagcgcctactctggcaaccctcgaccctccccataccgtacattctgcacccaaggaggtcgctgttagtaaagagcaggaagaaaaatccgattccctggttaagtattag

SEQ ID NO: 131621 - DNA, 354 bp, synthetic construct
  misc_feature 1..354: note = Description of Artificial Sequence: Synthetic coding sequence
  source 1..354: mol_type = other DNA
atgagaagaagcgccgctccttctcagctccaggggaactcttttaagaagcccaaattcatcccccctgggcggtcgaatcccggtcttaatgaggaaatcactaaactgaacccggatatcaaattgttcgagggggtagcgatcaacaacacatttctcccctcgcagaatgaccttcggatctgcagcttgaatctgccctctgaagagtccacccgcgaaataaacaacagggacaattgctcaggcaaatattgtttcgaggctccaacgctcgcaacactggatcccccccatacagtacagacttggatgagaaggcatcgcctggtgccagtgcattatcgttag

SEQ ID NO: 131622 - DNA, 477 bp, synthetic construct
  misc_feature 1..477: note = Description of Artificial Sequence: Synthetic coding sequence
  source 1..477: mol_type = other DNA
atgttggatcatcatcccgtggctattacggtggaggtgaaacaggaggaagacattaagcccccacccccactcgtcctgaacagtcagcagtctgacacacttgagcaaagggaggaacatgaattagtccacgtgatggagcgcagccttagtcctagcttgagttctgttgatatgaggatgacatcaagtcccagctcgatccctcgccgggatgatttcttccggcacgagtctggcgagcattttcgcagtctactaggttacgaccctcagattcttcagatgttgaaggaagagcaccagatcatactggaaaatcagaaaaacttcgggctctatgtgcaagagaagagagacggcctcaagaggcgccagcagctcgaggaagagctattgagagcaaagattgaagtcgaaaaactgaaggcaattcggctcagacatgatctgccagagtataacagcctgtag

SEQ ID NO: 131623 - DNA, 1749 bp, synthetic construct
  misc_feature 1..1749: note = Description of Artificial Sequence: Synthetic coding sequence
  source 1..1749: mol_type = other DNA
atgggactcggcaaaactctacaatgtatctcactgatctggaccctgcagtgccagggcccctacgggggaaagccagtgatcaagaaaaccctaatcgtaactccgggatcccttgtgaacaactggaaaaaggagtttcagaagtggctgggctcagagaggatcaagatttttacagtcgaccaggaccacaaggtggaggagtttattaagtcaatattctattctgttctcattatttcttacgagatgctgctccggtctctcgatcagattaaaaatattaagtttgatctactcatctgtgatgaaggccataggctcaaaaatagtgccatcaagaccacgaccgcactcatctccctctcttgtgaaaagagaattattctgacgggcaccccaatacagaacgatttacaggaatttttcgccctgatcgacttcgtcaatccggggatacttggaagtctcagcagttatcggaagatctacgaagagcctattatcctgtcccgagagccgtccgcttcagaagaggaaaaggaactaggcgaacgtgagcagctgaacttgctggccagtttggattccctactacggcgcacgcaggagatcataaataaatatctgccccctaagatcgagaacgtggtcttctgccgacccggcgccctgcagattgaactgtaccgcaaactgctcaattcccaggtcgtacggttttgcttgcagggtctccttgagaactcgccccatctcatctgcatcggtgcattgaagaagctctgtaaccacccgtgtttgctgtttaacagcataaaagagaaagagtgcagttctacatgcgacaaaaacgaggagaagagcttgtacaagggcttattgtccgtttttcccgccgactacaacccactgctctttaccgagaaggaatctggcaagcttcaggtgctctccaaactcctggctgtgatccatgagctgcgacctacagagaaggtggtcttagtttcaaattacacgcagacactgaatatactgcaggaggtgtgcaagcgccatggttacgcttacacgaggctcgacggacagacccccatctcacaacgccagcagatcgtcgacgggttcaattcccagcacagcagcttcttcatttttctgctgtcatccaaggccgggggagttggtctgaatttgatagggggatctcatctcattctttatgatattgactggaacccagccacagatatacaggcaatgagtcgcgtgtggcgcgatggccagaagtatcccgttcacatctatcgcctgctgaccactggcaccatcgaggagaagatctatcagaggcagatctctaagcaggggttgtgtggggccgttgtggatttgacaaaaacaagcgaacacatacagttctcagtcgaggagctcaagaacttgtttaccctccacgaatcaagtgattgcgtgacacatgacctgctggattgcgaatgcactggggaggaagtgcacactggcgattccctggagaaatttattgtgagccgagattgtcagcttggccctcatcaccagaagagcaactccttaaagcctctgtcaatgtcccagctgaaacagtggaaacatttctctggggaccacctcaacctgacagatccttttttggaaaggattacagagaatgtctccttcattttccagaatatcaccacgcaggccactggcacatag

SEQ ID NO: 131624 - DNA, 1290 bp, synthetic construct
  misc_feature 1..1290: note = Description of Artificial Sequence: Synthetic coding sequence
  source 1..1290: mol_type = other DNA
atggccgcaatgcttaagtgtgtgatgtccgggagccaagtaaaagtgttcggcaaggccgtgcaagccctgtcccggatttcagacgagttttggctcgaccccagcaagaagggcctcgccctccgctgtgtgaattcaagtcgctctgcatatgggtgcgttttgttttcaccagttttcttccagcattatcagtggtccgctctcgtgaaaatgagtgaaaatgaactggatactacactgcacttgaagtgcaagttaggcatgaaatcgattttgcccatattcagatgcctgaactcactagagaggaacatcgagaagtgtaggatctttaccaggtcggataagtgcaaggtcgttattcaatttttctataggcatggcatcaaaaggactcacaacatttgtttccaggaaagccagccactgcaggtgatctttgacaaaaacgtgtgcacgaatacactgatgatacagcccagattacttgccgatgccatcgtgctctttacaagctctcaggaggaagtgacactggccgtgactccactcaatttttgccttaagagcagtaacgaggaatccatggatctctctaacgccgtccactccgagatgttcgtgggctctgacgagttcgacttttttcagattggcatggacactgaaattaccttctgttttaaggagctgaaggggatcttaaccttcagtgaagccactcacgcccccatcagcatttattttgatttccctgggaagcccctggctctgtctattgatgatatgctcgtggaggccaacttcatcttagccactctggccgatgagcagagccgggcaagcagtccacagtccctgtgcttaagccagaaaaggaagagatcagacctaatagagaagaaggccggaaaaaatgtgaccgggcaggccctggaatgtatcagcaagaaggctgcaccgaggcggttgtaccccaaggagacactcactaacattagcgcccttgagaattgcggcagcccggctatgaaacgcgtcgacggagacgtttcagaagtgtccgagtcctccgtatccaatactgaggaagtgcccggctccttgtgtttgcgcaaattctcttgcatgttcttcggcgcagtgtcctctgaccagcaggaacattttaaccatcctttcgatagcctggcaagggcaagcgattcggaggaggatatgaacaatgtgtgctgtagaaaggaatttaacgggtctgatgccaagtacttttgcattatttag

SEQ ID NO: 131625 - DNA, 1038 bp, synthetic construct
  misc_feature 1..1038: note = Description of Artificial Sequence: Synthetic coding sequence
  source 1..1038: mol_type = other DNA
atgagtgaaaatgagttagatacgaccctgcatctgaaatgtaaattgggaatgaagtccatactgccaattttccggtgcctgaacagtttggaacgaaatatcgaaaagtgtagaatcttcactcggtcagacaaatgcaaagtggtgattcaatttttttacagacatggcattaagagaacccataacatctgtttccaggaaagtcagccattgcaagtcatttttgacaagaacgtctgtacaaataccctgatgatccagcctcggctgctggcagatgcaattgtgttgttcactagttcccaggaggaggtgacactggccgtaaccccattaaacttctgcctgaagagctctaacgaggaatctatggatctatctaatgcagtgcactctgaaatgtttgtaggtagtgacgagttcgacttttttcaaattggaatggatactgaaatcacattctgttttaaagagctcaaaggtattctgaccttctctgaagctacccatgcccccatctccatttattttgatttccctgggaaacctttggccctatccatcgatgacatgctagttgaggcaaacttcattctcgccacattggcggatgagcaatcaagggcctcgtccccgcagagcctgtgcctctctcagaaacggaaacgcagtgacctgatagagaaaaaagctgggaaaaacgtgactggccaggctctggagtgtatatcaaagaaggcggctccccgccgtttatatccaaaggaaacactaacgaatatttcagctctagaaaactgtggcagccctgccatgaaacgcgtggatggcgatgtgtcagaggtcagcgagtcctctgtgagtaacacagaggaagttcccggaagtttgtgtctccgtaagtttagttgtatgttcttcggcgcagtgtcttctgaccagcaggagcatttcaatcacccctttgatagcctagcccgagcctccgacagcgaggaggatatgaataatgggtctttttcaatattctag

SEQ ID NO: 131626 - DNA, 1038 bp, synthetic construct
  misc_feature 1..1038: note = Description of Artificial Sequence: Synthetic coding sequence
  source 1..1038: mol_type = other DNA
atgagcgagaatgagctcgatacgaccctccatttgaaatgcaagctgggcatgaagtctattctgccaatcttccgttgcctgaattctttggagcgtaatatcgagaagtgtcgtatttttactcgtagcgacaagtgcaaagtggtgattcagttcttttatagacacggaatcaagcgcacccacaacatttgctttcaagaatcccagccgctacaggtcatattcgacaagaacgtgtgcactaacactttgatgattcagccccgccttctggctgacgctatagttctctttacctcctcccaggaggaagtgaccctggccgttacacctctgaatttttgcctaaaatcatctaatgaggaatcgatggacctatcaaacgctgtacactccgagatgttcgtcgggagtgacgaattcgatttcttccagatcggaatggatacggaaattacattctgctttaaagaactcaaaggaatcctcaccttcagcgaggcaactcacgcccccatctccatatacttcgactttcctggcaagccactcgccttatccattgacgacatgctggtggaggcaaattttatcctggccacgctggccgatgaacagagtcgggccagtagcccccagagcctttgcctttcccagaaacggaagaggtcagatctgatcgaaaagaaggctggcaaaaatgttaccggccaggcacttgagtgtatcagcaagaaagctgccccacgacggctgtacccaaaggagaccttaacgaacatctccgcattggaaaactgtggatctccagccatgaagagggtagacggggatgtcagtgaggtgtcggagagcagtgtgagcaacactgaagaagtgcctggcagcttatgtctacgaaaattctcctgtatgtttttcggcgctgtgtcctctgatcagcaggagcatttcaaccatccatttgatagtctagcccgcgcttctgacagcgaggaggacatgaataatgggtctttcagcattttctag

SEQ ID NO: 131627 - DNA, 1449 bp, synthetic construct
  misc_feature 1..1449: note = Description of Artificial Sequence: Synthetic coding sequence
  source 1..1449: mol_type = other DNA
atggggtgcgtgcagtgcaaggacaaagaagcgactaagctaacggaggagcgcgacgggtctctgaaccaatcgtccggatataggtatgggacagaccctactcctcagcactaccctagcttcggcgtaacgtccatcccaaattacaacaatttccatgcggctggcgggcaaggtctgacggtgttcggtggggtgaactcttcaagccataccggaactttgagaaccagaggtggtacgggcgtgacgctgttcgtcgctttatacgattacgaggctagaactgaagatgatctgtcttttcacaagggggagaaattccagattctgaattccagtgaaggagactggtgggaggcgaggtctctcacaaccggcgagaccggctacataccctctaattatgtggccccagttgactcgatccaagcagaagaatggtacttcggaaagctgggacggaaagacgccgaaagacagctgttatcgtttggcaacccccggggaactttcctgatacgcgagagtgaaactacaaaaggggcctattctctgagtatccgcgactgggacgacatgaaaggcgaccacgtgaagcattataaaattcggaagctggacaacgggggctattatataaccacccgggcccagttcgagacactccagcagttggttcaacattactctgggacttggaacggtaataccaaggtcgccattaagaccctcaaacccggcacgatgagtcctgaatcttttctggaggaagcccaaatcatgaaaaaactgaaacacgataaactcgtccagttgtatgctgtggtgtctgaagagccgatctacatcgtgacggagtacatgaacaagggcagtctgctggacttcctaaaggacggagagggtcgcgccctgaaattgccgaacctggtggatatggcagctcaagtcgcagccggcatggcatacattgaacgaatgaattatattcaccgcgaccttcgttcggctaatattctcgtgggaaacggccttatctgtaagatagctgatttcggcctggccagactgattgaagacaatgagtacacagccagacaaggcgccaaattccccattaagtggactgccccggaggccgccctgtacggccgctttactattaagagtgatgtctggtcttttggtattctgctgactgaacttgtgactaaggggcgcgttccatacccaggaatgaataacagagaggtgctggagcaggtggaaagggggtatagaatgccctgtccgcaggactgccccatcagtctgcatgagcttatgatacactgttggaagaaggatcccgaggagaggccaactttcgaatatctgcagtcattcctcgaggattattttaccgctactgagcctcagtatcaacctggcgagaacctgtag

SEQ ID NO: 131628 - DNA, 1410 bp, synthetic construct
  misc_feature 1..1410: note = Description of Artificial Sequence: Synthetic coding sequence
  source 1..1410: mol_type = other DNA
atggaggattccacaagcccaaaacaagaaaaggagaaccaagaggagctcggggagacaagaaggccgtgggagggtaagacagctgcgagcccccagtattctgaacccgaaagctcagaacccctcgaggcaaagcagggccctgagacaggaagacagagtcgatctagtcgaccttggtccccccagagcagagctaagacgcccctgggaggacccgccgggccagagactagctcgccagcacctgtcagtccccgggaaccatcgtcgagcccgtccccactagcccccgcccgacaagacctcgctgcaccaccccagagcgatcgcacaacttccgtgatccccgaggcgggtacgccctacccagaccccctggagcaatcttccgacaaacgcgagagtacgccacatcacacttcacagagcgaggggaatacgtttcagcagtcccagcagccgaagccccacctgtgcggccgcagagatgtgtcttacaacaatgcaaagcagaaggaattaaggtttgacgtgttccaagaagaagattcaaattccgattatgatttgcagcagccggctccgggcgggagcgaggtggccccttctatgctagagatcacaattcaaaacgctaaggcatatctgttaaagacctcctccaatagtgggttcaacctgtatgatcatcttagtaacatgctgaccaaaatcctcaacgaacgccccgaaaatgccgttgacatctttgaaaatatttcccaggatgtgaagatggcccacttctcaaagaagttcgacgcgttacagaacgagaacgaactcttgcccacatacgagattgccgaaaagcagaaggccttgttcctgcagggccatctcgagggcgtggaccaggaattggaggacgagattgggcggtgtaattggttcaactcaattcagaaaaatgaggaggaggaagaagaggaagatgaggagaaggacgactccgattatatcgagcaggaagtaggtctgcctctcctaaccccaatctcagaggatcttgagatccagaacatcccaccttggacaacccggctcagctctaatttaatcccccagtacgcaattgccgtgttgcagagtaacctgtggccgggtgcctatgccttttctaacgggaagaagtttgagaatttctacatagggtggggccataaatacagtcccgataactacacccctcctgtgccccccccagtgtatcaggaatatccttccggccctgagataactgaaatggacgatccctcagtagaggaggagcaggcctttcgggctgctcaggaggcagtactgctagccgctgagaacgaagagagtgaggaggacgaggatgaggaagacgattacgattag

SEQ ID NO: 131629 - DNA, 1803 bp, synthetic construct
  misc_feature 1..1803: note = Description of Artificial Sequence: Synthetic coding sequence
  source 1..1803: mol_type = other DNA
atggaggacagcacctctccaaagcaggagaaggagaatcaggaggagctgggcgaaaccagacggccctgggaaggaaaaacggctgcttcgccgcaatattcagagcccgagtcttctgagcctctggaggccaagcaagggcctgagaccgggcgccagtcacggtcatctaggccatggtcccctcagagccgcgcaaaaaccccattaggggggcctgcgggcccagagacgtccagtccagccccagtttcaccacgggaaccgtcctctagcccctccccactggccccagccaggcaggacctggcagccccaccacagtcagacaggactacttccgttatccctgaggccggtacaccctatccagaccccctggagcagtcgagcgataaacgggaaagtacacctcaccacacctcccagagcgaggggaatactttccagcaatctcaacaaccgaaaccacacctctgtgggaggagggacgtcagctacaacaacgcgaaacagaaagagctgaggttcgacgtcttccaggaggaggactccaacagtgactatgatctgcagcagcccgcccccggcggctctgaagttgcccctagcatgctcgaaattacaatccagaatgcgaaagcctacctcctcaagacgtctagcaattctggcttcaatctgtacgatcatctttctaatatgttgaccaagatcctgaatgagaggcctgagaacgccgtcgatatcttcgagaatatctctcaggatgttaagatggcccacttcagtaagaaatttgacgccctgcagaacgaaaacgagttacttcctacttacgaaatcgctgagaaacaaaaagccctgttcctccaagggcatctcgagggcgtggaccaagaattagaggacgagatcgccgagaatgcattgcccaatgttatggagtcggcgttttatttcgagcaggctggtgtgggactgggcaccgatgaaacctacaggattttcttggccctcaaacagctcaccgatactcaccctattcagcgttgcagattctggggaaaaatcctgggactcgaaatgaattatattgtggccgaagtggaatttcgcgaaggggaggatgaggaagaggtggaagaagaggatgtggcagaagagcgggacaacggcgaaagcgaggcccatgaggatgaggaggatgagcttcctaagtccttctataaagccccacaggcaattcccaaagaggagagccgaacgggtgcaaacaagtacgtgtacttcgtgtgcaacgaacccggtaggccttgggtaaagctcccaccagtgatccccgcgcagatcgttatagctcgtaaaattaagaaattcttcaccggacgccttgatgctccaattatttcctatcctccattccctggtaacgagagtaactatctcagagcccagatcgccagaatctcggccgggacacacgtttccccactagggttttaccagttcggagaggaagagggtgaggaagaagaggaagctgagggcgggagaaactcttttgaagagaacccagacttcgaaggaattcaggtgatcgatctcgtggagtcgctgagcaactgggtccaccacgtacaacacatcctctcccaacgctttaggatctacccaccaggacagcatggctacccacagatctcatttcacaacatgctactgcagagctttaacccaaccttcggcctggaacacatgccaagccctatggccaagagtctcaagatatctacatag

SEQ ID NO: 131630 - DNA, 1536 bp, synthetic construct
  misc_feature 1..1536: note = Description of Artificial Sequence: Synthetic coding sequence
  source 1..1536: mol_type = other DNA
atgctcgagatcacaatccaaaatgccaaggcatatctgctcaaaacaagctccaattcgggattcaacctgtacgatcatctgagcaacatgcttacaaaaattttaaatgagagacccgagaatgccgttgatattttcgaaaatattagccaagacgtgaagatggcccatttttccaagaagttcgatgctctgcagaatgagaatgaactccttcctacgtacgagatcgccgagaaacagaaagcgctcttcctgcaagggcacctggaaggcgtcgaccaggagctcgaagacgaaattgccgaaaacgctctcccaaacgtgatggaaagtgccttctattttgagcaggcgggggtgggattaggaacagacgagacttatcgaatcttcctcgccctgaaacagctcaccgatacacacccaatccagagatgtaggttctggggaaagatacttggactcgaaatgaactatattgtcgcggaggttgaattccgagaaggcgaggacgaggaagaagttgaagaagaagatgtcgccgaagagagagacaacggggagtcagaagcacacgaagacgaagaagacgagctgcctaaatccttctataaggcccctcaggctatcccaaaggaagaaagtagaaccggagccaataaatacgtctactttgtgtgtaatgaacctgggcgcccctgggtaaaactgccaccggtaattccagcccagatcgtgattgctcggaagatcaagaaatttttcacgggtcgcctggatgctccgatcatctcctaccctccgttccccggcaacgagtccaactatctgcgtgctcagatcgctagaatcagcgccggcacccacgttagtcccctgggtttctatcagttcggcgaggaggagggtgaggaagaagaagaggcagaggggggacggaactcattcgaggagaacccggattttgaggggattcaggttatcgatctggtagagagccttagcaactgggttcatcacgtccagcacattctgtcgcaagggcgatgcaattggttcaactcaatacagaaaaatgaggaggaggaggaagaggaagatgaagagaaggacgattctgattatattgagcaagaggttggcctcccgctgctcactcccattagcgaggatctcgagatccaaaacattccgccatggaccacaaggctcagctcaaatctaattccccaatacgccattgcggttctgcaatctaacttgtggccaggagcctatgcatttagtaatgggaaaaagtttgaaaacttttatatcgggtgggggcataaatattcaccagataattacacgccgcccgtaccccctcccgtataccaggagtacccctcaggtcccgaaatcaccgaaatggacgaccccagcgtggaagaggagcaggcttttagagctgcccaagaagcggtgctgctggctgccgagaatgaggagagtgaggaggacgaggatgaagaggatgattatgattag

SEQ ID NO: 131631 - DNA, 531 bp, synthetic construct
  misc_feature 1..531: note = Description of Artificial Sequence: Synthetic coding sequence
  source 1..531: mol_type = other DNA
atgctggtaaagagggactatagatacgatagagtgctgttttggggaaggatattaggcctagtcgctgattactacatcgctcaagggctgtcggaagaccagttagcacctcgcaagacactctactccttgaactgcactgaatggagcctgctccctccagcaaccgaagagatggtcgcacagtcctctgtggtgaaagggcgattcatgggagatccaagctacgaatatgagcacactgagctacaaaaggtcaatgaaggcgagaaagtgttcgaggaggaaatcgtggtccaaataaaagaagagacacgactcgtgtctgtcattgaccagatcgataaggccgtggccattatccctcggggtgccctgttcaagacacccttcggccctacacacgtgaaccggacttttgaaggatactataactggtataaaacgcccgctcctcacccaacgtgcgacggcaaccagggtgttcgcgctcgtggtagaagcccctcactggggaggtttctctag

SEQ ID NO: 131632 - DNA, 831 bp, synthetic construct
  misc_feature 1..831: note = Description of Artificial Sequence: Synthetic coding sequence
  source 1..831: mol_type = other DNA
atggacgcagattccctgcttctatcgctggagctggcaagtggatctggccagggactaagccccgatcgaagagcgtccctactgacctccctgatgctggtgaagcgggactacaggtacgatagagtattgttctgggggcgaatcctcggtctcgtcgccgattactatatcgcccaggggctgagtgaggaccagctcgccccaaggaagacactctattccctcaattgcactgagtggtctctcctcccgccagccacagaggaaatggtggcgcaatcatcagtggtcaaagggcgctttatgggagacccaagctacgagtacgagcacacagagttgcagaaagtgaacgagggtgagaaggtctttgaagaggagatagtcgtgcagattaaggaagaaacacgtttagtaagcgtgattgaccagatagataaggcagttgcgattatacccaggggtgccctcttcaaaactccgtttggacccacacatgtaaaccgtaccttcgaagggctatcgttgagcgaagccaaaaagctcagctcctattttcatttccgcgagcccgttgaattaaagaataagactctgctcgaaaaggccgatctggacccctctttggacttcatggactccctggaacacgatataccaaagggctcatggtcaatccagatggagcggggtaacgcgctggttgtactgcgctcccttctgtggcccggactgaccttttatcacgcccctagaaccaaaaattacggctatgtctacgttggtacaggagaaaagaatatggatctcccctttatgctgtag

SEQ ID NO: 131633 - DNA, 921 bp, synthetic construct
  misc_feature 1..921: note = Description of Artificial Sequence: Synthetic coding sequence
  source 1..921: mol_type = other DNA
atggacgctgattctctgctgctctccctagaactagcctcaggaagcgggcagggactgtcccccgatcgaagggcttcactgctgaccagtctcatgctggtgaaacgcgactatagatacgatagggtgctgttctggggccgcattttgggtttagtggccgactattatatagctcaggggctatcggaagatcaactggcacctcgaaaaacgctatattctctgaactgtactgagtggtcactgctcccgcctgctaccgaagaaatggtggctcaaagctctgtcgtgaaagggcgcttcatgggcgatccatcatatgagtatgagcataccgagctccagaaggtgaatgaaggcgagaaagtctttgaggaagagattgtgattgacaaggctgtagcgataataccgcgcggcgcgctgtttaaaacgccttttgggcccacccatgtaaaccgcacatttgaaggcctaagcctgtctgaggcgaaaaagctctcttcctacttccactttcgcgagccggtggaacttaagaacaaaacattgctcgagaaagccgacttggacccgagcctggacttcatggattcattggaacacgacatccccaaggggtcagaggcagtggtccagggtgattttacgtggttactctccaggtgtggctttggttggccttgctcttgggacagctgcagcgtatccatgcgtgtgcttgagcaccctgatggcgagggccagtgtcccgggggagctgcgcaacccgcccttgctggtccgcacctgctgccctgctccccccaccaggagttatggctgcggcttaggggccattggcgggaagaacacgggttggcattgcacgccatcgagtgggaacctgcatggatgtttcttaaccgggtttag

SEQ ID NO: 131634 - DNA, 402 bp, synthetic construct
  misc_feature 1..402: note = Description of Artificial Sequence: Synthetic coding sequence
  source 1..402: mol_type = other DNA
tgattgaattgtactgaatggtccttgctccctccagcaacggaagagatggtggcgcaaagctccgtggtaaaaggcagatttatgggtgatcctagttacgaatacgagcacacagagctccaaaaggttaatgaaggcgaaaaagttttcgaagaggagatagtggtgcagatcaaagaagagacacgactcgtgagcgttatagatcaaatagacaaagccgtcgctattatcccaaggggggctctgttcaaaacccccttcggtccaacccacgtaaaccggacttttgagggctactacaactggtacaaaacacccgccccccacccaacatgtgatggaaaccagggggtgagggcaagggggaggtctccctctctggggagatttctgtag

SEQ ID NO: 131635 - DNA, 1086 bp, synthetic construct
  misc_feature 1..1086: note = Description of Artificial Sequence: Synthetic coding sequence
  source 1..1086: mol_type = other DNA
atgtgggttcttaccccagccgccttcgccgggaaactcctgtcagtcttcagacagcctttgagcagcctgtggcggtcacttgtgcccctcttctgttggctccgagctacgttttggttgctcgccactaaacgcaggaagcagcagttagtgctgcggggcccggacgaaactaaagaggaggaggaggatccaccactgccaacaacacccacgtcagtcaattatcatttcacacggcaatgcaactataaatgtggtttttgttttcatactgccaaaacatcgtttgtgctgccgctcgaagaggccaaacggggactgttgctgttaaaggaagccgggatggagaagatcaacttctctggcggggagccattcttacaggatagaggggagtacctcgggaaattagttcgtttctgcaaggttgagctccggctacccagtgtgtctatcgtgtctaatggatccctcattcgcgagcgctggttccaaaattatggtgaatacctcgacatcctggcgatctcatgcgatagttttgatgaggaggtgaacgtgctgattggcagaggccaaggcaaaaagaaccatgtggagaatctgcaaaagttgagaagatggtgtcgggactacagggtcgccttcaagattaatagcgtgataaaccgcttcaatgtggaggaagatatgaccgaacagatcaaggctttaaacccggttagatggaaagtatttcaatgtctgctcatcgaaggggagaattgcggagaagatgccctgcgcgaggccgagcggtttgtgatcggtgacgaggagttcgagcgcttcctggaacggcacaaggaggtctcctgtctcgtgcctgaaagtaatcagaaaatgaaagacagctatctgattcttgacgagtatatgcggtttcttaactgcaggaagggaaggaaggatccatcaaagagtatattggacgtgggagttgaggaagccatcaagttcagcggcttcgacgagaagatgttcctgaagcgcggcggtaaatatatttggagtaaagccgatctcaagctcgactggtag

SEQ ID NO: 131636 - DNA, 765 bp, synthetic construct
  misc_feature 1..765: note = Description of Artificial Sequence: Synthetic coding sequence
  source 1..765: mol_type = other DNA
atgctgcattcttctcattatcctgggatggagaaaatcaatttcagcggcggcgagcccttcctgcaggaccggggggagtacctggggaagctggtgaggttctgcaaagttgaactgcgcttacccagtgttagcattgtcagcaatggaagcttgatccgtgagcggtggttccagaattatggagagtacttggacatactggcaatctcctgcgatagcttcgacgaagaggtcaacgtcctgatcggcaggggccaggggaagaaaaatcacgtggagaatctgcaaaagttacggaggtggtgtcgagactaccgggtcgcatttaagattaacagcgtcatcaatcggttcaatgtggaagaagacatgactgaacagataaaagctctgaatcccgtacgttggaaagtgttccagtgtctgttaatagaaggcgagaactgtggtgaggatgcactgcgagaagcagaacgttttgtaatcggcgacgaggagttcgagaggtttctcgagcgccacaaagaggtctcctgtctagttcccgagtccaaccagaaaatgaaagactcataccttatcctggatgagtatatgagattcctgaattgccggaaggggcggaaggacccctctaagagcattttagacgtgggagttgaggaagctattaagtttagtgggttcgacgagaagatgttcctaaagcgcggggggaagtatatttggtcaaaagctgatctcaagctcgactggtag

SEQ ID NO: 131637 - DNA, 1674 bp, synthetic construct
  misc_feature 1..1674: note = Description of Artificial Sequence: Synthetic coding sequence
  source 1..1674: mol_type = other DNA
atgtataagcgaaacggacttatggcctctgtactcgtgacctccgcgactccacagggtagctctagctctgatagcctagagggccagtcctgcgattacgcctctaagagctacgatgctgtcgtctttgatgtgctcaaagtgacccccgaggagttcgcctcgcagatcacccttatggacattccagtgtttaaggcgatccagccggaggagctggcttcgtgcgggtggagtaaaaaagagaagcatagcctcgcccccaatgtggttgcctttacccgacgattcaatcaggtgagtttctgggttgtccgcgaaatactaacagcccagaccctgaagatacgagctgaaattttaagccactttgtaaaaattgcaaaaaagttactagagctgaataatctgcattctctcatgtccgtggtctcagcactgcagtctgcccctatcttccggctgacaaaaacatgggccttgctaaaccgtaaggacaaaacaactttcgagaagctggattatctgatgagcaaagaggataactataagcggacgagggagtatataagatctctgaagatggtaccctcaattccttatctgggcatctacctgcttgatctgatatatattgattcggcttatcccgccagcggaagcatcatggagaacgaacagcggagtaaccagatgaacaacattctgcggattattgccgatctacaggtcagctgttcgtatgaccacctgaccaccctgccgcacgttcagaagtacctgaaaagcgtgaggtacattgaagagctccagaagttcgtggaggatgataactataagctctctcttaggatcgagccaggatcttcctcaccacgcctcgtctccagtaaggaggacctagcagggccatcagccggttccgggagcgcccggttctcccggcgccctacctgtccggacacttccgtcgctgggtcattgcccacccctcccgttccccgccacaggaaatcgcattctcttggaaataacatgatgtgtcaactgtccgtagttgaatccaagagcgcaacattccccagtgaaaaggccaggcacttgctagacgactccgtgctggaaagccgtagccctaggcgcggcctggcactaacctcgagcagtgccgtgaccaacggcctgagcctggggagtagtgagagctctgaattttccgaggagatgtcgagcgggctggagtctcctactggaccgtgcatttgctctctgggtaattctgcagccgtgcccacaatggaaggacctctcaggagaaaaacactgcttaaagagggacggaagcctgccctgtctagctggactcgctactgggtgatcctgtcaggcagtacattattgtattatggtgccaagtccctgagaggtaccgacaggaaacactacaaaagcacccccgggaagaaggtttccatcgtgggctggatggtacagctgccggacgacccagaacacccagacatcttccagcttaacaaccccgacaaaggtaatgtgtacaaattccagactgggtctcgcttccatgctattctgtggcataaacacctggatgatgcttgcaagtctaacaggccacaagtcccagccaacttaatgagcttcgagtag

SEQ ID NO: 131638 - DNA, 522 bp, synthetic construct
  misc_feature 1..522: note = Description of Artificial Sequence: Synthetic coding sequence
  source 1..522: mol_type = other DNA
atgtacaaacgcaatggcctgatggcttccgtgctggtgacaagcgcaactccccaaggctccagctcttcagattccctggaagggcagtcgtgcgactatgcctccaaatcttacgacgcagtggtgtttgatgtccttaaggtgacaccagaggaattcgctagtcaaattaccctgatggacatccccgtgtttaaggcgattcagcccgaggaactggcttcttgtgggtggtccaaaaaagagaagcacagcctcgctcccaacgtcgtagccttcacaaggcgcttcaatcagaagctcttagaactgaacaatcttcatagcctgatgagtgttgtgtcagccctgcagagcgcacctatctttcgattgaccaaaacctgggcactgcttaaccgtaaagataaaacaactttcgagaagttagactatttaatgtctaaggaggataattataagaggacacgagagtacatccgatctcttaagatggtgccgagcatcccgtacctctag

SEQ ID NO: 131639 - DNA, 1590 bp, synthetic construct
  misc_feature 1..1590: note = Description of Artificial Sequence: Synthetic coding sequence
  source 1..1590: mol_type = other DNA
atgtataagaggaacggattgatggcctctgtcctcgtgacctccgcaacaccccagggatccagcagcagcgattcactggaggggcaatcttgtgactacgcttctaaaagttatgatgcagtggtttttgatgttttgaaggtgactcccgaagagtttgcttcccagatcactctcatggacatccctgtttttaaagcaattcagcctgaggagctagcctcctgcggctggtccaagaaggagaagcattcccttgccccgaatgtggtagcgtttaccagaaggtttaatcaggtgtctttttgggtggtgcgggaaatactgactgcacagacacttaagatccgtgctgaaattctctctcacttcgtcaagattgcaaaaaagttactcgagttgaataaccttcacagtctgatgtcggtggtatccgcactccaatctgcgcccatctttcgacttacaaagacatgggccttattgaaccgaaaagataaaactaccttcgaaaagctggattacctgatgtctaaggaggacaactacaaacgcacacgggaatacatacgttccctaaagatggtaccatccatcccatacctgggtatttatttgttagacctaatttacatcgacagtgcctatccggctagcggctcaattatggagaatgagcaaaggtcgaatcagatgaacaatatcctgaggattatagctgacctccaagtgtcatgtagctacgaccacttgacaacacttccacacgtacagaagtatcttaaatctgtcaggtacattgaggagctgcagaagttcgtcgaggacgacaactataagctcagcttgcggatagagccagggagctcctctccccgcctggtaagcagtaaagaagatctggctggcccctccgcgggctctggatctgctcgtttttcacggcggcccacatgccccgacaccagtgtcgctggcagcttgcctacccctcctgtgccacggcataggaagagccactctttaggcaacaaccgcggcagactatacgccactcttggcccaaattggcgagttcctgtgcgcaatagcccacggacacggtcctgtgtgtattcccccactggcccctgcatttgctctttagggaacagtgctgcagtcccaacgatggaagggcctctgcgcagaaagactctccttaaagaggggcggaaaccagctctgtcgtcctggacaagatactgggttatcctgtctggttctacattgctctattacggagctaagagtcttagggggaccgacagaaagcacgtgtcaatagtcgggtggatggtccagcttcccgatgacccagagcaccctgatatattccagctgaataaccccgataagggaaacgtttacaaatttcagaccggtagtagattccacgccattctctggcataagcatctggatgatgcctgcaaatcaaaccgcccacaggaggcaggcgccgcacccggacctaccggaactgacagccacgaagtggaccaccttgagggaggagccggaaaggaggccggaccctgtgcttag

SEQ ID NO: 131640 - DNA, 918 bp, synthetic construct
  misc_feature 1..918: note = Description of Artificial Sequence: Synthetic coding sequence
  source 1..918: mol_type = other DNA
atgtataagagaaatggactgatggcttcagtcctggtgactagtgctacaccacaagggtccagctccagcgatagcctggaggggcagtcttgcgactatgcgtccaagagctatgacgccgtcgtatttgatgtgctcaaggtgaccccggaagaatttgcatcacaaataacactgatggatattcccgtattcaaagctatccagcccgaggagctggcttcttgcggctggtccaagaaggaaaaacattccctcgcgcccaacgtggttgcctttactagaagattcaaccaggtcagtttttgggttgtcagagagatccttacggcgcaaaccttgaagatcagagctgaaattttatcacattttgtaaaaattgcaaagaagttactggagttgaataatctccacagtctgatgagcgtcgtttctgccctgcagtcagcaccaattttccgcctgaccaaaacctgggcgttgctcaaccgcaaagataagactacctttgaaaaattggactacctcatgtctaaggaagataattataagagaaccagagagtacatcagaagcttaaagatggtacctagtataccatacctgggaatctacctactagacctcatatatatcgatagtgcttatcccgcctcaggctctataatggagaacgagcagaggagcaaccagatgaacaacatcttacgcattatagctgatttgcaggtgtcatgttcttatgaccatcttactaccctgcctcatgtgcagaagtacctgaagagcgttcgctacatcgaggaactgcagaaatttgtggaagacgacaattacaagttgagtctgaggatcgaaccaggatcctcaagcccccggcttgtctcatctaaggaggatctggccgctatgtag

SEQ ID NO: 131641 - DNA, 642 bp, synthetic construct
  misc_feature 1..642: note = Description of Artificial Sequence: Synthetic coding sequence
  source 1..642: mol_type = other DNA
atgtacaagaggaatggattaatggcctctgtcctggtgacgtcagcaacgccccaagggtcttcatcctccgatagcctcgaaggacagtcgtgcgattatgcttctaaatcttatgatgctgtcgtgttcgatgtactcaaagtgactccggaggaatttgcatcccagattactttgatggacatccctgtctttaaagcgattcaacctgaggagctggcatcttgcgggtggagcaagaaggaaaagcatagcttggccccaaacgtggtagccttcacacgtaggttcaatcaagtttctttctgggtggtacgggagatcttaacggcccaaacgctgaagatccgcgccgagatcttaagtcacttcgtgaagatcgctaagaaactactcgaactcaataatcttcatagtcttatgagtgtcgtttccgccctgcagagtgcccccatatttcgactaactaaaacctgggccctactaaataggaaggacaagaccacttttgaaaaattggactatctgatgtccaaagaagataactataaaagaactcgtgagtacattcgctccttaaagatggttcccagcataccctaccttgggaggagtttgaactggctgatcttcttttag

SEQ ID NO: 131642 - DNA, 327 bp, synthetic construct
  misc_feature 1..327: note = Description of Artificial Sequence: Synthetic coding sequence
  source 1..327: mol_type = other DNA
atgtacaaaaggaacggcctgatggctagcgtgctcgtgactagcgctaccccacaagggagttctagcagcgattctctggagggccaatcatgtgattacgcatccaaaagctacgatgccgtggtttttgatgtcctgaaagtcacacctgaggagttcgcttcgcagattacacttatggatatccccgtctttaaggccatccaacctgaaaaggggtggcctgcacggatggaagacagtctgcagaagagcactgtttccagccgaccccacgacaccctgcagtttcgcaagactcttcctgtggggcctggcacctag

SEQ ID NO: 131643 - DNA, 1155 bp, synthetic construct
  misc_feature 1..1155: note = Description of Artificial Sequence: Synthetic coding sequence
  source 1..1155: mol_type = other DNA
atgtataagcgtaatggattgatggccagtgttctggtgacttccgccacaccacaggggagttcgtccagtgactccctggaggggcagtcttgcgactacgcatctaagtcttatgacgcagtagtctttgacgtattgaaggtaactccagaggagttcgctagccagattacactgatggatatacctgtgttcaaagctattcagccagaggaactagcctcttgtgggtggtcgaagaaggagaagcattccctggcacccaacgtggtggcatttacgaggaggtttaatcaagtgtctttttgggtagtccgtgagatcctgactgcacagaccctgaaaattagagcggagattctgtcacactttgtcaaaatcgcaaagaaactccttgagctgaataatcttcattcgctcatgtccgttgttagtgccctccagtcagctcccatctttcggttgacaaagacatgggccttgttgaaccgcaaagacaaaaccaccttcgagaagctggactacctgatgtccaaagaagataactataaacggacaagagagtacatccgaagtttaaagatggtaccatccattccctatctaggaatctacctgctcgatctgatctacatagactctgcgtatcccgccagcgggtctatcatggagaatgagcaaaggtccaatcagatgaataatatactcagaattatcgccgatcttcaggtgtcttgtagttatgaccacctgacgactctgccccacgttcagaagtacctcaaaagtgtcaggtacatagaagagttgcaaaagtttgttgaggatgataattacaaactgtccctccgcatagagcccggaagttcttccccccgtttggtctcaagcaaggaggaccttgcagtgtctcacctgagctcgttgtcccatcagggtcaggcagaagaggcgcggctgaagccaacatctggacaacatcctgcctggatgtggccatcttccagcagggttcccgctgcccctcctgcttctgccgcccccagatctccgtggccacgtaacctgcggaacgaccagggtcagcctggcgctgtggccctgacctgcaacccttccactctgggctctagatccagaagaatcacatag

SEQ ID NO: 131644 - DNA, 1614 bp, synthetic construct
  misc_feature 1..1614: note = Description of Artificial Sequence: Synthetic coding sequence
  source 1..1614: mol_type = other DNA
atgtataaacgcaacggattgatggcctctgtgctggtgacctcagccactcctcagggctcaagcagttctgattcgctcgaaggacaatcttgtgattatgctagcaaaagttatgacgccgtggtgttcgatgttcttaaagtaacgcctgaggagtttgcaagtcaaattactctgatggacattcccgtgttcaaggctattcaacccgaagaacttgccagttgcggttggagcaagaaagagaaacacagtctcgcaccaaatgtggtagctttcactcgcaggttcaatcaggtatcgttctgggtggtacgagaaatactcaccgcccaaactttgaaaattagagcagaaatcctatcccacttcgtgaagattgccaagaagctgcttgagctgaataaccttcactcgctgatgagcgttgtaagtgccctgcagagcgcccccatattcagactgaccaaaacctgggcgctccttaaccgcaaagataagactacgtttgagaaactggactatcttatgagtaaggaggacaattataagagaactagggagtacatcagatcccttaagatggtgccttccatcccctacctagggatttatttactggatttgatttacatcgactctgcatatccagcctctggcagcataatggaaaacgaacagagatcaaaccaaatgaacaatatcctgcggatcattgccgacctccaggtaagctgctcatatgaccacctcaccacgttgcctcacgtccagaaatacctgaagagtgtacgctacattgaagaacttcagaaattcgtggaggatgataattataaactgtccctgcgcatcgaaccagggagctcatctcctcggctggtctccagtaaagaggatctggccggcccatctgcaggctccggtagtgcacgcttttcccgccgtcccacctgccccgatactagcgttgccggatctctccccacgcctccggtaccccgtcatcgcaaatcccacagcttgggcaataatcgcgggcgcttatatgctactctcggccctaattggagagtaccagtccgcaattccccaaggaccaggagctgtgtttacagccctacaggaccctgtatctgttccttagggaatagcgctgcagtcccaaccatggagggtcccctgagaagaaagactctgctcaaggagggaagaaaacccgcactatcgtcctggacgcgctactgggtgatactcagcggaagcacactgctgtactacggagctaaaagtctgcgaggcacggatcgcaaacactacaagtctaccccgggcaagaaggtgagcattgtcggatggatggtacagcttcctgacgaccccgagcatccggatatattccagttgaacaacccggataaaggaaacgtctacaagttccaaacaggctcacgattccatgccatcctctggcataagcatttggacgatgcttgcaagtccaatcggccgcaggaggctggtgctgccccaggcccaacaggaaccgactcccacgaagtagaccacctggaggggggcgccggaaaggaggccggaccatgtgcttag

SEQ ID NO: 131645 - DNA, 462 bp, synthetic construct
  misc_feature 1..462: note = Description of Artificial Sequence: Synthetic coding sequence
  source 1..462: mol_type = other DNA
tagaatagccctcgaactcgctcttgtgtgtacagccctacagggccctgcatatgttctcttggcaatagcgcagcggtgcccacgatggagggccccctgcggcgtaaaaccctgctgaaggaagggcggaaacccgccctaagtagctggacacggtattgggtaatcctgagcgggtctaccctgctctactatggggcaaaaagcctgcggggtaccgacaggaaacactacaaatccacccccggaaagaaagttagcattgtgggctggatggtgcagctccctgatgatcctgaacacccagatattttccagctgaacaatccggataaaggtaatgtatacaagtttcagacagggtctaggttccacgcgattctgtggcataaacatctggatgatgcctgcaagagcaacagaccacaagtgccagccaatctgatgtcgtttgagtag

SEQ ID NO: 131646 - DNA, 6252 bp, synthetic construct
  misc_feature 1..6252: note = Description of Artificial Sequence: Synthetic coding sequence
  source 1..6252: mol_type = other DNA
atgttctccaaaaagccgcatggtgatgttaaaaagtccacgcagaaagtactggatacaaagaaggacgcgcttacccgactgaaacacctgcgtatagtgattgaaaatgctgagtccatagatctcaaacagttcttcgaccagcatttttcccatatttactacgttttcttcgagaactttgtcaccatagaggcctccttaaagcaaaaggggcataagtctcaacgggaagagctagacgcaattctgttcatattcgagaaaatcctccaattgctgccagaacgaatccaccaaagatggcaattccattctatcggcctgatcctcaagaagctgctgcatacaggcaacagtttgaagatccgtcgcgaaggagtgcgcctatttctgctgtggctccaagccttgcagaataattgttccaaagaacagctgtggatgttttcttgcttgatcccgggcttctccgcccctcagtctgagcacggccctcggaccctggacaaccttattaaccctcctctgaaccttcaggaaacgcaagtaacaatcgaagagattaccccgttagttccgcctcagagtggcgacaagggacaggaagacctgacaagctactttctcgaagccctactgaagtatattgtcatccaggtgaaaagcctcgaatggaaaaataaagaaaatcaggaacgagggttctcatttttattttcccacttcaagaaatattacctgccctacatattccccaatatctgcaaagagaactctctgtaccatccgatcctggacattccccagatgcgacccaagccccattatgtcgtaatcaagaaagacgctgagaccaatgaggcaatttactgcaccaaagaaccctttattaaggcacgagtgattgtcataagatggctggttagcttctggctcgagcctaagccacacaccgggccccacatccctggcatggagggtgaagtactgccaaagaacatacagcgagcggcagcctcacttgtcagtcgcgaggaaagcaagaatgataacgcagacaaaaccgaccgtaccacggagcctgaacaaagccattctaatacctcaaccctaacggagagggaaccttcttcatcaagcctctgtagcattgacgaggagcaccttacagatatcgagatcgtccgacgggttttctcttccaaaagaagcaacgtgaatttcgtgaccgaaatcttcagacaggcctttctgctcccaatctgcgaggccgcggcaatgcgcaaagtagtgaaagtttaccaggagtggatccaacaggaagaaaaacccctgttcatgcaggagcccgaggaaattgtgatcaccagttccgaccttccatgtatcgagaatgttacagatcacgatatctccatggaagaaggtgagaaaagagaggaggagaacggtacaaacactgccgatcacgtgcgaaatagcagttgggccaaaaacggatcctaccagggcgcactacacaatgcgagtgaggaggctacagagcagaacatcagggccggaactcaggcagttttgcaagtgttcatcattaatagctccaatatcttcctgttagagcccgccaacgaaattaagaacctgttggatgagcacaccgatatgtgtaaaaggattctgaacatttacaggtacatggtggttcaggtctcaatggataagaaaacctgggagcagatgctcctggtgctgctgagggtgaccgaatcagtcctcaaaatgccgtcccaggcctttctgcagtttcaagggaaaaagaacatgactctggcggggcggcttgctgggccattgtttcagacactaatcgtggcgtggatcaaagctaaccttaatgtgtacatatcaagagagctgtgggatgacttgctcagtgtgctgagttcacttacatactgggaagaattggccacagagtggagccttacaatggagactttgacgaaagtgctggcccgaaacctgtatagcctcgacttaagcgatctcccattggataaactgtcagaacagaaacaaaaaaagcacaagggcaaaggcgtgggccacgaatttcagaaggtgtccgtggacaaatcattctcacggggttggtctcgcgatcaacctggacaggcccccatgcgccagagaagcgccacaactaccggaagccctggaaccgagaaggccagatctatagtccgccagaaaacggtagcaatgcgaagccggagcataggagagtgcgccctgcccagcgcgtacatccgatccgctaagagcgctccagtgctgattcacaccagtaaaccgttcctgcccgatatcgtcctgactccattgtcagacgagctgtctgacatcgacgatgctcaaattctgccacggtcaaccagagtgagacacttcagccaaagcgaagaaaccggtaatgaagtgttcggggcactgaatgaggagcagcctttaccccggagcagtagtacgtccgacatcctggagccattcactgttgaacgagcaaaagtcaacaaggaggatatgagtcagaagctgccaccactgaattctgacatcgggggaagttcagctaacgtgcctgacctcatggatgagttcatcgcggagcgcctgcgtagtggaaacgcctccacaatgactcggcggggctcttctccaggatccttagagattccaaaggacctccccgacatcttaaacaagcagaaccagatgaggccaatcgatgacccgggcgtcccctctgagtggaccagtccagcctcagccggaagtagtgatctgatttcatccgactcacactcggactccttcagtgcttttcagtacgatggccgaaaattcgacaactttggctttggtacagacaccggagtgacctcctcagctgatgtcgacagcggttccggccatcaccagagcgcagaagagcaagaggtggccagtctaactaccctgcatatcgactctgaaacgtccagtctcaaccagcaggcatttagtgcagaagttgccactataaccgggtctgaaagcgcctctccggtgcatagtcctctcggctctcggagccaaacacccagtcccagtacactgaatattgatcacatggagcagaaagatctgcaattggacgagaaactgcatcattctgtcttgcagacacctgatgatttggagatttcagagttcccttctgagtgctgttctgtgatggccgggggcacattaacaggttggcacgctgacgtggccaccgtgatgtggaggcggatgctaggcatcctgggagacgtgaactcaataatggaccctgagattcatgctcaggtgtttgattatctttgcgaattgtggcagaatttagccaaaataagggacaacctgggaataagcactgataacttgacatcaccctcacctcctgtcctgataccacctttacgcattctgactccgtggctatttaaagctacaatgttgacagataagtataaacagggtaagctgcatgcctataaacttatatgtaataccatgaagcgccggcaggacgtttcccccaatagggacttcttgacacacttctataatattatgcactgcggtctcctgcacatcgatcaggacatagtcaacacaatcatcaagcactgctcacctcagttcttctctctcgggctgccaggagctactatgctgatcatggacttcatcgtggccgccgggagggtcgcatcttcagcctttcttaacgctcctagggtagaagcacaggtgctgctcgggtccctggtgtgcttccccaacttatactgcgagctgccctccctgcacccaaacatccctgacgtcgcggtgtcacaatttaccgatgtgaaggagctcataataaaaacggtcctttccagtgctcgggatgaaccaagcggtccggctcgttgcgttgccctatgttcccttggaatttggatctgtgaagagctagttcacgagtcccatcacccccagatcaaggaagcgcttaatgtgatttgtgtctccctaaaattcaccaataagaccgtcgcccatgtcgcgtgtaacatgctgcatatgcttgtgcattacgtgcctaggctccagatttaccagcctgattccccgctgaaaatcatccagattctgattgccaccattacgcacctccttccctccacggaggcttcctcatacgagatggacaagagacttgtagtgtcactgctgttgtgtttgttagactggattatggcactgcccctcaaaaccttgctgcagccttttcacgccactggggcagagtcagacaaaaccgagaaaagcgtgttaaactgcatctacaaagtgctgcacggatgtgtgtatggagcacagtgctttagcaatccccggtatttccccatgtccctgagtgaccttgcgagtgtggactacgatccattcatgcatcttgagtccttgaaagagccagaacccctgcactcgcccgatagtgagagatcaagcaagttacagccagttaccgaggtcaaaacgcagatgcaacatggcctaatttcaatagcagcccgtaccgtaatcacgcatctcgtgaaccatctaggacactacccaatgagtggtggacctgccatgttgacgagccaggtttgcgagaaccacgataatcattactctgagtctactgagctgagcccagagctgtttgagtctcccaacatacaattttttgtgcttaacaatactaccctggtaagctgtatacagatcaggagcgaagagaacatgcccggaggtggtttgtccgccgggcttgcaagtgctaactcgaacgtgcgcattatagtcagggacctgtccggtaagtactcatgggactccgctatcctgtacggacctccaccggttagtggacttagcgagcctacttcatttatgctgtctctgtctcatcaggagaagccagaagaaccccctaccagcaatgaatgcctggaggacatcacagtaaaagacggccttagcctgcaattcaagaggtttagggaaacggttcctacctgggacacaattagagatgaggaggatgtcctcgatgagctacttcagtatctgggtgttacatcccccgaatgtctccaacgcaccggaatctcgcttaacatccctgctccccagcccgtgtgtatcagtgagaaacaagagaatgatgttattaacgcaatcctaaaacagcacaccgaagagaaggaatttgtggaaaaacacttcaatgatctgaatatgaaggctgttgagcaggacgaaccaatcccacagaagccacagtccgcattttattactgtcgtctgctactttctattctgggcatgaacagctgggacaagcgtaggagttttcacttactcaaaaaaaacgaaaagctgttacgcgagctccgcaacctcgattccaggcagtgcagggagactcataaaatagccgttttctatgttgcagaaggtcaggaggataaacacagtatcctcactaacactggggggtcacaggcttacgaagatttcgttgccgggctcggttgggaggtgaacctgacaaaccattgtggattcatgggggggctgcagaagaacaagagcactgggctcaccaccccgtactttgcgacatccacagtcgaggttatttttcacgtatctacgcgcatgcccagcgacagcgatgactccctgacaaagaagctccggcatttaggtaacgacgaagtccacatcgtgtggtcagagcataccagagattataggagaggcattattccaacagagttcggagacgtgctgattgtaatctatcctatgaagaatcatatgttcagcatccaaatcatgaaaaaacctgaggtgcctttcttcggaccactgtttgacggggcgatcgtgaacggcaaggtcctccctatcatggtccgggctacagcgatcaacgccagcagagcactgaaatccttgatcccactgtatcagaacttctatgaagaaagagcccgatacttgcagaccatagtccaacaccatttggagcccacaacgtttgaggattttgctgctcaggtcttcagtcctgctccttaccatcacttaccttccgatgccgaccactag

SEQ ID NO: 131647 - DNA, 6252 bp, synthetic construct
  misc_feature 1..6252: note = Description of Artificial Sequence: Synthetic coding sequence
  source 1..6252: mol_type = other DNA
atgttctcaaaaaagccacacggcgatgtgaaaaagtctactcagaaggtgttggacaccaaaaaagatgcccttacccgactgaagcaccttcggattgtgattgagaacgctgagtccatagacctcaagcagttttttgatcagcattttagtcacatctactacgtcttctttgaaaatttcgtgacaattgaagcttctctgaagcagaagggacataaaagtcaaagagaagagttagatgccatacttttcatctttgaaaagatcttgcagcttttgccagaacgtatccaccagagatggcagttccattctatcggcctgattctgaagaagcttttacataccgggaactcactcaagatccggagggagggtgtacggctgttccttctgtggctgcaggctttacagaacaactgctccaaggagcagctctggatgttttcttgcttgatccctgggttcagcgccccccagagtgaacacggacccagaacccttgacaacctgatcaatcctcccctgaatctgcaagagacgcaagtcaccattgaagagattacccctcttgttccacctcagtccggagacaagggacaggaggacctgactagctatttcctcgaagctctcctgaaatacattgtgattcaggtgaagtctctggagtggaagaacaaggagaatcaggagcgagggtttagcttcttgtttagccacttcaagaagtactatttgccttacatctttcccaatatctgcaaggagaattcactatatcacccgattcttgatatcccccagatgcgccctaaaccacactatgtggttattaagaaagacgccgaaaccaacgaagctatatattgtaccaaggaacctttcatcaaagcacgcgttatcgtcatcagatggcttgtgagtttttggctggagcccaaaccacacactggcccccacatccctggcatggagggcgaagttttacccaagaacatccaacgagccgctgcatcactggtttcacgagaggaatccaagaatgacaatgccgataagacagacagaacaacagagcccgaacagtcccacagtaacaccagtaccctcaccgagagggagcctagtagtagcagcctttgtagcattgacgaggagcacctgacagatatcgagatcgttagaagggtgtttagttcgaagcggtctaatgtcaacttcgtgacagaaatctttaggcaggctttcctcttgccgatttgtgaggccgctgctatgcggaaagtcgtcaaggtataccaagagtggattcagcaggaggaaaagccactgttcatgcaggaaccagaggagatcgtgattacttcatcagaccttccctgtattgagaatgtgacagatcacgatatctcaatggaagaaggagagaagcgcgaagaggaaaacggaaccaataccgccgatcatgtacggaatagttcatgggcgaaaaatggatcctatcaaggcgctctgcataacgctagcgaggaggctacagaacaaaatatccgcgcgggcacccaggctgtgctacaggtatttattattaacagttctaacattttcttgctcgagccagccaacgaaatcaagaacttactggatgaacacactgatatgtgcaagaggattctgaacatttaccggtacatggtggtacaagtctcgatggataagaaaacgtgggagcaaatgttacttgtgctgctgcgcgtaaccgaatctgttctgaaaatgccatcccaggcgtttctacagttccaggggaagaagaacatgaccttggcggggcgattagctggtccgctgttccagacattaatcgtggcttggattaaagcgaatcttaatgtgtacatttcacgggagttatgggacgatttgcttagtgtcttaagtagcctgacttactgggaagagctagccactgagtggtcactcaccatggaaaccttaaccaaagtgctggcaagaaatctgtattcccttgacctgtccgacttgccactcgataagctcagcgaacaaaaacagaagaaacataaaggcaaaggggtggggcatgagttccaaaaagtgagcgtagataagagtttctcgagggggtggtccagagatcagcccggtcaggcccctatgagacaacggtcggctaccaccaccggcagtcccggaaccgagaaagcacggagtatagtccggcaaaaaactgtagatattgatgacgcacaaatcttaccaaggtcaactcgggtaaggcatttctcgcagtctgaggaaacaggcaacgaggtcttcggcgcactcaacgaggagcagcctctgcctcggtcctcatccacttcagacatccttgagccattcacggtggagcgggcaaaggtcaacaaggaggatatgtcacagaagttgcctccactgaactcagacattggcggctcttcagctaacgtcccggatctcatggacgaattcattgccgagaggctgcgcagcggcaacgccagtacaatgacccgacgggggtccagtcctggcagcctcgaaatccccaaagacctgcccgatattcttaacaagcaaaaccagatgaggccaatcgacgacccaggcgtgccgtcggaatggacctcgcctgccagcgccggcagtagtgatctcatcagtagcgacagccacagcgacagcttttccgctttccagtacgatggcaggaagttcgataactttggtttcggcacagataccggtgtaacctcatctgccgacgtggacagcgggagcggccaccaccagtcggcggaggaacaggaagtagcaagtttaacaaccctccatatcgattccgagaccagctcactgaaccaacaggctttcagcgccgaggtggccacgattaccggctcagagagcgcctctccagtccattctcctttggggagcagatcacagacacctagcccttccaccttgaatattgaccacatggaacagaaggatctgcaacttgacgagaagttacaccactcagtgctgcagaccccagatgatttagagatctccgaattcccatccgagtgttgttctgtcatggcggggggcacgctgacaggttggcacgcagacgttgcgaccgttatgtggcggaggatgcttgggatcctgggcgatgttaacagtatcatggatccagaaattcacgcccaagttttcgattacctgtgcgaattgtggcagaatctcgcaaagatcagggacaatctggggattagtacggataacctgacatctccctccccccccgtcctcattcctcctcttagaattttaactccttggttgttcaaagccacaatgttgacggataaatataaacagggcaagctccacgcctataaactgatctgtaatactatgaagcgtcgccaggacgtaagtcccaatcgcgattttctgacccatttctacaatattatgcactgtggattattgcatatcgatcaggacattgtgaataccataatcaagcactgcagcccccagttcttctcacttggcctcccaggggctaccatgctgatcatggattttattgtggctgccgggcgcgtggcctccagcgcattcctgaacgccccaagagtggaggcacaggtgctcttaggatccctcgtctgtttcccgaacctgtattgtgagttaccaagtctccaccctaatattccagacgtggcggtgagccaatttacagatgtgaaggaacttatcatcaaaacggtactaagctccgcgagagatgagccatctggcccagcacggtgtgtggccctttgctccctcgggatttggatctgcgaggagttagtccatgagtcccaccacccccagatcaaagaagccctgaatgttatatgcgtcagcctcaagttcacaaacaaaacagtggcacatgtggcctgcaacatgcttcacatgctcgtccactacgtccctcggctgcaaatctatcaacctgattcacctctgaagatcatacagatcctgatcgccacaattacccatcttttgccgagcacagaggcctcttcctacgagatggataaacgactggttgtctctctgttgctgtgcctgctagattggattatggcccttcctctgaagacactattgcagcctttccatgctactggcgccgagtctgacaagaccgaaaagagcgtgctgaactgcatttacaaggtactgcatggatgcgtgtacggcgcccaatgcttttccaacccacgttatttcccaatgtctctctcagacttggcttctgttgactatgatccgttcatgcatctggaaagcctgaaggagcctgagccactccactccccagactccgaacgatcctcgaaactgcagccagtgactgaggttaagactcagatgcagcacggacttatctcaatcgccgctcgaacagttattacgcatctcgtcaaccatctgggccattatcccatgtccggcggcccggccatgctaacttcacaggtgtgtgaaaatcatgacaaccactactcggaaagcactgaattatcgcctgagctgttcgagtcaccaaacatccagttcttcgttcttaacaacacaacactggtgtcatgtattcagatcaggtctgaggagaacatgcctggaggcgggctgtccgctgggctggcgtcagctaatagcaacgtgcgcattatcgttagggatttgtccgggaagtactcctgggactcggctattttgtatggcccaccaccggtaagcggtctgagtgaacctacctcttttatgctgtctctgtcacaccaagaaaagcccgaggaaccccccaccagtaatgaatgccttgaggatattaccgtgaaggacggtctaagcttgcaattcaaaaggttccgggagacagtaccaacctgggacactatccgcgacgaggaggacgtgttggatgaactactgcagtacctcggtgtaacgtcaccagaatgcttacaacggacagggatctccctgaacatccctgcccctcaaccggtctgtatttccgaaaagcaggagaacgatgttattaatgcgatcctgaagcagcacacagaggagaaagaattcgttgagaagcactttaatgaccttaacatgaaggccgttgaacaagatgagcctataccacaaaagccccagtccgccttctattattgtagactcctactgtcaattcttgggatgaactcctgggacaagagacgatcctttcacctgctgaaaaaaaatgaaaagctgctacgggaactgaggaacctggattcaaggcagtgtcgggagacccataagattgcagtcttctatgtcgccgagggacaagaagacaagcattccatcctcacgaacactgggggatcccaggcatacgaagacttcgtggcaggcttaggctgggaggttaatctgacaaaccattgtggattcatggggggactgcagaagaataaatctacaggactgaccaccccatattttgcgaccagcacagtggaggtcatttttcacgtgtcaaccagaatgccttccgatagtgatgacagcctcacaaaaaaactccggcatctaggcaatgatgaagtgcatatcgtctggagcgagcacacaagggactataggcggggcatcattcctaccgaattcggtgatgtactgattgtaatttatccaatgaaaaaccacatgttttctattcagattatgaaaaaacccgaggtccctttcttcgggccactctttgacggagcaatagtgaacggtaaagtgttgcccatcatggtgagggctacagcgataaatgcttccagagccctcaaaagtctcattccactgtaccagaacttttacgaagaacgcgcgcgctatcttcagacaatcgtacagcaccacctggagcccacaactttcgaagatttcgccgcccaggtttttagtccagcaccttaccaccatctgcccagcgatgcagggtcataccccgagatacttccctccgaaacccccacagccacccaagtggatggggcagatttagcaagcccgatgagtcctcgtacttctaagtcacgcatgtccatgaaacttcgacgcagtagtggctcagctaacaagagttag

SEQ ID NO: 131648 - DNA, 6222 bp, synthetic construct
  misc_feature 1..6222: note = Description of Artificial Sequence: Synthetic coding sequence
  source 1..6222: mol_type = other DNA
atgttttccaagaaaccccacggcgatgtaaagaagtctacccagaaggtgttggatacgaagaaggacgcactcacgcggcttaaacaccttcgcatagttatcgagaatgcggaatctattgatttgaaacaattcttcgatcagcacttttcccatatttactatgtgttctttgagaatttcgtgacaattgaggcctccctgaagcagaagggtcacaagtcacagagggaagaacttgacgccatcctgtttatctttgaaaagatcctgcagctcctgcctgagcggatacaccaacgatggcagtttcacagtattggcttgattctcaagaagctgctgcatactggaaacagcctgaaaatccggcgggaaggagtgcggctctttctgctttggttacaggctctgcagaacaattgtagtaaagaacagttatggatgttttcctgtctcatcccaggtttcagtgccccccagagcgaacacggcccgaggaccttggacaacctgatcaatccccctttaaacctgcaggagacgcaagtgaccattgaagagattacccccctcgtgcctccacagtctggcgacaagggtcaggaagaccttacctcttattttctagaagcactgttaaaatacattgtcatacaggtgaagtccctggagtggaaaaacaaggaaaatcaggaaagagggttctcttttctcttctctcactttaagaagtactatctaccatacatcttccctaatatttgtaaagaaaacagcctgtaccaccctatactcgatatcccccagatgcgcccaaagcctcactatgtggtcatcaagaaggatgccgagaccaacgaggccatatactgcacaaaggaaccttttatcaaggccagagtgattgtgatcagatggttggtttcattctggcttgaaccaaagcctcacacaggcccgcacatccccggaatggaaggtgaggtcctccccaagaacattcagagggctgcagcctccctggttagcagggaagaaagcaagaacgacaatgccgacaaaacggaccggactacagagccagagcagtcacactctaataccagcaccctgacagagagagagccatcctcttccagtctgtgcagtattgatgaggaacatctgaccgacatcgagatcgtgagacgtgtttttagttctaagagatctaatgtcaacttcgttactgaaatctttcgtcaagcattcctcctccctatttgtgaagccgccgctatgcggaaagtcgttaaagtgtaccaagaatggattcagcaggaagaaaagccgctatttatgcaagagcccgaagagatagtgattacgagctccgatttaccatgcatcgagaacgtcacagaccacgacatcagtatggaggaaggcgagaaaagagaggaggagaatgggaccaatacagcggaccacgtgagaaacagcagctgggctaagaacggcagctatcagggggctcttcataacgcgtcagaagaagcaaccgagcaaaacatccgagccgggactcaggcagtgttacaggtttttattattaactcatcgaatatctttctgcttgagcccgccaatgaaattaaaaatctgctggacgagcacactgacatgtgcaagcggattttgaacatttaccgctacatggtagtgcaggtgagcatggacaaaaaaacctgggagcaaatgctgttagtcctgctgcgcgtgacggaatccgtgctgaagatgccctcccaggctttcctgcagtttcaaggcaagaaaaacatgacactggccgggagactcgctggaccactgttccagaccttgatcgtcgcttggattaaggctaatctcaacgtctatatttctcgggagctctgggatgacctgttatcagtcctgtcctccttaacatattgggaagagctggcgaccgaatggagccttacgatggagacactgactaaagtgctggcacgcaatctgtactctctagacctgtcagatctgcccctcgacaagttatccgagcagaagcagaaaaagcacaaaggaaagggagttggccacgagttccagaaggtgagcgtggacaaatctttctcccggggctggtctcgtgatcagccaggccaagcacctatgcgccagcgaagcgctacaacaacaggcagccccggaacagaaaaagcacgatccattgtccgacagaagactgtggacattgatgacgcccagatactcccccggtctactcgcgttaggcactttagccaatctgaagagaccggtaacgaggtgtttggagcgctcaacgaggagcaacctctgcccaggtcttcgtccacgtctgacatcctggaaccctttaccgtggagcgcgccaaggtcaataaggaagatatgagccagaagctgccccccctgaacagcgacatagggggatcttctgctaacgttccagatctaatggatgagttcatcgccgagcggctgagaagtggcaacgccagtactatgacccggaggggctctagcccaggatccctggagattcccaaggacctccccgacatcttaaataaacaaaaccagatgaggcctattgacgacccaggcgtgcccagcgagtggacgtcgccagcgtctgctggatcttcagacttaatttccagcgacagccactctgattccttctctgcattccagtacgacggacgaaaatttgataacttcggctttgggacagacacaggcgtcaccagctctgcagacgttgactctggctccggccatcaccagtccgctgaggagcaagaggtggccagccttactacccttcacattgatagtgaaactagttccctgaatcaacaagccttctcagccgaagtggctactattacagggtctgagagtgcaagccccgtgcactcgcccctcggctccagatcccagactccatctcccagtacacttaatatcgaccatatggagcagaaagacctgcagctggacgagaaattgcaccattctgtactgcaaaccccagacgacctggagatatcagaatttccttctgagtgttgcagcgtgatggcagggggaaccctcacaggctggcatgcagatgtggcaaccgtgatgtggcggaggatgcttggcattttaggagatgtgaatagcataatggaccccgaaatccatgcccaggtcttcgattacttatgtgaactttggcagaacctggccaagatccgggataaccttgggatttcgactgataaccttaccagtcccagtccccccgtactcataccgccactaagaattctgaccccttggttgtttaaggcaactatgctcaccgacaaatataaacaaggcaaacttcacgcatacaaactgatctgcaacaccatgaagcgccgacaagacgtatcacctaacagggactttctcacccacttttacaacattatgcactgtgggttgctgcacatagaccaggacattgtaaacaccattatcaagcattgctccccccagttcttttccctgggtttgcctggcgccaccatgttgatcatggatttcatcgttgcggccggccgcgtggcctcatcagcgtttctcaacgcaccccgcgtggaagcccaagtgctgttaggctctctggtatgcttcccaaatctgtactgcgagttgccttccttacaccccaacattccagatgttgcagtgtctcagtttactgatgtgaaagaactcatcattaaaacagttctgagcagtgccagagatgaaccatcgggccccgctcggtgcgtggcactgtgttccctgggtatttggatctgcgaagaactggtccacgagtcgcaccacccacaaatcaaggaagctctgaacgtgatttgcgtgtccttgaagtttactaataaaactgtggctcatgtggcctgcaacatgctgcatatgttggtccattatgtgcctagactccagatttaccagcccgactcacccttgaagattatccagattttgattgcaacaattacccatctgctgccaagcaccgaagcctcctcctacgagatggataaacggctggttgtctctctgctgctgtgcctgctggattggatcatggccctccctctgaaaacactcctccaaccctttcacgcgacaggcgctgaatcagacaagacagagaagtcagtcctcaactgcatctacaaggtactccatggctgcgtgtacggagcacagtgttttagcaacccaagatacttcccgatgtcattgtccgaccttgcttcggtagattacgaccccttcatgcaccttgaatccctcaaggagcctgagcccctgcatagtcctgacagcgagcggtctagtaaactccagcctgtgactgaagtcaagacccaaatgcagcatgggttgatatctatagcggctcggaccgttatcacccatcttgtgaaccacttagggcattacccaatgagcggcggccccgccatgttgacctcccaggtatgtgaaaaccatgacaaccattatagcgagtcaacagagctatctcctgagttgttcgagtcacccaacatccagttcttcgtgctgaataacacaactcttgtgtcctgcattcagatccggagtgaggaaaatatgccgggtgggggtctgagcgccggcctagcttccgcaaattctaatgtgagaatcatagttcgagacctgtcgggcaagtattcttgggactccgcaatcctttatggaccaccacccgtctcggggctaagcgagcctacctcattcatgctttcccttagccaccaagaaaagccggaagagccccctacatcaaacgaatgtctcgaagacattaccgtgaaagatggacttagtctccaatttaagaggttccgggagacggtgccaacatgggatactattagagatgaggaggatgtgctcgatgaactgcttcaatatttgggcgtgacatcacccgagtgcctccagcgtactgggatctctctgaacattcctgcccctcagccagtctgcattagtgagaagcaggagaatgacgtgataaacgccatcctgaagcagcacactgaggagaaggagtttgtggaaaagcattttaacgatctgaacatgaaggcagttgagcaggatgagcccatcccccagaagcctcagtcagccttttactattgtcgtttactgctctcaatcctgggaatgaactcgtgggacaagagaaggtcgttccatctgctcaagaagaatgaaaagctgctgagggagctccgcaacctggactccaggcaatgccgggaaactcacaaaatcgcggtgttctacgtcgctgaaggccaggaggataagcattccatactcacgaataccggtggctctcaggcgtacgaggactttgtcgctggtttgggttgggaagtcaatctgaccaaccattgcggcttcatgggaggccttcagaagaataagtctacaggtttgactacaccatactttgcaacatcaaccgtggaggtgatattccatgtttctacacgaatgccctctgattctgatgacagcctgacgaagaaactgagacacctgggcaacgatgaagtgcatatcgtctggagtgagcatacacgcgattataggcgagggatcatcccaaccgagttcggagacgtactgattgtgatatatccaatgaagaatcatatgttctccattcaaattatgaagaagcctgaagtcccattctttgggccgcttttcgatggggctatcgttaatggcaaggtgctgcctattatggtgcgggccactgcgatcaacgccagccgggcactgaagagcttgattccactctaccagaacttttatgaagagagagcccgctacctccaaaccatcgttcagcaccacctcgagcccactacctttgaagatttcgcagctcaggtgttttctcctgcgccctaccaccatcttccgagcgacgctgaagagaggaatgcggtgattgttctgttcctgcctaaacccccactggagaatataggccatcttaaggcaccaacacagcgcttctaccccgttaaactgcctcagcagcgccgatag

SEQ ID NO: 131649 - DNA, 6150 bp, synthetic construct
  misc_feature 1..6150: note = Description of Artificial Sequence: Synthetic coding sequence
  source 1..6150: mol_type = other DNA
atgttttcgaagaagccccacggggatgtgaagaaaagcactcagaaggtgctggacaccaagaaggatgccctcacccggctaaagcacctgcgcatcgtgatcgaaaatgcggaaagtattgaccttaagcagttctttgaccaacacttctcgcatatttactatgtgttcttcgaaaacttcgtcacaatcgaggcgagcctgaaacagaagggccacaagtcacagagggaagaattagatgctatccttttcatctttgaaaaaatattgcagctgctgcctgagcgaattcatcagcggtggcaatttcactccattggactgattctgaagaaactcctgcacaccgggaatagcctgaagatcagaagagagggcgtaagactgtttttactctggctgcaggcccttcaaaataactgctccaaagagcagctttggatgtttagttgccttatccccggtttttccgcgccacaatcagagcatggcccgaggaccctggataatctgatcaatccaccactgaaccttcaggagacacaggtaacaatcgaagagatcacacctctcgttcctccacagtcaggggataagggccaagaggatctaacgagctattttcttgaggccctcctgaagtatatcgttatacaggtcaagagtctcgaatggaaaaataaagaaaatcaagagaggggtttttctttcctgttctcccactttaagaagtactacctgccttacatatttcctaacatctgtaaagagaactctttatatcaccctatcctggacataccacagatgcgacctaaaccacactacgtggtaatcaaaaaggacgcagagacaaacgaagctatctactgtaccaaggagcctttcattaaggcccgggtcattgtaatccggtggctcgtgtctttctggctggagcccaagccccacactggacctcatataccagggatggaaggtgaggttttaccaaagaatatccagcgcgccgcagcctcccttgttagcagagaagaatcaaagaacgacaatgctgataagaccgaccgtactaccgagccagaacagagtcacagcaataccagcacattgacagaacgcgaaccctcttcttcatccttgtgtagtatcgatgaggaacatctcacagacattgagatcgtacggcgggtgttttccagcaaaaggagcaatgtgaactttgtgaccgagatcttccggcaggcatttctgctccccatctgtgaggctgccgcaatgagaaaggttgtgaaggtctaccaagagtggatacagcaggaggagaagccgctcttcatgcaggagccagaggagatcgttatcacatcttcagatttgccttgcattgaaaatgtgactgaccatgacatctccatggaagaaggagaaaagagagaggaggagaacgggacaaacacggccgatcatgtgcgcaactcgagctgggcaaaaaatggctcgtaccagggcgcattgcacaatgctagtgaggaggcaactgaacaaaatatccgggccggtacccaagctgtcctccaggtgttcatcattaattcttctaacatttttctactagagcccgctaacgagatcaaaaatctgctggacgagcatactgatatgtgcaaacgaatccttaacatctaccggtacatggtggtgcaggtgtcaatggacaagaagacatgggagcagatgctcctggtactgctaagggtcacggagtcagtgctgaagatgccaagccaggcttttctgcagttccagggtaagaagaatatgaccctggctgggcggttggctggtcctttgttccagactctcattgtagcgtggatcaaagccaatcttaatgtctacataagccgcgagctgtgggatgacttgctttccgtgctgagctcactaacgtactgggaagaactggctacggagtggtccctgacaatggagactctgaccaaagtcctggcgcggaacttgtattccctggatctcagtgatctgcccctggataaattaagcgaacaaaaacaaaagaagcacaagggaaagggtgtgggacacgagtttcagaaggttagtgtggataagagcttcagcaggggttggtcaagggaccagccaggacaggctcctatgaggcagcggagcgctacaacaacgggtagcccgggtacagagaaagcacgatctatagttcgccaaaagaccgtggatattgacgatgcacagattctgccccggtccacccgagtgcggcacttctctcagtcagaagagactggcaacgaggtgttcggcgctctaaacgaagagcagcccctaccacggtctagtagcacttccgatattctggagcctttcacggtcgaacgcgccaaagaggccgaacagaatgccactagaggctctacagaggggagcgttcagagctgtaacggcctattttggaaggaaagctgtagcgacattggcggctcttccgcaaacgtgccagacctgatggatgagtttattgccgaaagactgagatctgggaatgccagcaccatgacaagacgaggaagttcacccggatccctggagataccgaaggacctgcctgatatcctaaataaacagaaccagatgcgccctattgatgaccctggggtgcctagtgaatggactagtccggcttccgctggctccagcgaccttatttcttccgatagccatagtgactctttcagcgcctttcaatatgacgggcgaaagttcgacaatttcggttttgggactgatactggcgtgacctcctcagcagatgtggatagcgggagtggccatcatcagtcagccgaggagcaggaagtcgcctcacttactaccctccacatagatagtgagacttcatcactgaaccaacaagcattttctgccgaggtggcaactatcactgggtctgagagtgcttcacccgttcactcacccctgggcagcagatcacagaccccttctccctccaccctgaacattgatcacatggaacagaaggatctgcagctggatgaaaaacttcatcacagcgtacttcagacccctgatgacctggaaatctctgaattcccatccgagtgctgctcagtgatggcaggcggtactctgacgggttggcatgcagacgttgccactgtgatgtggcggcgcatgttgggcatcctcggtgatgtcaatagcatcatggatcctgaaattcatgcccaggtctttgattatctctgcgaactgtggcagaacctggcaaagattcgggataatctaggcatcagcaccgataatcttacttcaccctcacctcctgtcttgatccccccactgagaatcctcaccccttggttatttaaagcgaccatgctcactgacaaatacaagcagggaaagctacatgcttacaagttgatatgtaataccatgaaaagacgacaagatgtgagccctaatagggattttttaacccatttctacaatattatgcactgtgggctgcttcacatcgaccaggacatagtgaacacaatcattaagcattgctctccccagttcttctccctgggtctgccaggcgccactatgttgatcatggactttatagtcgctgcaggccgtgttgccagtagtgctttcttgaacgcaccaagggtagaagcccaggtgctgttaggatctctcgtatgctttcctaacctgtactgcgagctgccctccctgcatcctaatatcccggacgtcgcggtgagtcaatttaccgacgtgaaggagctcataattaagaccgtgctgagttcagcccgcgacgagccctcaggacccgcccggtgcgtggccctctgttcactcggcatttggatttgcgaggagctagtgcacgagtctcaccacccacagattaaagaagccctgaatgttatctgtgtttctctgaagtttacaaataagacagtggcgcatgtcgcctgtaatatgcttcacatgctcgtgcactacgttccaagactacagatctatcaacccgattcacccttgaagattatccagattctgatcgctactattactcatctcctgccctcgacggaagctagcagctatgaaatggataaacggttggtggtgtctctgctcttgtgtctccttgattggataatggccctgccactaaaaaccttactccagccctttcatgccactggagccgagtctgacaaaacggaaaagtcagtattgaactgtatctataaggttcttcatggttgcgtctacggcgcccagtgcttcagcaatccccgctacttccctatgtccttaagtgacctggcatctgtcgattatgacccctttatgcacctggaatcccttaaggagccagagccccttcattcccccgacagcgaacggtcctccaaactacagcctgttacagaagtcaagacccaaatgcaacacgggctgatatccatcgccgcaaggactgtcattacccatctagttaaccatttgggtcattatcctatgagcggaggccctgccatgctgaccagccaagtgtgtgaaaaccatgataaccactattccgagagtaccgagttgtcccctgaactgttcgaatctcccaacatccagttctttgtcttgaacaacactacactggtgagttgcattcagatcagaagtgaggagaatatgccaggtggcggcctgagcgccggccttgcctctgcgaattcaaacgttcgaatcattgtgcgtgacttgtcagggaagtactcctgggatagcgcaattctctatggtccaccccccgtgagcggactgagcgagccgacgtcattcatgctaagcctttctcaccaggagaagcctgaggaaccaccaacgtcaaacgagtgcttagaagacataaccgttaaggatggactgtcgttgcagtttaagaggttcagggagactgttccaacctgggataccatacgcgatgaggaagatgttctggatgaacttcttcaatatctaggagtgacaagtccagaatgtttacagagaactggaatatcactcaatattcctgctccacagcccgtatgcatctcagagaagcaggagaatgatgtgatcaatgccatcttgaagcagcacacggaggagaaggaattcgtggaaaagcacttcaatgatttgaatatgaaggcggttgagcaggacgaaccgattccgcaaaagccccaatccgcattctactattgtaggttgttgctcagcatccttgggatgaatagctgggacaagagaagaagcttccacctacttaaaaaaaacgaaaaactgctgagagagctgagaaacctggactcaagacagtgtcgggaaacccacaagattgccgtattttacgtggctgaaggccaggaggataagcactcgattctcaccaacacgggcggtagccaggcctacgaggatttcgtcgcagggctgggttgggaggtaaatttgacgaaccactgtggcttcatgggcggccttcagaaaaacaaatcaactgggctgaccaccccctatttcgccacttcaaccgtggaggtgattttccacgtcagcacccgaatgccttccgacagcgatgactctcttacaaagaagctacgccacctgggtaatgacgaggtacatattgtttggagcgagcatacgagggattaccgccggggcatcatccccaccgagttcggtgatgtcctcatcgtgatctatccaatgaagaaccatatgtttagtatccagatcatgaagaaacccgaggtgcctttcttcggtcccctcttcgacggggccatagtgaatgggaaagtgctgcctattatggtgcgagctactgcgatcaacgcttcccgggccctgaagtctttgattcccctctaccaaaatttttacgaggaacgtgcccggtacctccagacgatcgtacaacatcacctcgagccaacaacatttgaagattttgccgcccaggtattctcccccgctccttaccaccaccttccgagcgacgctgaccactag

SEQ ID NO: 131650 - DNA, 6111 bp, synthetic construct
  misc_feature 1..6111: note = Description of Artificial Sequence: Synthetic coding sequence
  source 1..6111: mol_type = other DNA
atgttcagcaaaaagccccatggcgacgttaagaagagtacccagaaggtgctggatacaaagaaggatgctctgactaggctgaaacatctgcggatcgtgattgagaatgcagagagcattgatttaaaacaattcttcgaccagcacttctcacacatctactacgtattctttgaaaactttgtcaccatagaggcaagcctcaagcaaaaagggcacaaatctcaaagagaggaacttgatgccatcctcttcatattcgaaaagatacttcaactgctacctgagcggatccatcagcgatggcagtttcacagtataggacttatcctgaaaaaactcctgcacacaggcaattctcttaagatccggcgggagggggttaggttattccttctatggctgcaagccctacagaacaattgctctaaagagcagctctggatgttcagttgcctcatcccaggcttttcagctccgcaatctgaacacggaccaaggacactcgataatctgataaacccacctcttaatctgcaggaaacgcaggtgacaattgaggagatcactccactggtgccccctcagagcggcgataaagggcaggaggacctgacctcatactttctggaggccctgctgaaatacatcgtcattcaggtgaagtctctggagtggaaaaacaaggaaaatcaagagagggggttctccttcctttttagtcatttcaagaagtactacctcccctacatcttcccgaacatctgtaaagagaactctctgtaccatcccatcctggatatcccgcagatgagaccgaaaccacattatgtggttatcaagaaggatgctgaaacaaacgaggcgatttactgtacaaaggagccctttattaaggcgagagtgatcgtgatcaggtggctggtctctttctggttagagcctaaacctcacacgggcccccatatccccggcatggagggggaagttctgcctaaaaacatccaacgcgccgctgcctcattggtctcgcgcgaggaatctaagaacgacaacgccgataagactgatcgaactaccgaacccgagcaatcacacagcaatacctccaccctgacggaacgcgaaccgagtagcagtagcctctgcagtatcgacgaggaacacctcactgatatcgagatagtgaggagagtgttctctagtaagcgcagcaacgtcaacttcgtgaccgagatcttccgacaggcattcctgttgcctatctgcgaagccgccgccatgcgcaaggttgtcaaggtgtaccaagagtggatccagcaggaagaaaaacctctgttcatgcaggaacccgaggagattgtgattacaagcagcgatctgccctgtattgagaacgtcacggaccatgacatcagtatggaagaaggcgagaaacgtgaagaggagaatggtactaataccgctgatcatgtgcgtaactctagctgggctaagaacggtagctatcaaggcgctttgcacaacgcctcggaggaggccacagaacagaatattcgggcaggaactcaagctgttctccaggtcttcattatcaatagtagcaatatctttctccttgagcccgctaacgagatcaagaacctgcttgatgaacatacagatatgtgtaaacgcatccttaacatttataggtatatggtggttcaggtgagcatggacaagaaaacttgggagcaaatgctcctcgtgctgctaagagtgacagagagtgtcctcaagatgcctagccaggcctttctgcagttccagggcaaaaaaaacatgacgctggccggtcgactcgcaggaccacttttccagacactgatcgtcgcctggattaaggccaacttgaacgtgtatatcagtcgagaactctgggatgacctcctttctgttctcagctctctcacctattgggaagagctagcaacagagtggtccctcacgatggaaaccctgactaaggtcctggcgcgcaacctgtatagccttgacctgtcagatctgccactggataaattgagtgagcagaagcagaagaaacataaaggaaagggggtgggccacgaattccagaaggtgtccgtggacaagagttttagtaggggatggtctagggaccagcctggccaggctccaatgagacagcgatccgccactaccaccggctcaccaggtacagagaaagcaagatcaattgtgcgccaaaaaacagtcgacattgatgatgcccaaatcctgccacgaagcaccagagtgagacattttagtcagtccgaagaaactgggaatgaagtgtttggagctttaaatgaggaacagcccctgccaaggagctccagcacaagcgatattctggagccattcacggtggaacgggcaaaggtgaacaaagaggatatgagtcagaaattgccccctctgaacagtgacattggaggcagttctgcgaatgtgcctgacctcatggatgagtttatcgccgagcgcctcagaagcggcaatgcatccacgatgactcgtagaggttcaagcccaggctccctggagatacccaaagatcttccagacatcttgaataaacagaaccagatgcggccaatcgatgatccaggggtgccttccgagtggacatccccggcatcagccgggtcatccgacctcatctcgagcgattcacactctgattccttctccgcgtttcaatacgacggcagaaagttcgacaatttcggtttcggaaccgatactggcgtgaccagttcagctgacgttgactctgggtccggtcatcatcagtctgccgaagagcaagaagtggccagccttacaacactgcacatcgacagcgagaccagttccctcaatcagcaggcgttctctgccgaagtagctacaatcaccggatccgaatccgcctcccccgttcactcacccttaggtagtcgatcccaaaccccatctccatccactctcaatatcgaccacatggagcagaaggaccttcagctcgacgagaagctgcaccatagcgtattgcaaacacctgatgatctggaaataagcgagttcccatctgagtgttgtagtgtgatggccgggggaactctcacaggatggcatgccgatgtcgcaaccgtaatgtggcgaagaatgctgggtattctgggggatgtaaacagcattatggatccagaaatccacgcccaagtcttcgactacctctgcgaactgtggcagaacctcgcgaagatccgcgacaatctcgggatctctactgacaatctcacttcaccctcacccccggtattaataccccctctgcgtattcttaccccttggctgtttaaagcgacaatgctcaccgataagtataagcaggggaagctccatgcatacaaactcatctgcaatacaatgaagcggaggcaagatgttagccccaatagggacttcctcacgcacttctataatatcatgcactgcgggttgctgcatatcgatcaagacatagtcaacaccataatcaaacattgttcaccacaattcttctccctcggcttgccaggagctactatgctgatcatggatttcatcgtcgcagctggacgcgtggcatcctcagcatttttgaatgctccgagagtcgaggctcaggtcctgctagggagtctggtttgcttccctaatctctattgcgagctgccctccctgcaccccaacatcccagacgtcgccgtttcccagtttaccgacgtgaaggaactcattatcaagaccgtgctgtcaagtgctagagacgaacccagcggaccggctagatgtgtggccctgtgttcactgggaatttggatctgtgaagagctcgtacacgaatcccatcacccgcaaatcaaagaggctctcaatgtcatctgcgtttcactcaaattcacaaacaaaacagttgcccatgttgcttgtaatatgctccacatgcttgttcactacgttcccaggctgcagatctaccagcccgacagtcccctcaagattatccagattctcatcgccacgatcacccatctcttaccatcgactgaggcgtccagttacgaaatggacaaaaggttagttgtttccctactactctgccttctcgactggatcatggccttaccactcaagacgctacttcagccattccatgcaactggagcagaaagcgataaaacagagaagtcggtgctcaattgtatctataaggtgctacacggttgtgtctacggagcccagtgctttagcaaccccaggtactttcctatgtctctttcggacctggcatctgtggattatgatcccttcatgcacctcgaatcccttaaggagccagagcccctgcacagtcccgattcggaacgatcatcgaaactccaaccggttactgaggtgaaaacgcagatgcagcatggcctgataagcatcgccgcccggacagtgatcactcacttggtcaaccatctcggccactatccaatgagtggagggcccgctatgctgacaagccaggtctgcgaaaaccacgataaccattactccgaatcaaccgaattgtcacccgagcttttcgagtcccccaacatacagttctttgtcctaaacaacacaacactggtctcttgtatccagatccgttccgaggagaacatgcccggcggtggcctatctgccggcctcgcttcagcaaatagcaatgtgcgcatcattgtgcgggacctctccggaaagtactcctgggactccgcaatcctgtacggtcctccgccagtgtccgggcttagtgagcccactagttttatgctgagtctctcccaccaggagaaaccggaagagcctccgacatctaacgaatgcctggaggacattaccgtgaaggacggcttgagcctgcagttcaagcggtttcgcgagaccgtcccaacctgggataccatccgcgacgaggaggacgttcttgatgaactgttgcaatacttaggggtgacctcacctgaatgtctgcaaagaaccggaatttccttaaacattcccgctccacagccagtgtgtatttccgagaaacaggagaatgatgttattaacgccatattaaagcagcatactgaagagaaagaatttgtcgagaaacacttcaatgacctcaacatgaaggccgtggaacaggacgagcccattccccagaagccccagtcagccttctattattgccgactcctgctgagtatcctggggatgaacagctgggataagaggcggagcttccacctacttaagaagaacgaaaagctgctgcgggaactaaggaacctcgacagccggcaatgtcgagagacccataaaattgcagtattttatgtcgccgagggccaggaggataagcacagcatcctcactaatacagggggatcgcaggcctacgaggatttcgtggccggtctggggtgggaagtgaacctaactaaccactgcggcttcatgggcggactacagaagaacaaaagcacaggcctaaccaccccttatttcgctaccagcaccgtcgaggtgatattccatgtgagcacgaggatgccctcagattctgacgattccctgaccaaaaagctgcgccatctgggcaatgacgaggtacacattgtgtggagtgagcatacaagggattatcgccgcggcatcataccgactgaatttggggacgtgttgatcgtcatttatccaatgaagaaccatatgttcagtatacaaatcatgaagaaacccgaagtacccttctttgggccgttgtttgacggggccattgtcaacgggaaggtccttcctatcatggtgagagccacagcgattaatgctagccgggccctcaagagcctcatccctctgtaccagaacttttatgaggaaagggcccgctacttacagacaatcgtgcagcaccacctggaaccaaccaccttcgaagatttcgcagcccaggtgttttccccggccccatatcaccatctgccgtcagatgctgatcactag

SEQ ID NO: 131651 - DNA, 6252 bp, synthetic construct
  misc_feature 1..6252: note = Description of Artificial Sequence: Synthetic coding sequence
  source 1..6252: mol_type = other DNA
atgttttccaagaaacctcatggcgacgttaagaagtccacccagaaagtcctggacaccaaaaaagatgccctgacacgcctgaagcacctgagaatcgtgattgagaatgctgagagcatagacctgaaacagtttttcgaccagcacttctctcatatttattatgtgtttttcgaaaactttgtcaccattgaggcaagcctcaagcagaaggggcataaaagtcagcgggaggaacttgatgcgatactgtttatctttgaaaagatcctgcagcttctgcccgagagaatccatcagagatggcagtttcattccatcggattgattctcaagaaactgcttcacaccggaaactccctgaagattaggagggagggcgtccggctttttcttctgtggctccaagccctgcagaataactgttctaaagaacagctgtggatgttctcctgcttgatccctggtttctctgcgccacagagtgaacacgggcccaggaccctggacaatctcattaatccacccctgaacctgcaggaaactcaggtgacaatcgaagaaatcactccactcgtgccccctcaaagcggcgataagggacaggaggacctgacatcatacttccttgaagcccttctgaagtacatcgttattcaggttaagtctttggaatggaagaataaggagaaccaggagcgtggattctctttcctgttctcacatttcaagaagtactacttgccctacatttttccgaacatttgcaaggagaactccctgtaccacccgatactggatatacctcagatgaggcctaagccacattatgtagtgataaagaaagacgcagaaaccaacgaggctatatattgcacgaaggaacccttcattaaggccagggtcattgtgattcgctggctggtctcattttggctggagccaaaaccgcacacagggccccacatacccggaatggagggcgaagtcttaccgaagaatatccaacgcgcagccgcttccctggttagccgagaggagtccaaaaacgataacgctgacaagacagatcgcactactgagccagagcagagccactccaacacgagcacacttacagaaagggaaccatcatctagcagtctgtgttcaattgatgaggaacatctgaccgatatagaaatagtcaggagagtgttcagttctaagcgcagcaacgtgaacttcgtgacggagatctttaggcaggcattcttattgccaatctgcgaggccgctgctatgcgcaaagttgtgaaggtttatcaggagtggattcagcaagaggaaaagcccctgttcatgcaggagccggaagaaattgtgatcacatcttctgacctcccatgcatcgaaaacgtcacagatcatgacatatcaatggaagagggagagaagagagaggaggaaaacggtacaaacacggccgaccatgttcggaattcttcctgggcaaaaaacggctcctatcagggagccctacataatgccagcgaggaagctaccgagcagaacattagggccggcacccaagccgtgcttcaggtcttcatcataaatagctctaatatctttctgctggagcctgccaatgaaattaaaaatctccttgacgagcataccgacatgtgcaagagaatcctgaatatttaccggtatatggtcgtgcaggtctctatggataagaagacctgggaacaaatgctcctggtgctgttgagagtgactgagagcgtgctgaaaatgccttctcaagccttcctgcagtttcaaggcaagaagaacatgaccctggctgggcgattagccgggcctttatttcagacgctcattgtggcctggatcaaggccaacctgaatgtgtacatttctagggaactttgggacgatctgctctctgtgttatctagtctgacgtattgggaggaactggccacggagtggtctctgactatggaaactcttactaaggtgcttgcccgcaacctctactcactggacctaagtgacctgcccttggacaaactgtcggagcaaaagcaaaagaagcataagggtaaaggtgtcggtcacgaatttcaaaaggtgagcgtggataagtccttttcaaggggctggtcccgggatcaacctggccaggctccaatgcgccagcggagtgcaaccacaacggggagtccagggaccgagaaagctcgttcaattgtgcggcagaagaccgttgcaatgcgttcaagaagtattggagaatgtgccctgcctagtgcctacatccgatccgcaaagagcgccccagtcctgattcacacctccaagccctttctaccagatatagtgctcacaccactttctgacgagctgtccgatatcgacgacgctcagattctaccccgcagtaccagggtgcgtcactttagccagtccgaggaaacaggcaatgaggtattcggcgctctgaacgaggaacagccacttccacgctcaagcagcacttccgatatcctagaaccctttacggtggaacgggcaaaggtcaacaaggaggatatgagtcagaagctgccacccctgaattctgatatcggtgggtcatctgcaaacgtgcccgacctgatggacgaatttatcgcggagcgcctccgctccggcaacgcctccactatgacccgccggggcagtagccccggctctctcgaaatccccaaggatttaccagatatactgaataaacagaaccagatgcgccctatagatgaccccggagtgccgtcagagtggacgagtcccgcatccgcgggatcgtcagatctcatctccagtgactcgcatagcgattctttctccgcgttccagtatgacggtcgcaagttcgataattttggtttcggaactgacacaggagttacctctagcgccgatgttgacagtggatccggtcatcaccagagtgccgaggagcaagaggtggctagcctcacaacgctccatattgatagtgaaacttcttccctgaatcagcaggcgttctccgctgaagttgccacaattacagggtcagaatcagcttccccagtacactcgccactcggcagccggtcacagacaccaagcccctctactctgaatattgaccacatggaacaaaaagatctgcagttggacgaaaaactccaccacagcgtgctgcagaccccggacgatttagaaatatctgaatttccttctgaatgttgtagtgtcatggccgggggaaccctaacagggtggcacgccgacgttgctaccgtaatgtggagacgaatgctggggattttgggtgacgtaaatagcatcatggatccagagatccacgctcaggtgtttgattacctctgtgagctgtggcagaatctggctaaaattagggacaacctaggcattagcacagataatttgactagtccctccccccccgtcctcatacctccccttcgaattttgaccccttggttgtttaaggctaccatgctcaccgacaagtataaacaggggaaactgcatgcgtataagctcatctgcaataccatgaaacggagacaagatgtttcgcccaatcgggactttctgacacacttttataatattatgcactgtggactcctgcatattgatcaagacatcgtgaatacgattattaagcattgcagcccacagttcttctctttgggtctcccaggagcaacgatgctaatcatggactttattgttgctgcaggacgagttgcttctagcgccttcctgaatgcgccccgcgttgaagcccaggtactcctcggatctctggtgtgcttccccaacctgtattgcgagttgccctccctccaccctaacattcctgatgttgccgtctcacagtttacggacgttaaggaattgataattaagacagtcctgagctcagccagagacgagcccagcggaccagcccggtgtgtcgcactttgcagccttggcatctggatttgtgaagagctggtgcacgaatcccatcatccgcagattaaggaagccctcaacgtgatttgcgtgtctctgaaattcaccaataaaactgtggcacacgtggcctgtaatatgctgcacatgctggtgcattatgtgccccgcttacagatctatcagcctgactctcccctaaagatcatccagattctcatagcaaccattacccacctgttgccatccaccgaagcatcctcatatgagatggacaagaggctcgttgtttctcttctgctctgcctactggactggatcatggcccttccattgaaaaccctccttcagccctttcatgccaccggggccgagagtgataaaaccgagaaaagtgtcctgaattgcatttataaggttctgcacggctgtgtgtacggagcgcagtgtttctctaacccgaggtacttccctatgagtctcagtgacttagcctcagtggactatgaccctttcatgcacctggaatcactgaaggagcctgagcccttgcattcccccgacagcgagaggtcctctaaactgcagcccgtcaccgaagtcaagacacaaatgcagcatggcttgatctcaatagccgctcgtaccgtgatcacccatctggttaaccacctcggccactatccaatgtctggtggtccagccatgctgacaagccaggtatgcgagaaccacgataaccactactcagagtccacggagttatccccggaacttttcgagagccctaatattcagttttttgtacttaacaacaccacacttgtgtcctgtattcagattcgtagcgaggaaaatatgccaggtggtggactgagcgctgggctggcatctgccaattcgaacgtaaggatcatagttcgggacctgagcggcaagtacagctgggactctgctatcttatacggaccgcccccggtgtccggtctaagtgagcccacctcattcatgctcagcctcagtcaccaggaaaaacctgaggagccaccaactagcaacgaatgcctagaggatatcactgtgaaagatggtctctcacttcagttcaagcggttcagagagactgttccaacctgggataccattcgtgacgaggaggacgtgttggatgaactgctccagtatctcggggtgacatccccagaatgcttacagagaaccgggatctcgcttaatatcccggctccacaaccggtgtgtatatctgagaaacaggaaaatgacgtcatcaacgctatcctcaagcaacatactgaggaaaaggaattcgtggaaaagcactttaatgacttaaatatgaaagccgtcgagcaggacgaacctatccctcaaaaaccccagagcgccttctactactgcagactgcttctgtccatcctcggtatgaattcatgggacaagcggcgctctttccatctactgaagaagaacgagaagttgctgagggaacttagaaatctggactcccgccagtgtcgagaaacccacaaaatagcagtgttctacgtcgcggagggccaagaggacaaacactctatcctgaccaacaccggcggttcacaggcctacgaggacttcgtggccggcttagggtgggaggtaaatttgacaaaccattgtggctttatgggggggcttcagaagaataaaagtactggcctgacaacaccatactttgccacttcaactgtcgaagtcatatttcacgtttctacgcgcatgcccagtgatagcgatgacagcctcaccaagaaactgagacacctcggaaatgacgaagtacacatcgtctggtcagagcatacaagagattaccggaggggcatcattccaacagagttcggcgacgtcctgatcgttatctatcccatgaagaaccacatgtttagtattcaaatcatgaagaagcccgaagtcccattttttggcccgctgtttgacggagccatcgtgaacggcaaagtcctgcccataatggtgcgcgcaaccgccattaatgcatccagggctctcaaaagtttaattcccctttatcagaacttttacgaagagagagcacgttacttgcagactatagtacagcaccaccttgaacctacaacattcgaggacttcgcagcacaggtgtttagcccggccccctatcaccacctgccttcggacgccgatcattag

SEQ ID NO: 131652 - DNA, 2169 bp, synthetic construct
  misc_feature 1..2169: note = Description of Artificial Sequence: Synthetic coding sequence
  source 1..2169: mol_type = other DNA
cagatactgattgccacgattacacacctgctaccatccacagaagcctccagctacgagatggataaaaggctggtcgtgtctctacttctgtgcctcctggactggattatggccctgcccctgaaaactcttctgcaacctttccatgccaccggagccgaaagcgacaagaccgaaaagtctgtgcttaactgcatttataaggttcttcacgggtgtgtttatggcgcacaatgtttttcaaacccgagatatttccccatgtctttgtcggatcttgcgagcgtggactatgacccctttatgcatttagaaagtctgaaagagcccgagccgttgcacagccctgacagtgagcggtcaagcaagctgcagcccgtgaccgaagttaagacgcagatgcagcatggcttgatctctatcgctgctcggactgtcatcacacatctggtgaatcacctcggtcactacccaatgtcaggaggcccggcaatgctgacctcccaagtctgcgaaaaccatgataaccattactcagaatccaccgaactcagtcctgaattattcgagtcccccaacatccagttctttgttcttaataataccaccttagtaagctgtattcagatccgctcagaggaaaatatgcccggcgggggcctctccgccggacttgcatccgcaaatagtaatgtgcgaattatcgttcgagacctctcgggcaagtactcatgggattctgctatcctgtacgggccgcctccggtttctggcctttcagagcccacgtcctttatgttgtccttgtcacaccaggagaaaccagaagagcccccgaccagtaacgagtgcctcgaggacattacggtcaaggatggcctttcgctgcaattcaagcggtttagagagacggtcccgacgtgggataccatcagggatgaagaggatgttctggacgagcttttgcaatacttgggcgtcaccagtcctgaatgtctccagcgcactgggatcagtcttaacatacctgcaccacagccggtgtgcataagtgagaaacaggaaaatgatgtgatcaacgcaatcctgaagcagcacacagaagagaaagagtttgtggagaaacattttaacgacctgaatatgaaagccgtggagcaggatgagcccatcccacagaaaccacagagcgccttttattattgcagactcttgctctccatcctggggatgaatagctgggacaaaagacgctcctttcatctactgaaaaaaaatgaaaaactgctgagagaacttcgcaatctcgacagccgccaatgccgggagacgcacaagatcgctgtgttttatgtcgccgaaggccaggaggataagcacagtattctgacaaacaccggcggctcccaggcgtatgaagacttcgtagccggtttagggtgggaagttaacctgactaatcactgtggctttatgggcggcctgcagaagaataaatctacgggtctgacgaccccctattttgcaacgtctactgtggaggtcatatttcatgttagcaccagaatgcccagcgatagcgatgactccctgaccaagaagctgcggcatcttggcaatgacgaagtccacatcgtgtggtcagagcacacccgagactatcggagggggataattcctacagaattcggtgacgtgctgatcgttatctatccgatgaagaatcacatgttcagcatccagattatgaaaaaacctgaggtacctttcttcggccctctctttgacggtgcgatcgtcaatgggaaagtgctgccgataatggtccgagctaccgcgataaacgcctcaagggctcttaaaagcttgattcccctctatcagaacttctacgaagagagggcccggtacctccagactatagtgcaacaccacctggagcccactacattcgaagattttgctgcccaggtttttagcccggccccctatcatcacctgccctctgatgccgtcgggtcttacccagagatattaccaagcgagacacccaccgccacacaagtagacggggccgacctggcaagccctatgagccccaggactagtaaatcccggatgtccatgaagcttcgccggagttcgggaagcgccaataagtcctag

SEQ ID NO: 131653 - DNA, 2709 bp, synthetic construct
  misc_feature 1..2709: note = Description of Artificial Sequence: Synthetic coding sequence
  source 1..2709: mol_type = other DNA
atggtgcagcgaatgtgggcagaagcagccgggcccgcagggggtgccgaacccctgttcccaggcagccggcgatccagatctgtctgggatgccgtgaggcttgaagttggcgtgcccgatagctgtcccgtagtcttacatagtttcacgcagctggacccagacctgccaaggccagaaagtagtacccaggagattggcgaggaactcattaatggggtcatctactctatctccctccgaaaagttcaactgcatcacggggggaataagggacagcggtggctcggatatgagaatgagtcggccctgaacctgtatgagacgtgtaaggtgcgtaccgtaaaagccggtaccttggagaagctggtagagcacctggtgccagcattccaagggtctgacctgtcttacgtaaccatctttctatgcacttaccgcgccttcacgacaacgcagcaggtgttagatctcttgtttaaaagatatggatgcattcttccctacagcgatgaagatggtggcccccaggaccagctcaagaatgcgatctcctccatcttgggtacatggcttgaccagtacagcgaggatttctgccagccccccgactttccttgcttgaaacagcttgtggcatacgttcagcttaatatgccagggagtgaccttgagcgcagagctcacctgctgctggctcagttggaacactccgaacctatcgaggcggagcctgaagcactgagtccagtccctgcgctaaaaccgacaccagaactggaactcgccctgacccccgcacgagcccccagccctgttccagccccggccccggagcctgaaccagctcccacccctgcccctggcagcgagttggaagttgcccccgccccagcccctgagctccagcaagcccctgagcccgcagtgggcctggagtcagcccctgcccctgccttggaactagaacccgcccccgaacaagatccggcacccagccagacactggaactggaacctgccccggctccagtcccatccttgcaacccagctggccaagcccagtggtcgccgaaaatggcctgagtgaggagaagccacatttgctagtcttccccccagatctggtcgctgagcaatttactctgatggacgccgagttgtttaaaaaagtggtcccctaccactgcctcgggagcatctggtcacaaagggacaaaaaagggaaggagcacttggcacccactatacgcgctaccgtgacccagtttaatagtgtagccaattgcgtgatcactacctgcttgggtaatcggagtactaaagcccctgaccgagccagggttgttgaacattggatcgaagtggcaagagagtgcagaatcctaaagaatttctcatcactgtatgcaattctgagcgccctgcaatccaatagtatccaccgcctcaaaaagacatgggaagatgtttcgagagattctttccgtatctttcagaaacttagcgagatcttcagtgatgagaataactatagtctgtcccgcgagctgcttatcaaggagggcaccagcaaattcgctacactggaaatgaaccccaagagggcccagaaacgccctaaggaaacggggattattcagggaacggtgccttacttgggaacattcttaacagatctcgtgatgcttgataccgcaatgaaggactatctgtatggcagactgataaatttcgaaaaaaggcgtaaagaatttgaggtcattgctcaaataaagctgttgcagtcagcctgtaacaattatagtattgcccctgacgaacagttcggggcgtggttcagagcggtggagcggctgagcgagaccgaatcgtataatctgagctgcgagctggagcctccctccgaatctgcatctaacacacttcgcacaaagaaaaacactgctatcgtcaagcgctggtctgatcgacaggctcctagcactgaactgtctacctctggatcatctcactcgaagtcctgtgatcagctacggtgtggcccttatctgagctccggagatattgcggacgctctgagcgtccactcagctgggtcgtcttctagtgatgtcgaggagatcaatataagcttcgtgccagaaagtcctgacggccaggaaaagaagttttgggagagtgcatcacagtccagcccagagaccagcggaatatcaagcgcgtccagttccactagcagcagttctgccagcactacccctgttgccgctacacggacccacaagaggtctgtatctgggctctgcaattcctcttccgcgctccctttgtacaaccagcaggttggtgattgctgcatcatccgggtttccctggatgtggataatggcaatatgtataaaagcatcctggtgacgtcccaggacaaggctcccgccgttattagaaaagcaatggacaaacataacctcgaggaagaggagcctgaagactatgagctgcttcagatcctgagcgatgatcggaagctaaagatccccgaaaacgccaatgttttctacgcaatgaacagcaccgccaactatgatttcgtcctgaagaagcggaccttcacaaagggtgttaaagtcaagcacggagcctcttcaacgttgccacggatgaaacagaaagggctaaaaattgctaaggggatattctag

SEQ ID NO: 131654 - DNA, 2745 bp, synthetic construct
  misc_feature 1..2745: note = Description of Artificial Sequence: Synthetic coding sequence
  source 1..2745: mol_type = other DNA
atggttcagagaatgtgggcagaggcagcaggtccagccggaggcgccgagcctctgtttcctgggagcaggcggtccagatccgtctgggatgcagtccggttagaggttggcgtacccgatagttgcccagtggtgctgcatagtttcactcagctggatcccgaccttccgcggccagagtcttccactcaggagatcggtgaagagctcatcaatggggtcatctatagcatatcattaagaaaagtgcagcttcaccacggagggaacaaggggcagcgctggttagggtacgaaaacgagagtgcactgaatttatatgaaacctgcaaggttcgcacagtgaaagcaggcaccctggaaaaactggtggaacatcttgttccagccttccagggttctgacctaagttatgtaactatcttcttatgcacctacagggccttcacaaccacgcagcaggtgttggacctccttttcaagagatacggccgctgtgacgccttgacagccagcagcagatacggctgcatcctgccttattctgatgaagacggcggcccccaagatcaactgaaaaatgctataagctcaattctgggtacctggctggatcagtatagtgaggacttttgccagcctcccgatttcccttgtttgaagcaactggtggcatatgtgcagctcaacatgcctggtagcgacctagagcgccgggctcacttattgctcgcccagctggagcactctgagccaatcgaggccgagcccgaagcgctatcccctgtgcccgcactcaaacctactccagagcttgaactggccctcacacctgcccgcgctccatcaccggtgcccgcgcccgctcccgaacccgagcctgccccaactcctgctccagggagcgaactggaggtcgcccccgcgccagctccagaacttcaacaggcccccgagccagccgtgggactggagtccgctcctgcgcccgccctcgaactagagcccgcccccgaacaggaccctgccccatcccaaaccttagagctggagcctgcccccgcaccggtgccatctctccagcccagttggccttcccccgtggtggccgagaatggtctgagtgaagagaaaccacatttgctagtttttccacccgatctcgtggccgagcagttcaccctgatggacgcggaactgttcaagaaggtggtcccctaccattgtctgggctcaatatggagccagcgagataagaaaggcaaagaacacctcgcgccaaccattagagccactgtgacacagtttaactctgtggccaattgtgtgatcaccacatgtctggggaacaggagcacgaaggctccagaccgggctcgggtcgtcgagcattggatagaggtcgcccgtgagtgcagaatcctcaagaacttttcttccctgtatgctatcttgagtgccttgcagtccaattcaatccacaggctgaagaagacctgggaagacgtgagccgagattccttcagaattttccagaaactgtccgaaattttcagcgacgaaaataattacagcttatcccgtgagttgctgatcaaagagggcacgtcaaaattcgcgacgctcgagatgaaccctaagcgggcacagaagagacccaaggaaacagggattattcaggggacagtgccctacctggggacatttctgactgatctggtgatgctcgatacagccatgaaagactacttatacgggcggttaataaactttgagaagaggcgcaaggaattcgaggttatcgcacagatcaaacttctacagtcagcgtgcaacaattactcaatcgcccccgatgagcagttcggagcctggtttcgtgccgttgagcgcctatctgaaacagagagctacaatttatcttgcgagctagaacccccatcagagagtgcttcaaataccctcagaaccaaaaagaatacagcgatagtaaaacggtggtccgaccggcaagccccctccaccgagctctctacgtccgggtccagtcactctaaatcctgcgaccagctgaggtgtgggccttatctgtcctccggcgatattgcggacgcgttgtcagtgcactctgccggcagttcgagctccgacgtggaagagattaatatcagcttcgtgccagagagccccgatggacaggaaaaaaaattctgggaaagtgctagtcagtcctctcctgagacttcagggatttcctcagcctcctctagtacttcatcgtcatctgccagcactaccccggttgcagccaccagaactcataagaggtcagtgtccggcctttgcaattcttcaagcgctctccctctttataatcaacaggtcggcgactgctgcataataagagtgtctctggacgttgacaatgggaacatgtacaagagtattttggtcactagccaggacaaagccccggcagtgatacggaaggcaatggataaacacaatctggaggaggaagagcccgaagattatgagctcctgcaaatcttatccgatgataggaagctgaaaattcctgagaacgcaaacgtgttttacgccatgaattcgacagccaactatgactttgtcctgaagaagcgaacgttcacaaaaggcgtcaaagtgaagcacggcgcctcttccactctgcctagaatgaaacagaagggactgaaaattgccaaggggatattctag

SEQ ID NO: 131655 - DNA, 1341 bp, synthetic construct
  misc_feature 1..1341: note = Description of Artificial Sequence: Synthetic coding sequence
  source 1..1341: mol_type = other DNA
atgccgggaagtgaccttgagcgccgcgcccatctgctgttagcccagctggagcactcagagcccatcgaggcggaaccagaagccctgtcaccagtgcctgccctcaagcccacccctgagctcgaattagctctgacacctgctagggctcccagcccagtgccagcaccagctccagagccagagccagcccccacacctgcccctggcagcgaattagaggttgcccccgctcctgccccagaacttcagcaagcccccgagcctgctgtaggactggagtctgcgccggcaccagccttagaattagaacctgctccagagcaagatcctgcaccctctcaaactctggagctggaaccagcccctgcccctgtgcctagcttgcagcccagctggccaagtccagtggtggccgagaatggccttagtgaggaaaaaccgcacctcctcgtcttcccacctgatctggtcgccgaacagttcactctgatggacgctgaatgccgtattttgaagaacttcagctcgctctacgctattttgtcagctctgcaatccaattctatccatcggttgaaaaagacatgggaggacgtctccagggattcatttaggatattccagaagttgagcgagatcttttcagacgagaataactacagcctctcgagggagctgcttatcaaagagggcacatccaaattcgccacactggagatgaaccccaagagggctcagaaaaggcctaaagagacagggattattcagggaacagtgccctatctgggcacgttcttaacagaccttgttatgctggacacggcgatgaaagattatctgtatgggcggctaattaactttgaaaagcggcggaaggagtttgaggttatcgcacaaatcaagctgctccaaagtgcctgcaacaattactcgatagctccagatgagcagtttggagcctggtttagagcggtggaaagacttagcgagaccgagtcttacaacctgtcttgtgagctggagccaccatcagagagcgcgtctaacacgctgaggacgaaaaagaacactgccattgtgaagaggtggagcgatcggcaggccccttccacggagttgtcgacctctggttcaagccattcgaaatcttgtgaccagctgaggtgcggcccatacctgtcatccggcgatattgctgacgccctgagcgtccattcggctgggtctagctctagtgacgtggaggagataaacatctcttttgtgcctgaatcccccgatggccaggagaagaagttctgggagagtgcgtctcaatccagccccgagacctag

SEQ ID NO: 131656 - DNA, 2658 bp, synthetic construct
  misc_feature 1..2658: note = Description of Artificial Sequence: Synthetic coding sequence
  source 1..2658: mol_type = other DNA
atgtgcctgtggggtcacagtaccgcaccagctcataccctgtccagtccaccacttttgttttgttccctgccatgtgccctgcacctgcaacctggcacaggccacccacccgggcaagttccaaggaaaagttctacccaggagattggagaggaactcatcaatggcgtcatctattctattagcctcaggaaggttcagctccaccatggcggcaacaagggccaaagatggcttgggtacgaaaacgagagtgctttaaatctgtacgaaacctgtaaggtgcgaactgtgaaggccggaaccctcgaaaagctggtcgaacatctggtgccagcgtttcagggaagcgatttgagttatgtcacaatcttcctctgcacctatcgcgccttcaccacaacccagcaagtgcttgatctgcttttcaaaaggtacggatgtatcctgccctacagtgatgaagacggcggcccacaggatcaacttaagaatgccatctcttcaatcctgggaacctggctggaccagtattcagaagacttctgccagccaccagattttccttgccttaagcagcttgtcgcttatgtgcagttgaacatgccgggctcagacctggagcgacgggcacatctacttttggctcaattggaacactctgaaccaatagaagccgaacctgaagccctgtcccctgtgcctgccctgaagccaacccctgagcttgaactggccctgactcctgcacgtgccccttctcccgtgccagctcccgcccctgagcctgaacctgcccctactccagcccctggatccgaactggaagtggctcccgctcccgctccagagttacagcaggcgcctgagcctgctgtaggtctcgagtccgcaccagctccagcgctggagctggaaccggcccccgagcaagaccctgcccctagccagaccctggagctcgagccagcacccgcgcccgttcccagcctccagcctagttggccctctcccgttgtcgctgaaaatggattgagtgaggagaagccacacctcctggtgttccccccagacctggtcgccgagcagtttacacttatggacgccgaactgttcaagaaggtggttccatatcactgccttggctcgatttggagccaacgtgacaagaaagggaaagagcatctggctccaacaatcagggcgacagttacacagtttaacagtgtcgctaactgcgtcataactacatgcttggggaaccgtagtaccaaggcacccgatcgcgctcgggtcgtagagcactggattgaagttgccagagagtgccgcattctgaagaatttctcttcactgtatgccatcctgagcgccctccagtctaactccatccataggttaaagaagacctgggaagatgtatccagggactctttccggatcttccaaaaactttctgaaatcttctccgatgagaataattactccttatcccgggagctcctgatcaaggagggtacaagtaaatttgcaactctcgagatgaatccaaaaagggctcagaaaaggccaaaggaaacaggcattattcaaggcactgtgccttacttgggtacatttctgactgatctggtcatgcttgacaccgcaatgaaggactacctctatggacgtctcatcaacttcgagaagcgtcgcaaagagttcgaagtcatcgcccagattaagctcctgcagtctgcgtgcaataactactccattgcgcccgacgagcagttcggcgcttggtttcgtgcagtggaacgactctcagagaccgagtcatataacttgtcatgtgaattagagccgccgtcagagtccgcctctaatactttaaggactaaaaagaataccgcaatagtgaagaggtggtccgacagacaggctccttctaccgaactcagcacctccggaagcagccactcaaagtcctgtgatcaactgagatgtggaccgtatcttagcagtggcgacattgcagacgctttgtctgtccacagtgcgggttcctctagtagcgatgtggaagagataaacatctccttcgtccccgagtcacctgatgggcaggaaaagaagttctgggaaagcgcgtcccagtcaagtcccgagacaagcggcatctcttcagccagttcgagcacaagctcctcctcggcgagtactaccccggttgcggctacaaggacccataaaaggtccgtgtcagggctttgcaattcttcttcagcactgccactgtacaaccagcaagttggtgattgctgtattatccgcgtctccttagatgtcgataacggtaatatgtacaaatcaattttggtcacatctcaagacaaggcaccagcggtcattcgaaaggcaatggacaaacacaatctcgaggaagaggagcctgaagactacgagctcttgcagattcttagcgatgaccggaagctcaaaatcccagaaaatgcgaatgtgttttatgctatgaattccactgccaactacgacttcgttctgaagaagcggacctttacaaaaggcgttaaagtaaaacatggagcctcttctacgctcccccgcatgaaacagaagggactgaaaatcgcgaaagggatcttctag

SEQ ID NO: 131657 - DNA, 2742 bp, synthetic construct
  misc_feature 1..2742: note = Description of Artificial Sequence: Synthetic coding sequence
  source 1..2742: mol_type = other DNA
atggcccgggaagctggacaggtctgtgcccgaccagctgtacctagggggcggaagggtagtgtcttttttgcttgtgtgagcgtagtgaccgccaggcggcgcgcagtggccagacgtgcggcactgcagtctcctacaccctggttggctcccttacccgctcccgcaaccactgagtcaagtacacaggaaattggcgaggaattaattaatggcgtgatctactccatctctctgaggaaagtgcaacttcaccacggtggaaacaaggggcaacgttggctcggctacgagaacgaatctgccctcaatttatacgagacatgcaaagtgagaacagtgaaagcaggcaccctggaaaagctggtggaacatttagttccagccttccaaggcagcgatctttcctacgtgactattttcctatgtacttacagggcctttaccactactcaacaggtacttgacctgctatttaaacgctacggcaggtgtgatgcgctcaccgcctcttcgcgatatggctgcatccttccatacagtgacgaagacggaggccctcaagatcagctgaaaaatgcaatctcaagtatcttgggcacatggttggatcagtactctgaggacttctgccagccccctgactttccgtgtctaaaacaactcgtcgcatatgttcaactgaatatgccagggtcagacctggagcgcagagcccacttgctcctcgcccagctggaacatagtgaacctattgaagcagaacctgaggctctttctcctgtgcctgctctgaagcccacaccagagctggaattagcattaactcccgcgagggccccttctccagtgcctgccccagccccagagccagagccagccccaacgcccgccccgggttccgaattagaggtggccccggcccctgctcctgagctgcagcaagccccagaaccagccgtgggcctcgagtctgcacccgcccccgctttggaattggagcccgcaccagagcaggaccccgccccctcccaaaccctggagctcgagcctgcccctgctccagtcccaagtcttcagccctcttggccctcaccagtggtggctgaaaacgggttgtccgaggaaaagccgcatctgctggtcttccctccagatttggttgcggagcagtttactctaatggatgccgagctgttcaagaaggtggtgccttatcattgtctcggctctatttggtcccagagggataagaaagggaaggaacacttagcacccactattcgggccactgtgacacagtttaacagcgtcgctaattgtgtgatcactacgtgccttggcaaccggtccactaaggcccctgatcgggctcgcgtcgtcgagcactggattgaagtcgctagggagtgcaggattctaaaaaatttctcctcgctgtatgccattctatctgctcttcagagcaattccatccatcggctaaagaagacgtgggaggacgtttctcgagactcattccgtatcttccaaaaactcagcgaaatattctccgacgagaacaattactctctgtctagggagcttctcatcaaggagggaacaagcaaattcgccaccctagagatgaatcctaagagagcgcaaaagcgcccgaaggaaacagggatcatccaagggacagtgccatacctcggcacctttctgaccgatctggtcatgttggacactgctatgaaagactatctgtatggccggctcatcaattttgagaaacgccgcaaggagttcgaggtgatagcacagatcaaacttctccagtccgcttgtaacaactactccatcgccccagatgaacagtttggcgcatggtttagagctgtagagcgactctcggaaaccgaatcctacaacctgtcctgcgaacttgaacccccatccgagtctgcctccaacactctgcggactaaaaagaacactgccattgttaaaaggtggagtgataggcaggcaccgagcaccgaactgtccactagtggttcgagccatagcaagtcctgcgaccagttacggtgcggaccttacctgagtagcggcgatatcgccgatgcattgagcgtacattcagcaggtagctctagtagcgacgtggaagaaataaacatttcctttgtgccggagagcccggacggccaggaaaaaaagttctgggaaagtgcaagccagagcagccccgagacttcaggtatatccagcgcctcttcgtctacatcctcgtcgagcgccagcacgaccccagtggccgctaccaggacacacaagcgctcagttagcgggttgtgtaatagtagctccgcccttcccctgtataatcagcaggtgggtgattgttgcatcatccgagtatcgctcgatgtggacaatgggaacatgtacaagtccatactggtcacatcgcaggacaaggcaccagccgttattcgtaaagctatggacaaacacaatctggaagaagaagaacccgaggattacgagctactccagatcctgtccgatgatcgcaaacttaagatccccgaaaacgccaacgtgttctacgcaatgaacagcaccgctaactatgacttcgttcttaaaaaacgcacattcacaaagggggtgaaggtcaagcacggcgcgagttcgactctgccccgcatgaagcagaaggggctaaaaatagccaagggaatcttctag

SEQ ID NO: 131658 - DNA, 2580 bp, synthetic construct
  misc_feature 1..2580: note = Description of Artificial Sequence: Synthetic coding sequence
  source 1..2580: mol_type = other DNA
atgatggtggactgccagtcatcaacacaggagattggggaggagctgatcaacggggttatatacagcatcagcctgagaaaagtgcagctgcaccacggcgggaataaaggccagcgatggctggggtatgagaatgaatccgctctaaacttgtacgagacatgcaaggtaagaaccgtgaaggcaggtactctcgagaaactcgtggaacacctcgtgcccgctttccaagggtctgacttgagttacgtgaccattttcctttgtacctaccgcgccttcacgacgacccagcaggtccttgacctgctattcaaacgttacggccgttgcgacgctctgacggcatctagtcgatatggatgtatactgccatacagtgatgaggacggtggacctcaggatcagctgaaaaacgctatttcttcgattctcggtacatggctggaccagtactctgaagacttttgccagccccctgactttccctgcctcaagcagctggtggcttacgtgcagcttaatatgccaggctctgacctggagcgcagggcccacctgttgcttgctcagctggagcacagtgagcccatcgaagcggagcccgaggctctctcccccgtccctgcgctcaagccaaccccggaacttgaactggccctgaccccggcaagagctccatcaccagttccggccccagcacccgagcctgagcctgctcctacgcccgcccctggaagtgagctcgaggtggctccagccccagcacctgagttacaacaagctccagagcccgcagtcggactcgaaagcgctcccgcccccgccctagagctggagccagctcctgaacaagatccagccccaagtcagaccttagaactggagccagcccccgctccggtgccctcgcttcaacccagctggcccagccccgtggtagccgaaaacggacttagcgaggagaaaccgcatctgctagtgttcccccccgatctcgtagctgagcagtttaccctgatggatgctgaactctttaagaaagtagtgccctatcactgcttaggttcaatatggtcccagagggacaaaaagggcaaggaacacctggccccaaccatccgggccactgtgacacaattcaactctgtcgctaattgcgtaattacgacttgtctgggaaatcgatccacaaaggccccagaccgtgcccgcgtggtggagcactggatcgaagtcgcacgggaatgtcgaatccttaaaaacttcagcagcctgtatgctatcctcagtgccttacagtctaacagcatccacagactgaaaaagacatgggaagatgtgtcccgggacagcttccgcatattccagaaattgtctgagatcttcagcgatgaaaacaactacagtctgagtagagaactgctgatcaaggaaggtaccagtaaatttgctacccttgaaatgaatcctaaaagagcccaaaagcggcccaaggaaaccgggatcatccagggaaccgtcccatacctgggcaccttcctgactgacctcgtcatgttagacaccgcgatgaaggactatctctatggccgccttattaactttgaaaagcggcgcaaggaatttgaagtaatcgcacagattaagctgttgcagtccgcctgtaacaattatagtattgcgccagatgagcagttcggtgcttggtttcgcgcggttgagaggctctcagaaaccgagtcttataacctgagctgcgaactcgaacctccatcggaatccgcatctaatacactgaggactaaaaaaaatacagcgatcgtgaaaagatggtcagacaggcaagctccctctacagagcttagtacaagcgggtccagtcattcaaagtcctgtgaccaactgagatgcggcccctatctgtccagcggcgacatcgcggatgccctgagcgtgcattccgctggttcatccagctcagatgttgaagagataaatatttcattcgtgcctgaaagtcctgacgggcaggaaaagaaattctgggaaagcgctagccaatcaagtccggagacctccggtattagttccgcatcgagtagcacatcctcgagtagtgcatcaacgactccggtggctgccacacgtacacacaaacgttccgtctcagggctgtgtaactcctcctcagccttaccactgtacaatcagcaagtgggggactgctgtatcattagggtttcgctggatgtggataatggcaatatgtacaagtcaattttggtgacatcccaagataaggctccagccgtaatccggaaggctatggataagcacaatctggaggaagaagaacctgaagactatgaactgcttcagatactttctgacgatcgtaaactcaagatcccagagaatgctaacgtgttctatgctatgaatagcactgccaattacgactttgttctaaagaagcgaacgttcaccaaaggagttaaagtgaagcacggagcctcctctacactaccacgcatgaagcaaaaagggctcaaaatcgccaaaggaatcttctag

SEQ ID NO: 131659 - DNA, 930 bp, synthetic construct
  misc_feature 1..930: note = Description of Artificial Sequence: Synthetic coding sequence
  source 1..930: mol_type = other DNA
gtggttgcagagaatgggctctctgaggagaaaccgcacttacttgtcttccctcctgatctggtcgcggaacaattcaccctgatggacgccgagtgccgaattctcaaaaactttagtagtctttatgccatacttagcgccttgcaatctaactctatccatcgtctgaaaaaaacttgggaagatgtgagtagggatagcttcaggatctttcagaagttatccgagattttctctgatgagaacaactactctctgtcccgcgagttgttaattaaagagggcacatccaaattcgctacactggagatgaaccctaaaagggcccaaaaaaggcccaaagagactggcatcatccaggggaccgtgccttatctgggtacatttcttaccgacttagtcatgctggacacagctatgaaagactatctgtatggacggttgattaatttcgagaaaagaaggaaggaattcgaggtgatagcacagatcaagctgctccaatccgcctgtaacaattattccattgccccagatgagcagttcggagcatggttcagagccgtcgagcgcctgagcgaaaccgagagctacaatctgtcctgtgagctagagccgccctctgaaagcgcatcaaatacgctgaggacgaagaaaaatacagccatcgtgaagcgctggtccgacaggcaggcaccgtccaccgaacttagcaccagtggttcttcccacagcaagtcttgtgaccagctccggtgtggaccctacctcagtagtggggatatagcagacgccctgtctgtccattcagctggaagctcctcctcggatgtggaggagattaacattagctttgtgcctgagagtcctgacggtcaagagaagaagttctgggagagcgcctcgcagtcatcccccgagacttag

SEQ ID NO: 131660 - DNA, 2958 bp, synthetic construct
  misc_feature 1..2958: note = Description of Artificial Sequence: Synthetic coding sequence
  source 1..2958: mol_type = other DNA
atgcaccgacgcagactggccctcggcctgggattttgtctcctcgccggcacttctcttagtgtgttgtgggtgtacttagaaaactggctgccagtttcttacgttccctactatttgccttgccccgaaatactgccaatgatgatggctctgtcatgcttatgccatcagcaacatgaagccgccctacaggagggagaggccacaccggcgagaggaatggtgacagttccatcagcacaggctgctggggctcaggcccatacggccgcagatactcacactcttgtgggagctcaccgtctgagggggaatttgcagcccagagcatctgccgcacacttaccagcgactgagcctgatcactgggggcacggcgtatgtcgaggtgagtcatcgacacaggagattggagaggagctgatcaatggtgtgatttacagcatctcactaaggaaggtccagctgcaccacggcgggaacaaaggtcaacgctggctgggttatgagaacgaaagtgcactcaatctgtatgagacctgcaaggtccggactgtgaaagccggcactctggaaaagctagttgaacatcttgtgccagcctttcagggctccgacttgtcctacgttacgattttcttatgcacatacagggccttcacaaccacccagcaggtgttagatctcttatttaagcggtacggccgatgcgacgcactcactgctagttcaaggtacggttgtatccttccttattcagacgaggacggtggaccccaggatcagctcaagaatgcaatttcttcgattctgggaacatggctcgatcaatatagcgaggatttctgccaaccaccggactttccatgtctcaagcagctggtggcctatgtccagcttaatatgcctggcagcgacctagagaggagggcccacttgctgctggcacagctcgagcattctgagccaattgaagcagaaccagaggccttgagccctgtacctgctttgaaacccacccccgaactggaactggctctgactccagctcgggctcccagccctgtgcctgcaccagccccagagccggagccagccccaactcccgccccaggctctgaactggaggttgcacctgctcctgccccagaactgcagcaagcgcccgagcctgcagtcggcctggagtctgctccagccccggccctggaactcgagcctgcacccgaacaggatccagccccctctcagaccctcgaactggaacccgccccggctccggtcccctcactacaaccatcttggcctagcccagtggtagctgagaatggactatccgaagaaaagccccatctgctggtttttcccccggatcttgtggcagagcagtttacattgatggacgccgagttattcaaaaaagtggtcccctaccattgcctagggagcatatggtcccaacgggacaagaaaggcaaggagcatttggcccccactatccgcgcaacagtgacccagtttaacagcgtggcaaattgcgtcattaccacttgtctcggaaatagatccacaaaggcaccggatcgggcacgggttgtggagcactggattgaagtggcccgagagtgtcgaattttgaaaaacttttcctcactctatgcaattctgagtgctttgcagtctaactctattcacaggctgaagaagacttgggaggacgtgagcagggatagcttccggatctttcagaagcttagcgaaatattctcagatgaaaataattacagtctctctcgggaactgctcatcaaggagggaaccagcaaatttgccacccttgaaatgaaccctaagagagcccaaaagcgacccaaggagaccgggattatacagggaactgtgccatacctgggtaccttcctcacagacctggtcatgttggacaccgctatgaaggactatttgtatgggaggctaatcaactttgagaagaggcgcaaagagtttgaggtgatcgctcaaatcaagctcttgcagtccgcctgtaacaattactctatcgcccctgacgagcagtttggggcctggtttcgggctgtcgagcgactgtctgaaacagagtcgtataacctgtcctgcgagcttgagccaccttccgagagcgctagtaatacgttaagaactaagaagaacacggccattgttaaacgctggtcagacagacaggcaccatctacggagctgtccacttcaggttcgagtcattcaaagagctgcgaccagctgcggtgtggcccatacctgagctcaggtgatatcgcagacgccctgtcagtgcacagcgcagggtcttcatctagtgacgtggaggagatcaacatctctttcgtgcccgagtcacccgatgggcaggagaagaagttctgggagagcgctagtcagtccagcccagagaccagtggaatctcatccgcctcaagctcgaccagctccagctcagcctcaactactcctgtcgccgccacccggactcataagcggtctgtaagcggcctctgtaactcgagctcagcactgccactgtacaaccagcaagtaggcgattgctgtatcatccgagtgagcctggacgtggacaatgggaatatgtataagagcatcttggtgacctctcaggacaaggctccagctgtgatccggaaggcaatggacaaacacaacctggaggaagaggaacctgaggattatgaacttttgcagatcctcagcgacgatcgaaagttgaagattcccgagaatgccaacgttttttatgcgatgaatagtacggctaactatgacttcgttctcaaaaagcgaacatttaccaaaggcgtgaaagtgaagcatggggcctctagtactctcccccgcatgaaacagaaagggctcaagattgcaaagggaatcttctag

SEQ ID NO: 131661 - DNA, 2412 bp, synthetic construct
  misc_feature 1..2412: note = Description of Artificial Sequence: Synthetic coding sequence
  source 1..2412: mol_type = other DNA
atggaggtgaaacctgtgggggaacctacccaggaggtatcaaagtttaaactgagcaccaaagtggaatcaacaggccactggctagtggaagaccatgtccgcatctgggaggtgttgaagacagaagaatccagcattcaggactggggggaagaagtcgaggagggtgccgtttatcatgttaccctcaagagagtgcagatccaacaagccgcgaataaaggcgcaaggtggctcggagttgagggtgaccagctgccccctgggcatacagtgagccagtacgagacctgtaaaatcagaacaatcaaagcgggaacactcgaaaagttggtggaaaacctcttgaccgcctttggcgataatgacttcacgtacatctccatcttcctgtcaacataccgaggcttcgcctcgaccaaagaggtcctggagctcctgcttgacaggtatgggaacctgacaagtccaaactgtgaggaagatggtagccaaagctcttccgagtctaagatggtaattcgaaacgccattgcgtctattctgcgcgcctggctcgaccagtgcgctgaagacttcagagagccaccccatttcccttgtctgcagaagttgctcgactatctgacacgaatgatgccgggttccgacccggaacggagggcgcagaacttactggagcaattccagaagcaagaagtggaaaccgacaacgggctgccgaatactatctccttctccctcgaagaggaagaggagttggaaggcggcgagagcgctgaattcacttgctttagcgaggatctagtcgctgaacagttgacatatatggatgctcagctcttcaagaaggtcgttcctcatcattgtctgggctgtatctggagtcgcagagacaagaaagagaataagcacctggccccaactatacgagctaccatcagtcagttcaataccctcaccaaatgtgtggtgagcacaatcctcggaggtaaggaactgaaaacacagcagagagccaagatcatcgaaaaatggatcaatatcgcgcatgaatgtcggctactcaagaatttttcatcccttagagctattgtgagtgcccttcaatcgaactcaatctatagactgaagaagacctgggccgcagtcccacgggaccgcatgctgatgtttgaggagttgtctgacatattctccgatcacaataaccacctaactagcagagagctgctcatgaaggaaggtacttccaagttcgccaacctcgactcgtctgtcaaggagaaccaaaaacggacacagcgacggcttcagctgcagaaggacatgggcgttatgcaagggaccgttccgtacctggggacctttctcactgatttgactatgctggacaccgccctccaggactacatcgaggggggcctgattaatttcgagaaacggaggcgcgaatttgaggtaattgcccagataaagctgctgcagtctgcatgtaatagttattgtatgacccccgaccagaaatttatccagtggttccagcgccagcagcttctcactgaagaggaatcctatgccctgtcttgtgaaatcgaggccgctgccgacgccagtacgacgtccccgaagccgcggaaatcaatggttaaacgcctctcgttgctgttcttgggcagtgacatgattactagccccacaccaacaaaggaacagcccaaaagcaccgcttccggctctagcggggaatcaatggactcggtgtctgtgtcctcatgtgagagtaatcattcagaggccgaagaaggctctattacacccatggatacccccgacgagcctcagaaaaagctcagcgagtccagttcctcttgttccagcattcacagtatggacactaatagttcaggcatgtcatctctgatcaaccccctgtcctccccaccttcatgcaataataatcctaaaatacataagaggagtgtatccgttacttccatcacaagtactgtcctccctcctgtatataaccagcagaatgaagatacatgtataattcgtatttcagtggaggacaacaacggtaatatgtacaagagcatcatgctgacatctcaggacaaaaccccagcggtgatccagagggctatgcttaagcacaacctcgattctgatcctgcggaagaatacgaactggttcaagtcatctccgaagacaaagagctcgtgatcccagactcagcaaatgtattttatgctatgaattctcaggtgaattttgattttatcctccggaaaaagaactccatggaggaacaggtcaaattgagatcgagaacctctttgaccctgccccgcactgctaagcggggctgttggagcaaccgccatagtaagattaccttgtag

SEQ ID NO: 131662 - DNA, 2307 bp, synthetic construct
  misc_feature 1..2307: note = Description of Artificial Sequence: Synthetic coding sequence
  source 1..2307: mol_type = other DNA
atgaaactgttatggcaggccaaaatgtcctcaatccaagattggggtgaagaggtggaggagggtgcagtctaccatgtgaccctgaaaagggtccagatccagcaagcagccaacaagggtgctcgttggttaggagtggaaggagaccagctcccccccggtcacactgtgagccagtatgagacttgtaagatcaggaccatcaaggccggcactctcgagaagctcgtggagaaccttctgacggctttcggagataatgatttcacctatatctctatcttcctaagcacgtatcgaggctttgcatcgaccaaagaagttctggagctgcttctcgatcggtatggcaacctgaccagcccgaattgcgaggaggacggcagtcaaagctccagtgagtcaaagatggtaatccgaaacgccattgcctcaattctgagagcatggctggatcagtgcgctgaagactttcgggagccccctcactttccatgcttacaaaagctgctggattatctaacccgtatgatgcctgggagcgaccctgagcgccgtgcccagaacctcctcgagcagtttcagaaacaggaagtggagaccgacaacggattgccaaatacgatcagtttcagtcttgaggaagaggaggagctggagggaggagaatcggctgagtttacgtgttttagtgaggacttggttgctgaacaactgacgtatatggatgcacagctgtttaaaaaggttgtgccacatcactgtctcgggtgcatttggagccggagagataagaaagagaataagcatcttgccccaaccattagggccacgatcagtcagttcaataccttgaccaaatgtgtggtcagtacgatcctaggggggaaggaacttaaaacccagcagcgggcaaaaatcattgagaagtggatcaatattgcccatgagtgtaggctcctcaaaaatttttcgagtcttagggccatcgtatccgccctgcagtcaaactcgatttacagactgaaaaagacatgggccgcagttcctcgagacaggatgctaatgttcgaggaactatctgacatctttagtgatcacaacaatcacctgacatctagagagttactgatgaaggaggggacttctaagtttgctaatttggattcaagtgttaaagagaatcagaaaagaacccaacgacggttgcagctccagaaggacatgggcgtgatgcagggcaccgtaccttacttagggacattcttaactgaccttacaatgctggacaccgctttgcaggactatatcgaaggaggtttaattaattttgaaaagcgcaggagagagttcgaagttatcgcacaaatcaagctgctgcagagtgcctgtaactcatactgcatgactcctgaccagaaatttatacagtggtttcagagacagcagctgctgacggaggaggagtcttacgccttgagctgcgagatagaggcagccgccgacgcttcaactactagtcctaagccacgtaaaagcatggtcaaaaggctgtctttattgttcctggggtcagatatgatcacttcgcccaccccaaccaaggaacagcccaagtctacggcctccggtagctcaggtgaaagcatggattctgtgagcgtgagcagctgcgaatctaaccactctgaggctgaagagggcagtatcactccaatggacacaccagacgaaccccagaaaaagctgagcgagtcatctagtagttgttcctctatacatagtatggatacaaactccagtgggatgtccagcctgattaacccgctctcttcacccccatcttgtaataacaaccccaaaatccacaagaggagcgtgtccgttacatcaatcaccagcactgtccttccccccgtgtacaatcagcagaacgaagacacctgcattatccggatttcggttgaggataataatggaaatatgtacaagagcatcatgctgacctctcaggacaaaactcccgcagtcatccaaagggcgatgctgaagcacaatttagactccgacccagccgaggagtacgaacttgtccaggtgatctctgaagataaagagctggtaatccctgactctgccaacgttttttatgcaatgaactcccaggtgaactttgatttcatcctacggaaaaagaactccatggaggaacaagttaagctgagatcaagaacctcactgacacttccccgaacggctaagcgaggctgctggtctaacaggcatagcaagatcacactgtag

SEQ ID NO: 131663 - DNA, 2412 bp, synthetic construct
  misc_feature 1..2412: note = Description of Artificial Sequence: Synthetic coding sequence
  source 1..2412: mol_type = other DNA
atggaagtgaagccggtgggcgagcccacgcaggaggtctctaaattcaaattgtccaccaaggtcgaatcaactggccattggttggtggaggatcatgttcgcatttgggaggtgctgaaaacagaggaatcatcaatccaggactggggcgaggaggtcgaggagggtgcagtgtaccacgtgactttgaaacgagtgcagatccagcaggccgccaataagggcgccagatggcttggggtagaaggtgatcagctcccaccagggcacactgtttcacaatacgagacatgcaagatccggaccattaaagccggaactctagaaaaactggtggagaatctcctcaccgcctttggcgacaatgacttcacatacatctccattttcctgagcacatacagaggctttgcttccaccaaagaagtattagaactgctcctcgatcgatacgggaatctgacaagtcctaattgcgaagaggatggaagtcagtcatctagcgaaagcaaaatggtcatacggaatgccatcgccagtatattaagagcgtggctggatcagtgcgccgaggactttcgcgaacctccacatttcccatgcctgcagaaactcctcgattacctgacaaggatgatgccaggttctgaccctgagagacgtgcacagaatctactggagcaattccagaaacaggaagttgaaacagacaatggccttcccaacaccatatctttttcactagaagaggaggaggaactcgaaggtggggaatctgctgagttcacatgcttttctgaggatcttgtagctgaacagctgacatacatggacgcccaattattcaagaaagtggttccacaccattgcctcgggtgtatctggagtaggagagataaaaaagagaacaaacatttagctcccacaatccgggctactatttctcagtttaacaccttgactaagtgcgtcgtgagcacgatacttgggggcaaggagttaaaaacacagcagcgagccaaaatcattgagaaatggattaatatcgcccacgagtgtcggctgctcaagaatttcagctccttaagggctattgtctcagctttgcagagcaactctatatacaggctgaagaaaacgtgggccgccgtgccccgggaccgcatgctgatgtttgaggaactctctgatatcttttctgaccataacaaccacttgacttctcgagaacttctgatgaaggaaggtaccagcaaattcgccaacctcgacagcagcgtcaaagaaaatcagaagcgcacccagcgccgcttacagttacagaaggacatgggcgttatgcaggggaccgtcccttatctagggacattccttaccgacctaacgatgctggatacagctttacaagattacatcgaggggggcttgattaacttcgaaaaaaggcgtcgcgagttcgaggtaattgcgcagataaaacttcttcagagcgcctgtaactcttattgcatgactccagatcaaaagtttatccaatggttccagagacagcagcttctcacagaggaggagtcatacgctctgtcatgtgaaatcgaggccgccgcggatgccagcacgacttcgcccaaacccaggaagtcaatggtcaagaggctgtcattactttttcttggctctgacatgatcaccagtcctacaccaactaaagagcaaccaaaatcaaccgcatcgggttcctcgggcgagagcatggactccgtgagcgtcagttcttgcgaaagtaatcactctgaagctgaagagggtagcatcacaccaatggacacccccgacgaaccccagaagaagctatcagaatcatcaagttcctgcagtagcattcattcgatggataccaatagcagcggcatgagttccctgatcaaccccctcagttccccgccgtcatgcaacaacaatccgaaaatccataagaggtccgtttcagtgacatctataaccagtactgtgttgccccctgtttacaatcagcagaatgaggatacctgtattattcgaatctcagtggaagacaataacggtaacatgtacaaaagtattatgctgacaagccaggataagaccccagccgtaatccagcgcgcaatgttgaagcacaatctggattcagatcccgctgaggagtatgaactagtccaggtgatctctgaagacaaggagctcgtgattcccgatagtgctaatgttttctatgcgatgaatagccaggtcaattttgattttatattacgaaaaaagaatagcatggaagagcaagtgaagctgaggtcacgcacgagtctgactctgccccggacggccaagcgaggctgttggtccaaccgccacagtaagatcactctgtag

SEQ ID NO: 131664 - DNA, 2301 bp, synthetic construct
  misc_feature 1..2301: note = Description of Artificial Sequence: Synthetic coding sequence
  source 1..2301: mol_type = other DNA
atggaagtgaagcctgttggagagccgactcaggaggtgtcgaagtttaagctgtctacgaaggtggaaagtacggggcattggttggttgaagatcacgttcggatttgggaggttctcaagacagaggaagtcgagggcgaccaattgccacccggacataccgtgtctcagtacgaaacctgtaagattaggaccataaaggcgggcaccttggagaaactggtggagaacctactcaccgctttcggggacaatgactttacttacatcagcatctttcttagtacatacagagggttcgcttcaacaaaggaggtactggaactcctgctcgataggtatgggaatctgacgtctccaaattgtgaggaggacggctcgcagtcatcatccgagagtaaaatggtgatccgcaatgccatcgcatcaatcctaagagcgtggctagaccagtgtgcggaggattttagagagccgccccacttcccttgcttacagaaacttctcgattatctgacgagaatgatgcctggctcggatccagagcggagagctcagaatctgttagagcagtttcagaagcaggaggttgagactgataatggcctgcctaacacaattagttttagtctcgaggaagaagaggagttagagggaggagaatcagcagagtttacatgtttcagtgaagacttggtggctgaacagctgacatacatggatgcacagctatttaagaaggtcgtgccccaccattgcctcggatgcatttggtctcggcgcgacaagaaggaaaataaacaccttgcccctactatccgcgctacgatttcccaattcaacacgttgacaaagtgcgtcgtcagcactatccttggtgggaaagagctcaagacccagcaacgggctaaaattattgagaagtggattaatatcgctcatgagtgcaggttgcttaagaacttctcttcactgagggctattgtgagcgcactgcagagtaactcaatctacaggttgaagaaaacatgggctgctgtgccacgagatagaatgctgatgtttgaagagctgagtgacatcttctctgatcataataaccatctgacctcaagggagttgctgatgaaagaggggaccagcaaatttgcaaacctagattcttctgttaaagagaatcagaaaagaacccagcgtaggctgcagctgcagaaagacatgggagtcatgcagggtacagtaccgtacctgggcacattcctaactgacctgactatgctggacacagccctgcaagattatatcgagggcggcttgattaacttcgagaagcgtcggagagaattcgaggtgattgcccagatcaagctgttgcagtctgcctgcaactcttattgtatgacccctgatcaaaaattcatacaatggtttcagaggcaacaacttttgactgaggaggaatcttacgccctgagctgcgaaattgaggccgctgccgatgcctccaccacaagccccaaaccccgcaagtcaatggttaaacggttatcgctgctttttttggggtctgacatgattacttctccgactcctactaaggagcagcccaagagcactgcatccggatcatctggcgaatcaatggacagcgtgagcgtgagttcatgcgaaagcaatcatagtgaagcggaggagggaagtatcactcccatggacactccggatgaacctcagaagaagctgtccgagtcgtctagcagttgctcctcaattcatagtatggacactaatagtagcggtatgtcctctcttatcaaccccctgtccagccctccgtcatgcaataacaaccctaagatacacaagcggagcgtaagcgtgacctcaataactagtacggtgttgcccccggtgtataaccagcagaatgaggacacttgcattattcggattagcgtggaagataataatggcaatatgtacaagtctataatgctgacatctcaagacaaaaccccagccgtaattcaacgagctatgctgaaacataacctagacagcgacccagccgaagagtacgaactggtgcaggtgatctccgaggacaaagaactggtaattccagattctgcaaacgttttctatgcgatgaatagccaagtgaattttgacttcatccttaggaaaaaaaattccatggaggagcaagtcaagctccgcagccgaactagtctgacattgcccaggacagctaaacgcggctgttggagcaatcgccactcaaaaattactctgtag

SEQ ID NO: 131665 - DNA, 2220 bp, synthetic construct
  misc_feature 1..2220: note = Description of Artificial Sequence: Synthetic coding sequence
  source 1..2220: mol_type = other DNA
atgaagttgctgtggcaggccaaaatgagtagcattcaagactggggcgaggaagtcgaggaaggagccgtgtaccatgtaactctgaagagagtccagattcaacaggccgcaaataagggagctcgatggctcggtgttgagggcgatcagcttccaccgggacatacagtctctcaatatgagacatgtaaaatacgcactattaaagcgggcaccctggaaaagctcgtcgagaatctgcttaccgccttcggggacaatgactttacctacataagtatcttcctgtccacctacagggggtttgcctccaccaaggaggtgctggaactgctgctcgaccggtacggaaacttgacgagcccgaattgtgaggaagacggcagccagtcctcgtccgagagcaagatggtgattaggaatgccatagcatctattctacgcgcttggctggaccagtgcgctgaagactttagagaacctccgcacttcccctgcttgcagaaattgctagattacctgaccaggatgatgcctggatctgaccctgagagaagggcccagaatctgttggaacagttccagaaacaggaagtggagactgataacggtctgcccaacacaataagttttagcttggaggaggaggaggaactggaggggggggaaagtgcggagtttacctgcttctccgaagacctggttgcagagcaactgacttatatggacgctcagctgtttaagaaggttgtcccccatcactgtctgggctgcatttggagccggcgtgacaagaaagagaacaaacatctggcccccaccatacgcgctactatctcacagtttaataccctgacaaagtgtgttgtcagcactattttaggaggaaaggagctgaaaacccagcagagagcgaagattatcgagaaatggattaatatcgcacatgagtgccggctgctcaaaaatttcagctcacttcgcgctatagtatccgcgctgcagtctaactctatttaccgcctgaaaaagacctgggcggcggttcccagagacagaatgctgatgtttgaagagttaagcgatatattcagcgatcacaacaatcacctcacatcacgcgagttgctaatgaaagaagggactagcaagttcgctaacctggattcatccgtgaaggagaatcagaagagaacgcagcgccgtctccagcttcaaaaggatatgggaggactcattaacttcgaaaagcgacgcagggagttcgaggtaatagcccagataaagctgctgcagtccgcttgtaatagttactgtatgaccccagaccagaaattcatccagtggttccagcgccagcagcttctgactgaagaggaaagctacgccttaagctgcgaaattgaagctgctgccgatgcctctacgacttcaccaaaacctcggaagagtatggttaagcggctgagcctcctgttcctcggatccgacatgataacatcacccacccctaccaaagaacaacccaagagcactgcttctgggtcctcgggggaaagtatggactccgtgtccgtgagtagctgcgaatcgaatcactccgaggcagaagagggttccattacaccgatggatacccccgatgagcctcagaagaaattgtctgagtccagtagcagctgttcaagcatccacagtatggatacgaattcctccgggatgtcaagtctgattaatcccctctcgtcaccccctagctgcaataacaatcctaagattcataagcggagtgtaagcgtgacgagcatcacgtcgactgttcttcctcctgtgtacaatcagcaaaacgaagatacctgtattatacgcatcagtgttgaagataataacggaaatatgtacaaatccattatgctaacgtctcaggacaaaacaccggcagtaatacagcgggcgatgctgaaacacaatcttgattccgacccagctgaggaatatgagctggtgcaggtgatcagcgaagataaggaacttgtgatacctgactccgctaacgttttctacgccatgaatagtcaggtcaacttcgatttcatcctacgcaaaaaaaattcaatggaggaacaggtgaaactgagaagcagaacctcactaactttgccccggaccgctaagcggggatgctggtcaaatcggcattccaagatcaccctgtag

SEQ ID NO: 131666 - DNA, 1173 bp, synthetic construct
  misc_feature 1..1173: note = Description of Artificial Sequence: Synthetic coding sequence
  source 1..1173: mol_type = other DNA
atgggtagcttcaaagatcggggcgatggactacccaacaccatctcctttagcttggaggaagaagaagaactggaaggcggagaaagcgccgagttcacctgcttctccgaggatttagtcgccgaacaacttacctatatggacgcgcagctctttaagaaggtggtgccacaccactgtttaggatgcatctggagcaggcgggacaagaaagagaataaacacctggcacccactatccgggctactatttctcagtttaatactttaactaagtgcgttgtgtctaccatcctgggaggaaaagagttgaagactcagcagagagcaaaaatcatcgaaaaatggattaacatcgcacatgagtgccgcctgctgaagaacttctcgagtctcagggccattgtgagtgctctgcagtcgaatagcatatataggcttaaaaagacatgggccgccgtgcccagggatcgcatgctgatgtttgaggagctcagtgacatatttagcgaccacaacaaccacctcacatcaagggaacttctgatgaaggagggaaccagcaaatttgccaatctggactcttccgtgaaggagaatcagaagcgcacacaacggcggctccagttacagaaagatatgggtgtaatgcaaggaactgtgccatacctgggcaccttcctgactgacctaaccatgttagacaccgctttacaggattacattgagggcggcctgataaactttgaaaagaggagaagggagttcgaggtaatcgcccaaatcaaattgctgcagtcagcctgtaactcctactgcatgacacctgatcagaaattcattcaatggtttcagcgacaacagttgttgaccgaggaagagtcctacgctctcagctgcgaaattgaggcagctgctgacgccagcacaacaagccctaagcctagaaaatccatggtcaagaggctgtctctgctattccttggatccgacatgatcacttctcctacacctacgaaggaacaaccaaaatccactgcatcaggcagctctggcgaatccatggactcagtgtctgtgagcagctgcgaatctaatcactctgaagcagaggaaggctcgatcacccctatggacacaccggacgagcctcagaagaaggccctctag

SEQ ID NO: 131667 - DNA, 1422 bp, synthetic construct
  misc_feature 1..1422: note = Description of Artificial Sequence: Synthetic coding sequence
  source 1..1422: mol_type = other DNA
atgcggaaattgttaaccaacctacccgcagccgctgtcctcagcgcccaggtatactccgccgtactacaggggctgtgggaagagaacgtgtgcggcactccagggcggacaagagtctgtactgccctgctgtacggccaggtttgcccgtttcaggacagcactgacgggctccgaactatcactagtatcctatttaattggccaccagaaaatacgtctgtctactaccaaccacctcagcggtctagcttccggattaaactagcgttccggaatctcagttggcctggtttgggtctcgaagaccaccaggagattgtgctgggtcaattagttcttccagaaccaaacgaggctaaacctgacgatccggccccgcggccaggtcagcacgccctgaccatgcccgctctggagcctgccccgccgctgttagccgatctggggcctgcactggaacccgagtctccagccgccttaggcccccctggatacctgcattcggcccctgggcccgcccccgcccccggggagggccctccgcctgggactgtgctagaacctcagagcgctccagagtcatcatgtccttgccggggcagcgtgaagaaccagccatccgaggagctcccggatatgaccacttttccccccaggttgctggctgaacaactaacactgatggacgctgagctgtttaaaaaggtggtgctgcacgagtgccttgggtgcatctggggccagggacacttaaaaggaaatgaacacatggcgccaacagtccgggccactatcgctcatttcaaccggttgacgaactgtattaccacctcctgcctgggagatcactccatgagagctcgggaccgggccagagtcgtcgagcattggatcaaagtggctagagagtgcctcagtctgaacaactttagcagcgtgcatgtgatcgtctccgccctttgtagcaacccaattgggcaactgcataagacctgggctggcgtttctagtaaatctatgaaagagctgaaagagttatgcaagaaggataccgccgtcaagagggacctattgattaaggctggcagttttaaggtcgccactcaggagcgaaacccacagcgggttcaaatgaggctccgtcgacagaaaaaaggcgtcgtaccattcctgggcgacttcttaactgagttgcaacgcctagattccgccatccccgacgatctggacgggaacacaaacaagagatccaaagaagttagggtgttgcaagagatgcagctgcttcaggtggccgcaatgaattaccgcctccggccccttgagaaatttgttacctacttcacccggatggagcagctcagcgacaaagaaagctataaactgagctgccagctggaaccggagaatccttag

SEQ ID NO: 131668 - DNA, 1743 bp, synthetic construct
  misc_feature 1..1743: note = Description of Artificial Sequence: Synthetic coding sequence
  source 1..1743: mol_type = other DNA
atgcgcaagctgctgaccaatttgcccgccgccgccgtgcttagcgctcaagtctattccgctgtcctgcaagggctctgggaggagaatgtgtgcggcacgcctgggcgaacccgggtgtgcaccgcgttgttatatggccaagtatgcccctttcaggactccacggatggactcagaaccataaccagcatcctgttcaattggcccccagagaacacttcagtctattatcagccaccccagcgctcgagtttcagaatcaaactggccttccgcaacctatcctggcctgggctaggactcgaggatcatcaggagatcgtactaggacagctcgttttgcccgaaccgaatgaggccaaacctgacgatcccgcaccaagaccaggtcaacacgccctgacaatgcctgcacttgagcccgcccctcccctgctggcagacctgggacccgctctggagccagaaagtcctgccgctttgggccctcccggctatctccactctgctcccggtcccgcgcccgcccccggcgagggtccaccgccagggactgtactggagccccagagcgcgcccgagagcagttgtccctgccgtggctccgttaaaaaccaaccttcagaagaacttccagacatgacaacatttcccccgaggctgctggcagaacagttaactctgatggatgcagagttgttcaagaaagttgtccttcatgaatgcttgggctgtatctggggccaggggcacctaaaaggaaacgaacacatggcgccgacagtgagagccactattgcacactttaaccggctgacgaactgcattacaacgtcatgtctcggtgatcacagcatgcgcgccagggacagagccagagtggtcgagcattggatcaaggtcgcgagggaatgtctctctctgaataactttagctcagtccacgttattgtatcagccttgtgttcaaatcccataggccagttgcacaaaacctgggcaggtgtttcctcaaagtcaatgaaagaacttaaggaactgtgtaaaaaagacacggctgtgaagcgcgatctgctgatcaaggcgggcagcttcaaagtggcgactcaggagcgcaacccacagcgggttcagatgagactccgaagacagaagaagggcgttgtaccattcctgggcgatttcttaacagaactgcagcgattggatagtgccatccccgatgacctcgacggaaacacaaacaaacgttccaaggaagtacgggtactccaggaaatgcaacttttgcaggtggccgccatgaactatcgcttacgaccactggagaagttcgtcacctactttacaaggatggagcagttatcggacaaggagcgctggggattcacaatgatgtcaaggatcgtctctaatagttggccccaggccatccacccaccacagccccccaaagtcctcacactacagttgcaggccgtcttgcctgcaggggcccgcaagcctgtcggctggcagcacccagccgttgccggtaatccacccgggtgctggcccgaacataggctctgcacgatcccccaccctgatagaaggcatcagggaacaacctctaggcgcttagctgcccagctccacttggcgctggatccacaccaccagctcctgctattggcccggattagaccttgggatttctgcgaaagtggtggacggcccttttatgtctacttcctgtag

SEQ ID NO: 131669 - DNA, 1968 bp, synthetic construct
  misc_feature 1..1968: note = Description of Artificial Sequence: Synthetic coding sequence
  source 1..1968: mol_type = other DNA
atgaccgagtgctttcttcctcccacatcgagtccgtccgaacatcgccgcgtcgagcatggtagcggcctgactcgcactccatcctctgaagaaatctcccccaccaaatttcctggtctgtatagaaccggagagcctagtcctcctcacgacattctgcatgaaccccctgacgtggtatctgatgatgagaaggaccatgggaaaaaaaaagggaaattcaagaagaaggaaaaacggacagagggttatgctgcgtttcaggaggatagtagcggagacgaagccgagtctccatctaaaatgaaaagatccaaaggtattcacgtgtttaagaagccgtccttctcgaaaaaaaaagagaaggatttcaaaatcaaagaaaagcccaaagaggaaaagcataaagaggagaaacataaggaggagaaacataaagaaaaaaaatccaaggacctaactgctgccgacgtggtgaaacagtggaaagaaaagaagaagaaaaaaaagcctattcaggaaccagaagtgccacagatcgatgtccccaacttgaaacctatcttcgggattcccctcgcagacgctgtggagcgtacaatgatgtacgatggaatacgactgccagcagtcttccgggagtgtattgactacgtggagaaatacgggatgaaatgcgaaggcatctaccgggtgtcggggataaaatccaaagtggacgagcttaaggccgcatacgaccgtgaagagtctaccaacctggaggattacgaaccaaacacagtggctagcctgctgaaacagtacctccgggacctgcctgaaaatctgctcaccaaggagcttatgccgcgcttcgaggaagcatgtggaagaacgactgaaactgagaaagtacaggaattccaacgattactgaaagaactgcctgaatgtaattacttgctgatctcttggctgattgtgcacatggaccacgttatcgccaaggagctggagacaaaaatgaatatccagaacatctcaattgtgctgtctccaactgttcagatctcgaatcgggtgttatatgtgttctttacccatgttcaggagctgtttgggaacgttgtgttgaagcaagtcatgaagcccctaagatggtccaacatggctacaatgcccacattaccagagacacaggctggcataaaggaagagatacggagacaggaatttctactcaattgcctacaccgggatttgcaaggaggcatcaaggatctgagtaaagaggagagactgtgggaagtccaaagaatactcacagcactgaagagaaaactaagggaggccaaaagacaggaatgcgagaccaagatagcccaggagatcgcctctctgagcaaagaggatgtgagtaaagaagaaatgaatgaaaatgaggaggtaatcaacatactgctggcacaagaaaacgagattctgacagagcaagaggagttgctcgctatggaacagtttcttcggaggcagattgcatccgagaaggaagagattgagcggcttagagccgagatagctgagattcagtctagacagcagcatgggaggtcggaaacggaagagtattctagtgagtctgagtctgagagtgaggacgaggaggaactgcagataattctggaggatcttcagcgccagaatgaggagctagaaatcaagaataatcatttgaatcaagcaatccacgaggagcgcgaagctattattgaattgcgagtgcagctgcgactgctgcagatgcagcgtgccaaagccgaacaacaagcgcaagaagacgaggagcctgagtggaggggtggggccgtgcagccccccagagacggagtattggagccgaaggccgccaaggaacaacctaaagccggtaaagaaccagcaaagccatcaccatctcgcgaccgcaaggaaacctctatttag

SEQ ID NO: 131670 - DNA, 1968 bp, synthetic construct
  misc_feature 1..1968: note = Description of Artificial Sequence: Synthetic coding sequence
  source 1..1968: mol_type = other DNA
atgacagagtgcttccttccacccacttcttcacccagtgagcatcgtcgcgtagaacacgggagtggcttaacccgaactccatcatctgaggaaattagcccaactaagttccctggactttaccgaactggagagccatcccccccgcatgacatcttacacgaaccgcccgacgtggtctctgacgacgagaaagaccacggcaaaaagaagggtaagttcaagaagaaagagaagcggacagagggatacgcagcattccaggaggacagcagtggagatgaagccgaaagtcctagcaagatgaaaaggtccaaagggatccacgtctttaagaagccctcatttagcaagaagaaagaaaaagacttcaaaatcaaagaaaagcccaaggaggaaaaacataaggaggagaaacataaggaggagaaacacaaggagaagaaaagcaaggaccttacagccgcagacgttgtgaagcagtggaaggaaaaaaagaagaaaaagaagcctatccaagagcccgaggtaccccagatagacgttcccaatctgaagccaatcttcggcattcctcttgcggacgctgtggagcggaccatgatgtatgatggaatccgcttacctgccgtatttagagaatgtattgactatgtggagaagtatgggatgaaatgcgaagggatttaccgggtgagcggcataaagtcgaaagtggatgagcttaaggcagcctatgatcgagaagagtctacaaatctggaagattatgagccaaacaccgtcgcctcacttctcaaacagtacctccgagatcttccggaaaatttattgacaaaggagctaatgccccgcttcgaagaagcctgtggacggacaacagaaaccgaaaaagttcaggaattccagagactgctgaaagaactgccagagtgcaattatttgctgataagctggctgattgtacacatggatcacgttattgccaaggaactagagacaaagatgaatatacagaatatctcaattgtgctgtctccaactgtgcagatctccaaccgtgtcttatacgtgttcttcactcatgtccaggagctgttcggcaacgtggtgttgaaacaggtgatgaaacctctgcgatggtccaacatggccacaatgccgacactccccgagacccaagccgggatcaaagaggaaattagacggcaagagttcctgcttaattgtctacatcgggacttgcaaggaggcatcaaggacttgagcaaagaggaaagactctgggaggtgcagcgcatcctaaccgctctgaaaaggaaacttcgggaagcgaagcggcaggaatgcgagactaaaattgcacaggaaatagcgtcgctgtctaaggaggacgtgtctaaggaggaaatgaacgaaaacgaagaggtcatcaacattttgctggctcaggagaatgaaatactgactgagcaggaggaactgctggccatggaacagttcttaaggcggcagattgcctctgagaaggaggagattgaacggctgagggccgaaattgctgaaatccagagccgacagcagcatggtcgttccgagaccgaagaatatagtagtgagtccgaatcagaatccgaggatgaggaggagcttcagataatcctggaagatctccagcgtcagaacgaggaactcgagataaagaataaccacctcaaccaggctatccacgaggaacgagaggcaattatcgaactgagagtccagctcaggcttctccaaatgcagcgcgctaaggccgagcagcaggcccaggaggacgaagagccggagtggcggggcggagctgtccagccccctcgcgacggcgtgctggagccaaaagctgccaaagagcagccaaaggcggggaaggagcccgccaagccatcacctagtcgcgaccggaaggaaacctccatttag

SEQ ID NO: 131671 - DNA, 1044 bp, synthetic construct
  misc_feature 1..1044: note = Description of Artificial Sequence: Synthetic coding sequence
  source 1..1044: mol_type = other DNA
atgacggagtgcttcctgccccccaccagctctccttcagagcaccgacgggttgagcacggcagtggcctcacccgcaccccttcatccgaagagatcagcccaacaaaattccctgggctgtaccgaactggtgagccttcaccacctcacgatatcctgcacgaacctccagatgttgtgtcagatgacgagaaagatcatggaaaaaagaaaggaaagtttaagaagaaagagaaaaggaccgaaggctacgcggcgttccaagaggactcatccggcgacgaggctgaaagcccctctaagatgaagcggagcaagggcatacatgtgttcaaaaagccttcgttcagcaaaaagaaggagaaggacttcaaaatcaaagaaaagcctaaggaggagaaacacaaagaagagaaacacaaggaagaaaaacacaaggaaaaaaaatctaaggaccttactgccgcggacgtggttaagcagtggaaagaaaagaagaaaaaaaaaaaaccaatccaagagcccgaagttccccaaattgacgtgccaaaccttaaaccaattttcggtatcccgcttgcagacgcagtggagaggaccatgatgtatgacggtatccggctgccagcagtctttagagaatgcatagattatgtggagaagtacgggatgaaatgcgaggggatttaccgcgtctcaggcatcaagtccaaggtagacgagctgaaggccgcttatgaccgggaggaaagcacaaatttggaggactacgagcctaatactgtggcttcacttctgaagcagtaccttcgagatttgcctgagaatctcttaactaaggagctgatgcccagatttgaggaggcgtgtggaaggacaactgaaacggagaaggtgcagagctcaggggaggaggccgcccggagctgtcagttcctcactgccgggaccagcaagggacttcttactggcctagttaagggttcccaccttggtctcgtgcatcctcagcgcatgctgtttaagcctgaaatcttttag

SEQ ID NO: 131672 - DNA, 1980 bp, synthetic construct
  misc_feature 1..1980: note = Description of Artificial Sequence: Synthetic coding sequence
  source 1..1980: mol_type = other DNA
atggaagccgccgcagccgccgctgctgcagctgccgccgcagccgcagccggcggaggctgtggaagcggaccacccccactcttgctttcagagggagagcaacagtgctattctgagctgttcgcacgttgtgctggcgctgctgggggcggtccgggcagcggtccacctgaagctgcccgagtcgctccgggcacagcgacagctgctgccggtccggtcgctgatctcttcagggcttcccaattaccagctgagaccctgcaccagataaccgagctctgtggcgcaaaaagggtggggtatttcggcccaacacaattttacattgccctgaagctgattgcggcggcacaaagcggtctgcctgtgcgaatcgagtcaataaaatgtgaacttccactgcctcggttcatgatgtctaaaaatgacggagaaatcagattcggcaacccagctgagctacacggtaccaaggtccagatcccgtacttaacaactgaaaagaatagcttcaaacgaatggacgacgaggacaagcaagagacccagtctcctaccatgtctcctttggcctcacccccttccagccccccccactaccagagagttccattgtcccacggatatagtaaacttagatctagcgcggagcagatgcacccggcgccttacgaggctagacagcccctcgtgcaacctgaggggagtagttctggcggcccgggtacaaagcctctgcggcatcaggcctctctgatcagaagctttagcgtagagagagagctccaggataactctagctatcccgacgaaccttggaggattaccgaggagcaacgggagtactacgtaaaccaattcagaagcctgcagcctgacccctcttctttcattagcggctcagttgcgaaaaacttctttacgaagagcaagctgagtatcccagaactgtcctacatctgggagctcagtgacgccgattgtgatggggccttgacccttccggagttctgtgctgcttttcacctgatcgtggccagaaagaatggataccctctcccagagggtctgcctcctactttgcagcccgaataccttcaagccgccttcccaaagcccaaatgggactgccagttgttcgactcgtatagtgagtccctgccggctaaccaacagcctagagacttaaaccgaatggagaagaccagcgtcaaagatatggccgatttgcccgtgcctaatcaggatgtaactagtgacgacaaacaggctctgaagtcaaccattaatgaggctctgcctaaagacgtcagcgaagatccggcaacacccaaggactccaactcattaaaagcacggcctaggagtcgctcatactcctcgactagcatcgaggaagctatgaagcggggggaggacccccccacccctccacctcggcctcaaaagacccactctagagcctcaagccttgacctgaataaagtgtttcagccttccgtcccggccactaaatcaggcttactgcctcctcctccagctctacctccacgtccctgtccctcccagagcgaacaggtgtcggaggcggaactgttaccgcagcttagccgcgccccctctcaggcagccgagtcctcccctgcaaaaaaagacgtgctttacagccagccaccctctaagcctattcggaggaagttcagacccgaaaatcaagctacggaaaaccaggagccctcgaccgctgcatccggcccagcctccgcagcgaccatgaagcctcatccaacagtccaaaaacaatcatccaaacagaagaaagccattcaaacggccatcaggaagaataaggaagctaatgccgttttagcacgccttaactccgaacttcagcaacagcttaaagaggttcaccaggagagaatcgctctggagaatcagttggaacagctacgccccgttactgttctctag

SEQ ID NO: 131673 - DNA, 1983 bp, synthetic construct
  misc_feature 1..1983: note = Description of Artificial Sequence: Synthetic coding sequence
  source 1..1983: mol_type = other DNA
atggaagctgcagcagcagcagctgccgctgcggccgccgctgctgccgccgggggcgggtgcggttcaggtcccccacccctgttattgagtgagggagaacaacagtgctactccgagctgtttgctaggtgtgccggcgcagctggaggaggccctgggtccggtcctccggaagccgcccgagtggccccaggcacagccaccgcagcggcgggacccgtcgccgacttatttagggccagtcagttaccagctgagacattgcatcaaattacggaactgtgtggcgcaaaaagagtcgggtattttggccctacccagttttacatcgctctcaaacttatcgctgcagcccagtctggactccctgtcaggatcgagagtattaagtgcgaacttcctctccctaggtttatgatgtccaagaatgacggcgagattcggtttggtaatcccgctgagttgcacggcaccaaagtgcaaattccttatctgacaaccgagaaaaattctttcaagcgcatggatgatgaggataaacagcaagaaacccagtctcccacaatgtcacctctggccagtccaccctcatcgccacctcattaccagagagttccactgtcccacgggtacagcaagctgcgcagcagcgccgaacaaatgcaccctgccccatacgaggctcgccagcctttagtccagcctgaaggctcatcctctggagggccaggcacaaaaccactgcgccatcaggcctccctgatccgcagttttagtgtggagagggaacttcaggataactcctcctacccagacgaaccatggagaatcaccgaggagcagcgggaatactacgtaaatcagttcagaagccttcagcccgacccttctagctttatttcaggatcagtggccaaaaactttttcaccaagtctaaactctccattcccgagctctcatacatatgggagctgtccgacgcagactgtgacggcgcactgacgctgcccgagttctgcgctgcttttcatctgatcgtagccaggaaaaatggttatcctctgccggaaggcctgcctcccaccctacagcctgagtacctccaggccgccttcccgaagccgaagtgggattgtcagttgtttgattcctactctgaatcactgccagctaaccaacagccccgggacctgaatcgaatggagaagaccagtgtgaaggacatggcagacctgcctgttccaaatcaggatgtcacatccgacgataagcaggccttgaagagtacaatcaatgaagccttgccaaaagacgtcagcgaggaccctgctacccctaaggactcgaactcactgaaggctagacccagaagccgctcatactcctccactagcatcgaagaagctatgaagcgcggcgaagaccccccaactcccccgcccagaccacaaaagacccattctcgtgcgagcagcttggacttgaataaagtgtttcagccatcggttccggcgactaaaagtggtctgcttccacccccacctgccttgccccctcgcccatgtccgagccagtcggaacaggtaagtgaagcagagctgcttccacagctgtctagagcgccatcacaggctgccgaaagcagcccagcaaaaaaggatgtgctctacagtcaaccacctagcaagccaattcgtagaaagtttaggcctgagaaccaggcaacagaaaaccaggagccttctacggcagcttctggtcccgcaagcgcagctacaatgaaaccccaccccacagttcagaagcagagttctaagcaaaagaaagcaattcagaccgcaattcgcaagaacaaggaggctaacgccgtacttgcgcgacttaacagcgagttgcagcagcaactgaaggaagtgcatcaggagcgcatcgctttggagaaccaactagaacagctgcggcctgtcactgtgctttag

SEQ ID NO: 131674 - DNA, 1824 bp, synthetic construct
  misc_feature 1..1824: note = Description of Artificial Sequence: Synthetic coding sequence
  source 1..1824: mol_type = other DNA
atggaagctgccgctgccgccgcggccgctgcagccgccgctgccgccgctggtggcgggtgcgggtcgggtcctccccctctcctgttaagtgaaggagagcagcagtgttacagcgagctgtttgcccggtgtgccggtgctgccggaggcggaccagggtcgggccccccggaagccgcacgcgtggcgcctggaaccgccacagcggccgccggacccgtagccgacctgttccgggcctcccagttgccagctgaaaccttacatcagatcacagagttgtgtggggctaaacgagtcggctattttggaccaacgcaattctacatcgcgctgaagctcatcgccgccgcccagtctggcctgccagtcagaatcgagagcataaaatgtgagctgcctctccctcgttttatgatgtctaaaaacgacggggagatcagattcggaaatccagctgaactacatggtacgaaagttcagattccttatctgaccacagagaaaaacagctttaagaggatggatgatgaggataagcagcaagagactcagagccccacgatgagccccttggcaagtccaccctcatctccacctcactaccagagggtccccctctctcatgggtatagcaaacttagaagttcagctgaacagatgcatccagccccttacgaagcccggcaacccttggttcaacctgagggttcctccagcggtggccctggaactaaaccactgcggcatcaggccagcctgatcagaagcttttctgttgaacgagagctgcaggacaactccagctaccctgatgaaccctggcgcattacagaggagcagcgcgagtattacgtaaatcaattcaggtccctgcagccagaccctagcagtttcattagcgggagcgtggcaaagaactttttcactaagtctaagctgagcattcctgagctctcttacatctgggagctgagtgatgcagactgtgatggagcccttactttaccagaattttgcgctgcttttcacctcatcgttgcccgaaagaatggatatccactccccgagggactccccccaaccctacagcccgaatatttgcaggccgcctttccaaagcctaaatgggattgtcagctgtttgatagctactctgaatcattgcccgcgaaccagcagcctcgcgatttaaaccgcatggagaagaccagcgtaaaggacatggcagatcttccggtgccgaatcaggatgttaccagcgatgacaagcaagctcttaagtcgactataaacgaagccttaccgaaggacgtctcagaggacccagctactcccaaggactccaattccctcaaagcacgacctcgctcgcgttcatactcttcaacttctatagaagaagctatgaagcggggggaagacccacctactccccctccaaggccgcagaaaacccattctcgagctagttccctcgacctaaataaggtcttccaacctagtgtccctgctacaaaatcagggctacttcctccaccccccgccctgcccccgcggccatgtccgtctcagtcagaacaggtcagtgaggccgagctgctgccacaattgagtcgggcaccctcacaagccgcagagtcttcaccggctaaaaaggacgtcttgtactcccagccgcctagtaagcctattaggagaaaatttcgcccggtgtgcggcatccaacccctgattagtattgagctgcgagccttcaggacaagtcgacacctgttcaatgtgtccctggtgcattggcaggcgttgtctatagcttag

SEQ ID NO: 131675 - DNA, 1380 bp, synthetic construct
  misc_feature 1..1380: note = Description of Artificial Sequence: Synthetic coding sequence
  source 1..1380: mol_type = other DNA
atgatgagcaagaatgatggcgagatccgtttcgggaacccggctgagctccatggcacgaaggtacagatcccatacctcaccactgagaaaaactcttttaagagaatggatgatgaagataaacaggagacccagagcccaactatgagccccctggcctcaccacctagctcgcctcctcactaccagagggttcccctgtcacacggctactccaagttgagaagcagcgcggagcagatgcaccccgccccatatgaggcacgccagccactagtgcagcctgagggaagtagctcaggtgggccagggaccaagccgcttagacatcaggcctctctgatccgcagtttttctgtagaacgtgagctgcaggacaacagctcctaccccgatgaaccatggcggataaccgaggagcagcgcgaatattacgtgaaccagttcaggtcgctccaaccagacccctcatccttcatctctggctctgtggccaagaacttcttcacgaagagtaagttaagcatcccggagctgagctacatttgggagttgtcggatgccgactgtgatggggccctgacacttccagagttttgtgccgcattccacctgatcgtagccagaaagaatggctacccattgccagaagggctgcccccaacccttcagccggaatatctccaggccgctttcccaaagcctaagtgggattgccagctgttcgactcttacagcgagagcctgccggcaaaccaacagccccgtgatctgaatcggatggagaagacatccgttaaggatatggccgacctacccgtgcctaaccaggatgtgacttctgatgacaaacaggcactgaagagtactatcaacgaggctctcccaaaagacgttagcgaggacccagctacgaaatccggactgctccccccccctcctgctctacctcccagaccatgcccttctcagagtgagcaggtgagcgaggcagagctgctaccccaattgtctcgggcaccatcccaggccgctgaatcctcacccgccaagaaggacgtgttatactcacaacctcccagcaagccaattcgacggaaatttaggccagagaaccaggctacagagaatcaagaaccatccacagcagcaagcggtccagcttcagccgctacaatgaagccacacccaaccgtgcagaagcagtcgtcaaagcagaaaaaggcaatccagaccgccatcagaaagaacaaggaggcaaatgcggtcctggcaaggctgaattcagaactgcagcaacagctgaaagaagttcaccaagaacgcatcgcgctagaaaaccagctggaacagctccgtcctgtaaccgttctgtag

SEQ ID NO: 131676 - DNA, 1863 bp, synthetic construct
  misc_feature 1..1863: note = Description of Artificial Sequence: Synthetic coding sequence
  source 1..1863: mol_type = other DNA
atggcagctgctactgcggaccctggagccggaaatccccagccaggtgattccagtggcggtggcgctggcgggggtttgccctcccccggcgagcaggagttaagcaggaggcttcagcgtttgtacccagctgtaaaccagcaggagacccccctgcccaggagctggtcaccaaaagacaagtacaactatatagggttgagccagggcaacttacgcgtgcactataaggggcacgggaaaaatcacaaagacgctgccagcgtccgtgccactcatccaatccccgccgcatgcggtatctattatttcgaggtcaagattgtatccaaggggagggacggatatatggggatcggcctgagtgcccagggcgtcaacatgaatcggctgccgggctgggataaacattcatatggctaccacggagacgacggccattcattttgttctagcgggactggccagccctacggccccactttcacaactggtgacgtcattggctgttgcgtgaacctcataaacggcacatgtttctacactaagaatggccactccctgggcattgcatttaccgatttgccagccaatctttatccgaccgtgggcctccagactcctggcgaaatcgtggacgccaatttcgggcagcaacctttcctcttcgacatcgaggactacatgcgggaatggagagctaaagtccagggaactgtccactgttttcctatatctgcgcggctaggcgaatggcaggctgtgctccagaatatggtgtcctcctatctggtccatcacggatactgcgcaacagccactgcctttgcccggatgaccgaaacacctatacaggaagagcaggccagcatcaaaaatcgacagaaaatccagaaacttgtgttggagggacgagttggagaggccattgaaaccacccaacggttttaccctggcctgttagagcacaacccaaatctgctcttcatgctgaaatgcaggcagttcgtggagatggtgaacgggaccgatagcgaagtccggtctttatcttcaaggtctcctaaatcccaagattcctaccccggtagcccaagtctgtctccaaggcacggccctagctcatcccatatgcacaacaccggagcagattcacccagttgttccaatggggtcgcatctactaagagcaaacagaatcacagcaagtaccccgctccctccagcagctctagctccagcagctctagttcatcctccagcccgtcctcagtgaactacagcgagtccaattctacggactcgaccaagagtcagcaccacagctctacttctaaccaggagacatctgacagcgaaatggaaatggaggcggagcattaccctaatggagtcttgggctctatgagcacccgaatcgtgaatggagcatacaaacatgaagacctgcagactgacgagagtagcatggatgaccgccacccacgccggcagctttgtggcgggaaccaggcagccactgaaagaatcatcttgttcggacgggaactgcaggccctgagtgaacagcttgggcgtgaatatggaaagaatttagctcacacagagatgctgcaggatgcattctctctacttgcttatagtgatccctggtcttgcccagtggggcagcagttggatccaatccagagagagccagtatgtgctgccctgaacagtgctattctcgagtctcagaacctccctaagcagccccccctgatgctggccctggggcaggcctccgagtgcctcaggctgatggcaagagctgggttagggagctgttcatttgcgcgtgttgacgactacctacactag

SEQ ID NO: 131677 - DNA, 1602 bp, synthetic construct
  misc_feature 1..1602: note = Description of Artificial Sequence: Synthetic coding sequence
  source 1..1602: mol_type = other DNA
atgggcatagggctctcggcccagggcgtcaatatgaatcggttacccggttgggataaacattcctatggttatcacggcgacgacgggcacagcttttgttcgtccggaaccggacaaccctatggaccaacctttacaaccggtgatgtgatcggttgttgtgtaaatttaattaatggcacctgcttctacaccaaaaacggtcactctctggggattgcgtttaccgacctccctgctaacctgtatcccactgtcggcctgcagacccctggggaaattgtggacgctaatttcggccaacagccttttctcttcgatattgaggactacatgagagagtggcgtgctaaagtccaagggaccgtgcattgcttcccgattagtgcccggctaggggaatggcaggctgttctccagaacatggtcagttcatatctggttcaccatggatactgcgccaccgctacagcatttgcaagaatgactgagacacccatacaggaggaacaagcctcgattaagaacagacaaaaaattcagaaactggtgttagaaggccgtgttggcgaagctatagagaccactcagagattctatcccggcctgctggagcacaatcctaacctccttttcatgctaaaatgcagacagttcgttgaaatggtcaacggtactgattctgaggtgagatccctatcctccagaagccctaagagtcaggactcgtatcccggctccccctctctcagtccgagacacgggccttccagcagtcacatgcacaatactggagcagattccccaagttgctcaaacggggtcgccagcaccaagtccaagcaaaatcattccaagtatcccgctcctagttcttcatcgtcgtcaagtagctctagtagctcttcaagtcctagctcagtaaactactccgagagtaattcaacggactccactaaatctcagcaccacagttcaacatctaatcaagagacttccaatccttggctgcagcttgagcgtcggccaaatcaggcagcacccaccaccccacccggcccaacacccacatccactccaccccactctgactcagagatggaaatggaagcggagcactaccccaatggagtgcttggctccatgtcaactagaatcgttaatggggcctacaaacatgaggacttacaaaccgacgagagcagtatggacgaccggcacccaagacgccagctttgcggaggaaatcaagctgccaccgagagaatcatcctgtttggccgagaacttcaggcgctctcagagcagctcgggcgcgaatacggaaagaacttggctcatacggagatgctgcaggatgccttctcattactcgcttactcagatccatggagctgtccagtgggccagcagctagacccaatccagcgggagcccgtgtgcgccgccctcaactctgctattctcgagagtcagaacctccccaagcagcctccactgatgctggctctcggccaggcctccgaatgcctgcggctaatggctagagccggattgggcagctgctcattcgctagggtggatgactatctccactag

SEQ ID NO: 131678 - DNA, 540 bp, synthetic construct
  misc_feature 1..540: note = Description of Artificial Sequence: Synthetic coding sequence
  source 1..540: mol_type = other DNA
atgggatgggacaagcactcctacggttatcatggggacgatggccattctttttgcagcagtgggaccggacagccatacggccccacctttacaactggagacgtcattggttgctgtgtgaatttgatcaatgggacgtgtttttataccaagaacggtcattcactgggaattgccttcacggatttgcctgccaacttgtatcctactgtggggctgcaaaccccaggcgaaatcgtagacgcgaacttcggccagcaacctttcctgtttgatatcgaagattatatgcgcgagtggcgggccaaagtgcaaggcaccgtgcattgcttcccaatcagtgcccgcctcggagaatggcaggccgtgctgcagaacatggtgagttcctaccttgttcaccatgggtactgtgccactgccacagccttcgcaaggatgacagagacacccatccaggaggaacaggcatctatcaaaaatcgccaaagtaaggtttactctacctttcccttcccgttcctcacctgcccttag

SEQ ID NO: 131679 - DNA, 1785 bp, synthetic construct
  misc_feature 1..1785: note = Description of Artificial Sequence: Synthetic coding sequence
  source 1..1785: mol_type = other DNA
atggctgccgcaactgcagaccctggggccggcaatccgcagcccggcgattcaagtggagggggggccggcggtggattgccgtcccctggggagcaggaactgtctcgccggctgcagaggttatacccggcagttaatcagcaggaaacccctctgccacggtcctggtcacccaaagacaaatacaattacattggacttagccagggtaacctgcgtgttcattacaagggacacggaaagaatcataaagacgctgcctccgtacgagcaacccaccccatccctgcggcatgcggcatctattactttgaggttaagatagttagcaaaggcagagacggctatatgggcattgggctctccgctcaaggggtcaatatgaataggctacccggtatcgccttcaccgacttaccggccaatctttaccccacagtgggattacaaactcctggagagattgtggatgcgaacttcggccagcagccctttctgttcgacatcgaagactatatgagggaatggcgggcaaaggtccagggaactgttcattgtttcccgattagtgccaggttgggagagtggcaagccgtgcttcagaacatggtgtcttcatatctagtgcatcatggttactgcgcaaccgccaccgcatttgccagaatgaccgagacaccaatacaggaggaacaggcctctattaagaatcggcaaaaaatccagaagctggttctggaaggccgggtcggagaggctatagaaaccacacaaagattttatcccggattattggaacacaacccaaacctgctgttcatgttaaagtgcaggcagtttgtagagatggtgaacgggaccgattcggaggtacggtctcttagctcaaggtcccccaaatcacaggactcgtatcccggatctccctccctgagtcctaggcacggcccttcttcatctcacatgcataacactggcgcagattctccttcctgtagcaatggagtggcctcaaccaaaagcaaacagaaccatagcaagtatcccgcaccgtccagctccagctcatcttcctcttcttcttcgtcgtcatccccgagctccgtgaattattccgagtctaattcaacagacagcaccaaaagccagcatcatagcagcacttcaaatcaggaaacctcgaatccctggcttcagctcgagcggaggccaaaccaggctgcaccaacaaccccaccaggtccgactcctacctctacaccaccacattccgattctgagatggagatggaagccgagcactatcccaacggcgtgctcggttccatgtcgacgagaatcgtgaacggcgcctataagcacgaggacctacagacagacgagagtagtatggatgacagacatccacgtcggcaattgtgtggcggtaatcaggctgctacagagcggattatcttgttcgggcgcgaactccaggccctgagcgaacagctgggtcgagagtacgggaaaaatcttgcccacacagaaatgctgcaggacgcattcagcttactcgcctacagtgacccatggagttgcccagtcggacaacagttggatccaatccagcgggagcctgtctgtgccgctctgaactcagctatactcgagtcccagaacctaccaaaacaacccccactgatgttggctctgggtcaggccagtgaatgtcttagattgatggcccgcgcaggattgggatcttgtagtttcgctcgagtagatgattatctccattag

SEQ ID NO: 131680 - DNA, 1176 bp, synthetic construct
  misc_feature 1..1176: note = Description of Artificial Sequence: Synthetic coding sequence
  source 1..1176: mol_type = other DNA
atgcgcgaatggcgggctaaagtgcagggaacagtccattgcttccctatttctgcccgattaggggaatggcaggctgtgctgcagaacatggtttcctcttacctcgtccaccatggatactgtgctacggccactgccttcgctcgtatgactgaaacacctattcaggaggagcaggcctccatcaaaaaccgacagaagatccaaaagctcgtgttggagggacgcgtgggagaggccatcgaaacaacacagcgtttttatcccgggctgctggaacataaccctaatcttctgtttatgctgaaatgccggcaatttgttgagatggtgaatgggaccgattcggaagttcgcagcttatcaagccggtccccgaaaagccaggacagctatcctggatctccatccttgtccccccgtcacggcccctctagctcccacatgcataacactggcgcagacagtccttcatgttctaacggggtggcatccacaaaatccaaacagaaccatagcaaatatcctgcaccatctagctctagctcctcttcctccagctcctcttctagttccccctcgagtgtgaattattcagaatcaaactccaccgattccacaaagtcacagcaccactcatctacgtccaatcaagagactagcgacagcgagatggagatggaggcagagcactaccccaacggcgttttgggctccatgagcactcggattgtgaacggcgcctacaagcatgaggacctgcagaccgatgagtcaagtatggacgaccgccaccctcggcggcaactgtgtggggggaatcaagctgccacggagcgaattattctctttggaagggagttgcaggccctgagtgaacaactcggccgcgagtacggcaagaaccttgcacataccgagatgctgcaggacgcgttctctctactggcctatagcgatccatggagctgtcctgtggggcaacaattggacccaattcagcgagagcccgtgtgcgcagctctcaactccgccatattggagagccagaacttgccaaagcagcccccactcatgctcgctttgggtcaagcgagcgagtgcctgcgactcatggctcgggctgggctgggatcctgttcattcgccagggtagacgactacttacactag

SEQ ID NO: 131681 - DNA, 3267 bp, synthetic construct
  misc_feature 1..3267: note = Description of Artificial Sequence: Synthetic coding sequence
  source 1..3267: mol_type = other DNA
atggccttacatttccagtctctggcggaactcgaagtgttgtgtacacacctgtacattggcactgatttgacacagaggatcgaggccgagaaggccctgctggagttaatcgactccccagaatgtctgtctaaatgccagttgctgctcgaacagggcaccacctcatacgctcagttgttggcagccacatgtctctcgaagttggtgagccgcgtgagtccgctgcctgtagagcagcgtatggatattcgaaactacattttgaactatgttgcctcccagcccaagttggctccgtttgtgattcaggcccttattcaggtcattgcaaagataaccaaactgggctggttcgaggttcagaaagatcaatttgtcttccgtgagatcatcgccgacgtcaaaaagttcctccaaggcacagtggaacattgtatcattggggtgattatcctcagcgagctcacccaagagatgaacctcgtagactactcgcgccccagcgctaagcacaggaagattgccactagctttcgagatacctcccttaaggacgttctcgtgctggcgtgtagcctgctgaaggaggtattcgctaaacctctaaacctccaggaccagtgccaacaaaacctcgtgatgcaggttttgaagctcgtcttgaattgcctgaactttgacttcatagggagctctgccgacgaatcagcagacgacctttgtacagtccagatcccaactacatggagaacaatcttcctggagccagaaacactggatctttttttcaacctttaccacagtctacccccgctccttagccagcttgcgctgtcgtgcctggtgcagttcgcttccacccggcgctctttattcaactcgcccgagagggccaagtaccttggaaacctgattaagggcgtgaaaagaatcttggaaaacccccaggggctgtccgacccaggcaactaccacgagttttgccggttcctcgcccgactgaagacaaactatcagctcggcgagctggtcatggtgaaggaatacccagaagtcatccggcttatagccaatttcacaatcacttcactgcagcactgggagttcgccccgaattcagtgcactatctgctgacactgtggcagcgcatggtggcatccgttcctttcgtaaaatcaaccgaaccccatctgctagacacttatgctccagaaatcacaaaggccttcatcaccagtcggttagattccgtcgccattgtcgtgcgggatcacctcgacgatcccctcgacgacaccgcaactgtgttccagcagcttgaacagctgtgcacggtgtcccgctgtgagtatgagaaaacatgtgctctgttggtccagttgtttgatcagaacgctcagaactaccagaaattgcttcacccctactcaggggtcacagtcgatattacgatacaggagggccgtctagcctggcttgtgtacctggtgggaaccgtagttggcggacgcctgacctacacgtcaacggatgagcatgacgcaatggatggcgaactgtcttgcagggttttccagctgatcagcctgatggataccggcttgccgagatgctgtaacgagaaaattgagctggccatcctctggttcttggatcagtttcgtaagacatatgttggcgaccagttacaaaggacttccaaggtgtatgcaagaatgagtgaagtgctgggaatcaccgacgataatcatgttcttgagactttcatgacgaaaatcgtcaccaatctaaagtactggggccggtatgagccagtcatctcgcgcaccctccagtttctgaatgacctttcagtaggttatattttgctaaagaaactagtgaaaatagacgcagtgaagtttatgctaaagaaccacacatctgaacactttccatttctgggtattagtgacaatcacagcctgagcgatttcagatgcagaacgaccttttacactgcgctaacacgactgctgatggtggacctcggggaggatgaagatgagtttgaaaatttcatgctgccccttactgttgcctttgagaccgtccttcagatctttaataataattttaaacaagaagacgtaaaacgcatgctgatcgggctggcacgggatttgagaggaatcgcctttgctttgaatacaaaaacaagttacaccatgctgttcgactggatgtatcctacgtacctgcctttattacagaacgccgttgaaagatggtacggagagccgacttgtacaacccctatcttgaaactcatggctgaactcatgcagaataggagtcaaaggctgaattttgacgtgagctcaccaaatgggatcctgctgtttcgggaagcctccaagatggtatgcacttatggcaaccaaattctttcccttggtagcctaagtaaagaccagatataccctatgaagttaaaagggatttctatctgttatagtgcactcaagagcgctctgtgtgggaattatgtgtcctttggggtgttcaaactctacggggataaccacttcgataacgtgttgcaggcctttgtgaagatgctcctctccgtgagtcacagcgatctgctgcagtaccgcaagctctcacagagctactacccacttctggaatgtcttacacaggaccacatgtccttcataataaacttagagccccctgttcttatgtacgtactcacttctatcagcgagggtctgacgaccctggacaccgtggtgtcttcgtcctgctgcacttcactcgattacatcgtgacctacctgttcaagcatatagccaaggagggaaagaaaccactgcgctgcagagaagcaacccaggccggacagcggcttctgcacttcatgcaacagaatcctgatgtccttcaacaaatgatgtccgtactcatgaacactatcgtgttcgaggactgtaggaatcagtggagcgtgagcagacccctcttagggctaattcttctcaatgagaaatacttttccgaactacgggcatctctgattaatagccagccactaccaaaacaagaggttctcgcccagtgttttaggaatctgatggagggagtagaacagaacctgagcgtgaagaaccgggaccgctttacgcagaaccttagcgtctttcgccgggacgtcgcggaagcactccggagcgatgggaacaccgaaccttgcagcctggatatgatgtcatag

SEQ ID NO: 131682 - DNA, 1557 bp, synthetic construct
  misc_feature 1..1557: note = Description of Artificial Sequence: Synthetic coding sequence
  source 1..1557: mol_type = other DNA
gtgtacgcacggatgagtgaagtcttgggaatcacagacgataaccatgtacttgagactttcatgacaaagatcgttaccaatctgaaatattggggtcgctatgagcctgtgataagtcgcaccctgcaatttttgaacgatttatcagtaggatatatactgcttaaaaagctggtgaaaatcgacgccgtgaaattcatgctgaaaaatcatacgtccgagcatttcccttttctgggaatcagcgataatcatagccttagcgatttccgctgtagaactacattttacacagctctgacccgcctcctcatggtagatctcggggaggacgaggatgagttcgaaaactttatgcttcccctgactgttgctttcgagactgtcctgcagattttcaataacaactttaagcaggaggatgtgaaacggatgttaatcggacttgccagggaccttcggggtatcgcttttgcactaaatacaaaaacctcctataccatgttgtttgattggatgtaccccacgtatctccccctgctgcagaacgccgttgaaaggtggtacggcgagccgacttgcacaactcccatactgaagttgatggcagagttaatgcagaataggagccagcggttgaacttcgacgtatcttcacctaacgggatactgctgtttcgtgaggcaagcaagatggtctgcacttacggcaaccagatcctatctttggggtccctcagcaaggaccagatttacccaatgaaacttaagggcatctcgatctgctactcagccctcaaaagcgcgctatgtgggaattatgtttccttcggcgtgttcaagctctatggggataatcattttgacaatgtgctgcaggctttcgtaaaaatgttactcagtgtgtcgcactccgatctcctgcagtataggaagctcagccagtcttactacccgttgcttgaatgtctgactcaggaccacatgtcgtttattattaatctcgagcctcccgtgttgatgtacgttctcacaagcattagcgaagggctaacgactcttgacactgtggtgagctcaagttgctgcacctcccttgactacattgtgacatacctattcaaacatatcgcaaaagagggcaaaaagccacttaggtgccgagaggcaacccaagctggtcagcgtctgctccattttatgcaacagaaccccgatgtactgcagcaaatgatgagtgtgttgatgaatacaattgttttcgaggattgcaggaaccagtggtcagtgtcaaggcccttactgggactaattcttctcaatgagaaatacttttcagaactacgcgctagtctcattaacagtcagcctctaccaaaacaagaggtgctcgctcagtgcttccgcaacttgatggagggtgttgagcagaatctgtcggtgaaaaatagggatcggttcacacagaatctcagtgtgtttagacgggatgtagccgaggctctgaggtcagacggtaacaccgagccttgcagcctggatatgatgtcctag

SEQ ID NO: 131683 - DNA, 1419 bp, synthetic construct
  misc_feature 1..1419: note = Description of Artificial Sequence: Synthetic coding sequence
  source 1..1419: mol_type = other DNA
atggacatacggaactacatcctgaattacgtcgcttctcagccaaagcttgccccgttcgtgatccaagcactgatacaagttatcgcaaagatcaccaagctcggttggtttgaggtccaaaaagatcagtttgttttcagagagattattgcagacgtaaagaagttcctccaggtagactactcgcgcccttctgccaagcacagaaaaatagcaacttcgttcagagacacatctctcaaggatgtgctggtcctggcctgcagcctgctcaaagaggtcttcgcaaagccgctcaatttgcaagatcagtgccagcaaaacctcgtcatgcaggtactcaagttagtcctgaactgtctaaacttcgactttatcggctcttcagccgatgagtccgccgacgacttatgtacggtgcaaatccccaccacttggaggacaatctttctcgaacccgagacattggacctgttctttaacctctatcattccctgcctccattgctaagtcagcttgctctctcttgtctggtgcagtttgcaagcactcgcaggtctctgtttaactcgcccgagcgggctaagtatctcggcaacctcattaaaggtgtgaaacgcatcttggagaacccacagggtctgagcgaccctggaaactatcacgaattttgtcggttcctcgccaggctcaaaacaaactatcagctcggagaactggtcatggtgaaggagtaccccgaggtgatacgactgatcgcaaattttacaattaccagcttacagcattgggaatttgccccgaattccgtgcattaccttctcacactttggcaacgtatggtcgcctccgtcccctttgttaaatcaacagagccccacctcttggatacctacgccccagaaatcaccaaggcatttattacgtccagactggactcagtggccatcgtagtgcgggatcatctggacgaccccctggacgatactgccacagtgtttcagcagctggaacagctttgtacagttagcaggtgcgagtacgaaaaaacatgcgcactcctggtgcagctgttcgatcagaacgcgcaaaactatcaaaagctgctacacccctattctggagtgacggtggatataacaatccaagaaggaagactggcatggctggtttacctggtaggcacggtcgtggggggaagactgacctacacgagtacagatgaacacgacgcaatggatggcgaactgtcctgccgagtgtttcagttgatttccctgatggatacaggcctcccgcgctgctgtaacgagaagatagagctggccatcctctggtttcttgatcagtttcgtaaaacctatgttggagaccagctacagcggacatcaaagaagacctttatctacttgtag

SEQ ID NO: 131684 - DNA, 9675 bp, synthetic construct
  misc_feature 1..9675: note = Description of Artificial Sequence: Synthetic coding sequence
  source 1..9675: mol_type = other DNA
atgcgcaggagcaaagcagatgtggagagatatatcgcctcagtgcagggatccacaccatcccctagacaaaagagcatgaagggattctactttgcaaagttatattacgaggcaaaggagtacgacctggctaaaaagtatatttgcacgtacatcaacgtacaagagcgcgatcctaaagcccaccggttcctcggcttactgtacgaattggaggagaacaccgataaggctgtggagtgctacagaagaagtgtggagttgaatccgactcagaaggatctcgtactgaagattgcagagctgctttgcaaaaacgacgtcactgatgggagagcaaaatactggttagaaagggctgctaagctgttcccggggtcccccgcgatctacaagctgaaagaacagctcctggattgcgaaggcgaagacggatggaataaactgtttgacctgatccagtccgagttgtatgtgagacctgacgacgtgcacgtgaatatacgtcttgttgaagtttatcgatcaacaaaaagacttaaggatgccgtggcacactgccacgaagcggagcgcaatatcgccctgaggtcctccttggaatggaattcttgcgtggttcagaccttgaaggagtacctcgagtctctccagtgtctggagtctgataagtctgattggcgcgccaccaataccgatctgctgctggcctacgctaacctgatgctgttaactctctccacacgcgacgtgcaggagtcaagggagctcttgcagtctttcgactctgcccttcagtcggtgaagagtcttggcgggaacgatgagctcagcgcaaccttcctagagatgaaaggccatttctatatgcacgcgggctccctgctgcttaagatgggtcagcacagttccaacgtacagtggagggcactgagcgaactggctgccctctgctacctaatcgcctttcaggttcctcggcctaaaatcaaactcatcaaaggggaagctggtcaaaacctgctcgagatgatggcttgcgaccgtctgagtcagtcagggcacatgttgctcaacctgagcaggggcaagcaagactttttaaaagaaatagttgagacatttgcgaacaagtccggccagagcgccctgtatgacgccttgttctcgtcacaatcaccaaaagacactagcttcctcggttccgatgacatcgggaatatcgacgtgcgcgagcctgagctggaggacctgacaagatacgacgtgggggcgatccgagcacataatggctctctccagcatctgacttggctaggcctccagtggaattccttgcccgcgctgccaggcatcaggaaatggctcaagcagctgtttcatcacctgccccacgaaacctcacgcttagagaccaatgctcctgagagtatctgtatcctagatctggaggtctttttgctgggggttgtatacacctcacatctgcagctaaaggagaagtgcaatagccatcactcttcttatcaacctctatgtctgcctcttcctgtctgcaagcagctatgcacggaacggcagaagagttggtgggatgctgtatgcacactgatacatcgcaaggcagtcccagggaatgttgctaaattgcgcctattggtgcaacacgagattaacactctcagagctcaagaaaaacacggattgcagccggcgctcttagtgcattgggcagaatgcctacagaaaacaggaagtggcctgaattctttttacgaccaaagggaatacattggtcggtctgtgcattactggaagaaagtgctgcctttgttaaaaatcatcaaaaaaaagaactccatccccgagcccatcgatccactgtttaagcatttccatagtgtcgacatccaggcctccgaaattgtggaatatgaagaagacgcacatatcactttcgcaattctggacgccgtgaacgggaacatagaagatgcagtgactgcttttgaatccatcaaatctgtcgtaagctactggaacctcgctcttattttccataggaaggccgaggatattgagaacgatgcactctcaccagaggagcaagaagagtgcaagaattatctgagaaagacaagggactacctgatcaagattatcgacgactccgatagcaatctgagcgttgtgaaaaagttgccagtccctctggaatcagttaaggagatgttaaattccgttatgcaagaactggaagattacagcgaaggcggaccattgtacaagaacggatcactccggaacgcagattctgagatcaagcactcgaccccgtcccccacacgttattctctttccccatccaaatcctataagtactcccccaagacccctccaaggtgggctgaggatcagaacagcctattgaaaatgatctgtcagcaggtcgaagcaatcaagaaggagatgcaggagcttaagctcaatagcagcaacagtgcatcgccacacagatggccgactgagaattacggtcccgacagcgtccctgatgggtatcaaggttcccagacgtttcacggagctccactgacagtggccactaccgggcccagcgtatattattctcagagccccgcctacaactcacagtacctcctgcgacctgctgccaacgtaactcccactaaggggcctgtgtacggcatgaaccggttacccccgcagcagcatatttatgcttacccacaacagatgcacaccccaccagtgcaatcctctagcgcatgcatgttcagccaagagatgtacggaccacctgctctgaggtttgaatcacccgccaccgggattttaagtccccggggtgatgattacttcaactataacgtccaacagacaagtactaacccccctctacccgaaccggggtactttactaaaccccctattgccgcgcatgctagccggagtgcggagtctaaaactattgaatttggtaagacaaactttgttcagccaatgccgggggagggacttcgcccaagtctgccaacacaggctcacaccacacagcccacccctttcaaattcaacagtaacttcaaatctaatgacggcgattttactttctcctcccctcaggtggtgacacagccacccccagccgcctactcaaactctgaaagccttctgggactgctgacgtctgacaaacctctccagggtgacggctattctggcgcgaagcccatacccggagggcagactatcggcccccgcaacactttcaactttgggtcgaagaacgtatcaggaatctcgtttactgagaacatgggttcttctcagcagaaaaacagtgggtttagacgttctgacgacatgtttacctttcatggcccgggtaagagcgtcttcggaacccctactctagagacggccaacaagaatcacgaaacggacggagggtcagctcacggagacgacgatgacgacggaccacactttgagcccgtggtgcccctccctgataagattgaggtcaaaacaggtgaagaagacgaagaggagttcttctgtaacagggcaaaactcttcaggtttgatgttgaaagcaaagaatggaaggaaagaggcatcgggaacgtaaaaatcctacggcacaagaccagcgggaaaattcgtctgctgatgagacgagaacaggttcttaaaatctgtgctaaccattatatcagcccagacatgaaattaaccccaaacgccgggagtgatcgttccttcgtttggcacgccctcgattacgccgacgagttgcctaagcccgagcagcttgccatcaggttcaaaaccccggaggaggctgcgctgtttaagtgtaaattcgaggaagcacagtctattctgaaggcacccgggaccaacgtcgccatggcgtccaatcaagccgtccgcatagtaaaggagcccacgtcccacgacaataaagatatttgcaagtcggacgctgggaatctgaactttgaattccaggtggcaaagaaggagggttcctggtggcactgtaattcatgtagtttaaagaacgcaagtactgcaaaaaaatgtgtgtcctgtcagaacttgaatcctagcaacaaagagctcgttggaccgccgcttgctgagactgtctttacccccaaaaccagcccagagaacgtgcaagaccgcttcgcactggtcacaccgaaaaaggaggggcattgggactgttccatttgccttgtccggaatgaaccaacagtctccagatgcatcgcatgccagaacacaaagtccgctaataagtccggcagctctttcgtgcaccaggcgagtttcaaatttggacaaggcgatttgccgaagccaataaattcagatttcagatcagtattctctacaaaagagggacagtgggattgcagtgcctgtttggtgcaaaacgaaggatcaagcacaaaatgcgccgcatgtcagaacccgagaaagcagtccctaccagctacctccatacctaccccggcttccttcaaattcgggacttccgaaacaagtaagacccttaaaagtgggttcgaggacatgtttgctaagaaggaaggtcagtgggattgttcgagttgtctggtgcgcaacgaggccaatgcaactcggtgtgttgcctgtcagaatccggacaaaccaagtccatccacgtctgtgccagccccagcctcattcaagttcggaactagcgaaacctccaaggctcccaaaagcggctttgaggggatgttcactaagaaggaaggacagtgggactgctcagtgtgcctcgttcgtaatgaggcttcggccaccaagtgtatcgcatgccagaaccccggaaaacagaaccagacaacttccgcagtctctacacccgcctcttccgaaacttcaaaggcacccaagtctggtttcgagggtatgttcacaaaaaaggaaggtcagtgggactgctcggtgtgtctcgtgagaaacgaggcctctgccaccaagtgcatagcgtgtcaaaatcccggcaagcagaatcagactacctctgctgtctctactcctgcctcatctgaaaccagcaaagcgccaaaatccggcttcgaaggtatgttcactaaaaaggagggacaatgggattgctcagtctgcctagttcgaaatgaagcttctgcaactaaatgcatcgcatgccagtgccccagtaagcaaaatcaaactaccgcaatttctacccctgcatctagcgagatctcaaaggcccccaaatcggggttcgaggggatgtttattcggaaagggcagtgggattgttccgtttgttgtgttcagaatgaatcatccagtctcaaatgtgtcgcgtgcgacgcttctaaaccaacacacaagcctatcgctgaggccccgagcgcattcacactaggatccgagatgaaattgcatgatagctcaggcagccaagtcggaacaggattcaagtctaacttctccgaaaaagcctcgaaattcggtaatacggagcagggttttaagttcggccacgtcgaccaggagaattccccttccttcatgttccaaggttcctccaatactgaattcaaaagcacgaaggagggtttttccattcctgtgagcgccgatggatttaaatttgggatttcagagccaggaaatcaagagaagaagagtgagaaacccttggagaacggcacaggctttcaggcgcaggatatcagtggccagaaaaacggccgcggggtaatattcgggcagacctccagcacttttaccttcgctgatcttgccaaatcgacgtcaggtgaggggttccagttcgggaagaaagatccaaatttcaagggtttcagtggggccggcgagaaactcttcagtagccagtacggcaagatggctaataaagcaaatacgtccggggacttcgagaaggacgatgacgcatacaaaactgaagattccgatgacatccatttcgagccagtcgtgcagatgccagagaaagttgagcttgtgactggagaggaggatgagaaggtgctgtattctcagcgggtcaagctgttccgcttcgacgcagaggtatctcaatggaaagagcgcgggctaggaaatctaaagattttgaagaatgaggtcaatggaaaattaaggatgttaatgcgaagagagcaggttctaaaggtctgtgctaatcactggattaccacgactatgaacttgaaacccttgtccggcagcgacagagcctggatgtggctggccagtgacttctcagatggcgacgccaaactggagcaattggcagccaaattcaagacccccgagctcgccgaggaattcaagcagaagttcgaagagtgccaacgtctcctcctagatattccgctgcagacgccgcataagctagttgacactgggagggccgcaaagttaatccagagggccgaggaaatgaagagtggccttaaagacttcaagacatttttgacaaacgaccagaccaaagtaactgaggaggaaaataagggatccggcactggggcggccggagcctctgacactacaataaagccgaatcccgagaatactggccccactctagaatgggataactacgatctgcgagaagatgccctagatgacagcgtttcctcctcatcagtgcatgccagtcccctcgcttccagccctgtccggaagaacctgttccggttcggagagtccacgaccggctttaatttctctttcaaaagtgccctgtctccaagtaaatcccccgccaagttgaaccagagtggcacaagcgtcggcactgacgaagagagcgacgtaactcaggaggaagagcgagatggtcagtattttgagccagtcgtccccctacctgacctggtggaggttagctctggagaggaaaacgagcaggtcgtgtttagtcatagggccaaactgtacagatacgacaaagacgtcggacagtggaaagaacggggtatcggcgacattaagatcctgcagaactatgacaacaagcaggtcaggatagttatgaggagggatcaagtgttgaaactgtgcgcgaaccaccggatcacacctgatatgaccctgcaaaatatgaagggaacagagcgagtttggctctggaccgcctgtgacttcgccgatggagaacggaaggtcgagcatcttgccgtacgcttcaaactgcaggatgtagctgattcctttaagaagatcttcgatgaggcgaagaccgcgcaagagaaggatagtctcatcacacctcatgtgagccgatcttcgactccccgggagtcgccatgcggaaagattgccgtagcggtcctagaggagacaacccgggagcgtaccgacgttattcaaggcgacgacgtcgccgacgccaccagtgaggtggaggtgagttccacatcagagaccaccccaaaagcagtggtttctccacctaagttcgtgttcggtagcgagtctgtgaaatccatctttagctctgagaagtctaagccttttgcctttggaaatagctctgctacgggttcactgttcggcttctcttttaacgcgcccttgaagtcaaataactcggagacttccagcgtagcccagagcggtagtgaaagcaaagtggagcccaagaagtgcgagttgtctaaaaatagtgatatcgaacagtcaagcgactctaaagtgaaaaacctattcgcatcttttcccacagaggagtcatcaatcaattataccttcaaaacccccgaaaaggccaaagaaaagaaaaagcccgaagattcgcccagcgatgacgacgttctgatcgtgtacgaactcacacctacagccgaacagaaagctctcgccaccaagctgaagttgccccctaccttcttctgctacaaaaaccggcccgactacgtctccgaggaagaggaggatgatgaggactttgaaacagccgtgaaaaagcttaatgggaagctctatctggacgggtcagagaaatgcagaccactggaggaaaatactgcggacaacgagaaagaatgtatcatcgtttgggagaagaaacctacagtcgaggaaaaagcgaaagccgatacactgaagctaccccccacgtttttttgtggcgtgtgctccgacacggacgaggacaacggcaacggggaagatttccagagcgagctgcagaaggtgcaggaagctcagaagagtcaaactgaagaaattactagtaccaccgactctgtttatacaggtgggaccgaggtgatggtgccctccttttgcaaatcggaagagccagactccatcactaaatccatctcaagcccgtctgtctcatccgagaccatggacaaacctgtcgacttatctactcgaaaggagattgacaccgatagtacttcacagggggagagcaagattgttagcttcggctttggaagttctaccgggctatcctttgccgatctggcttcgtcaaatagcggggatttcgccttcgggtcaaaggataagaattttcagtgggctaacacaggagccgccgtttttggcactcagtcagtcgggacacagtccgctgggaaagtgggtgaggatgaagacggatccgacgaagaagtcgtgcacaacgaagacatccactttgaaccgattgtatccctgcctgaggtcgaggtcaaatccggcgaagaagatgaagaaatcctcttcaaggagcgggccaagctttataggtgggatcgcgacgtttctcaatggaaagaacggggtgtgggagacatcaagattctttggcacactatgaaaaattactaccggatcctgatgcgtcgcgaccaagtgttcaaagtctgtgcaaaccacgtgatcactaagaccatggagctgaaacctctgaacgtctctaataacgcccttgtgtggacagcctcagactatgcagacggggaggccaaggtggagcagctcgctgtgcggttcaagactaaagaggtggcggactgtttcaaaaagaccttcgaggaatgccagcagaacttgatgaagttgcaaaaaggtcatgtgtctcttgcagctgaactgagcaaggagacaaacccggtggtttttttcgatgtttgtgctgatggagagcctctgggacgcataaccatggagctgttcagtaacattgtgccacgaaccgcagagaatttccgggctctatgtacaggagaaaaaggtttcggttttaaaaattccatctttcaccgcgtcattccagactttgtttgccagggtggtgatatcacaaagcacgacgggaccggaggccaatcgatctacggagacaaattcgaggacgagaattttgacgtcaagcatacgggacctgggcttctatctatggctaaccaggggcagaacacaaataatagccagtttgtcattaccctgaaaaaggccgaacatctggacttcaagcacgtcgtgtttggattcgtgaaggacgggatggatacagtcaaaaagatcgaaagtttcgggagtccaaagggttcggtgtgtagaaggatcactatcactgaatgcggacagatctag

SEQ ID NO: 131685 - DNA, 1500 bp, synthetic construct
  misc_feature 1..1500: note = Description of Artificial Sequence: Synthetic coding sequence
  source 1..1500: mol_type = other DNA
atggccgatctagccaatgaggagaaacctgcaatcgctccacccgttttcgttttccagaaagataaggggcaaaagcggagcgcgggcggatcctcaccagagggaggagaggatagcgaccgtgaggacggcaactattgtccacccgtgaaacgcgaacggacctcatccctaacgcagttcccacccagccaatcagaagagagatcgagcggattcagactgaaaccacccactctgattcacggacaagctccctccgccggattaccctctcagaagcctaaggaacagcagcgcagcgtgctgcggcctgcagtccttcaggctccccagccaaaagctctgagtcaaacagtccccagctcgggcaccaatggggtgagcctgccagccgattgcactggtgccgtgccggccgcgtctcccgataccgcagcttggcgaagcccttcagaggctgctgatgaagtctgtgcactcgaagaaaaggaaccgcagaaaaatgaatcatccaacgccagcgaagaagaagcctgcgagaaaaaggacccggccactcagcaggcttttgtcttcggtcagaatctgagagatcgtgtgaagctgatcaatgaatccgtggatgaagccgatatggaaaatgcagggcaccctagcgccgacacgcctactgcaaccaattattttttacagtacatcagcagcagtctcgagaactctacaaatagcgccgatgcttcttcgaataagtttgtgttcgggcagaacatgtcagaaagagtgttgagccccccaaagctgaatgaggtctcaagcgacgctaaccgggagaacgccgccgccgaatctggctcggaaagctcctctcaggaagccaccccagagaaggaaagcctggccgaatccgcagccgcttacaccaaggcaactgcgagaaaatgtctgcttgaaaaggtcgaagtcattacaggtgaggaagcggagtccaatgtcctgcaaatgcagtgcaagctcttcgtgttcgataaaacttcacagtcttgggtagagagggggcggggccttctgaggctgaacgatatggcttctactgatgacggcacacttcagtctagattagtgatgagaactcaggggagcttaaggctaatattgaacacgaaactctgggcacagatgcaaattgataaagccagcgagaaatctattcgtattaccgctatggacactgaagatcaaggcgtgaaagttttcttgatttccgcaagctcaaaagatacaggacagttatatgccgccctgcaccaccggatactggctctaagatctagggtggaacaggaacaggaggctaagatgcccgcacctgagcctggtgcagccccttccaacgaggaggatgacagtgatgacgatgatgtcttagccccatctggtgcgactgccgcaggcgcaggtgacgaaggggatggccagacaacaggctctacctag

SEQ ID NO: 131686 - DNA, 1194 bp, synthetic construct
  misc_feature 1..1194: note = Description of Artificial Sequence: Synthetic coding sequence
  source 1..1194: mol_type = other DNA
gctgacgtcaccaaagcagagaaacctgctatagcccccccggtattcgtgttccagaaggacaaaggacagaaacgatcggctggcgggtcaagtcccgaaggcggtgaagattctgatcgggaggatgggaattactgccctccggtgaaacgcgagagaacttcctctctgacccagtttccaccttcacaatcggaggaaagatcgtccggctttcggctgaaacctccgacactgattcacggacaggctccctccgcaggtctgcctagtcagaagcccaaagaacaacagcgcagcgttcttcgcccagctgtgcttcaggccccacagcctaaagctctgagccagactgtgccttcctcaggaacgaacggagtgtcactgcccgccgactgtactggcgctgttccagctgctagtccagatacggctgcatggcgctctccctcggaagctgccgacgaggtgtgtgccttggaagagaaagagcctcaaaaaaacgaaagctccaatgcctctgaagaagaggcttgcgagaagaaggatcccgcaacacagcaagctttcgtatttggacaaaatctgagggaccgggtgaagcttatcaacgaaagcgtggacgaagcagatatggagaacgccggacacccttccgctgacacaccaaccgctaccaattactttctccagtatataagctcctcgcttgagaactctaccaatagcgccgacgccagctccaacaaatttgtatttggacaaaatatgtcagaaagagttttgtcccccccgaagcttaacgaagtgtccagcgacgcgaatagagaaaacgccgccgcagagtccggaagtgagtcctccagccaggaggccacacccgaaaaggaatccctcgccgagtcagctgcagcctataccaaggccactgcgagaaagtgccttttggagaaggtggaggttatcacaggtgaggaggcggaaagcaatgtcctgcagatgcagtgcaagctgttcgtgtttgacaagacatctcagtcttggtggctcttacggcatccacacccaagccaccccgccgtcggtccctgtctatgtggtgagcaacccgctctgtgtccctgtccaggcttgccaaactaccgtccaggcacccctgctcagctgggcggtttgttggtgagggtgtag

SEQ ID NO: 131687 - DNA, 1704 bp, synthetic construct
  misc_feature 1..1704: note = Description of Artificial Sequence: Synthetic coding sequence
  source 1..1704: mol_type = other DNA
atggccgacctggctaatgaagaaaagcccgcgatcgctcccccagttttcgttttccagaaggataagggtcagaagagcccagccgagcagaagaatttgtccgactcaggggaagaaccccggggagaggctgaagctccacaccacggcacaggccatcccgaatctgccggagagcatgcgctcgagcccccagctccagccggcgcatctgccagtacaccaccccctcctgccccagaggcacaactgcccccattcccaagggagcttgctggtcggagcgccgggggatcttctccagaaggcggggaagacagcgatcgggaggacggcaattactgtcccccagtgaagcgcgaaagaacttcgtccctcacacagttcccgccttcacagagcgaggaaagatcctccggatttaggttgaagccccctacacttattcacggacaggccccaagcgcaggcttgccgagccaaaaaccaaaggagcagcagcgctccgtcttgagaccagccgtgcttcaggctcctcagccgaaggccctgtcacagacggtgccttcatctggtacaaatggtgtatctttaccagccgattgtaccggtgctgtccccgccgcctcgcccgacacagcagcatggcgctcgccctccgaggccgccgatgaagtctgcgccttggaggagaaagagccacaaaaaaacgagtcttctaacgcttccgaagaagaggcatgtgaaaagaaggatcccgccactcaacaggcctttgtcttcggacaaaatctgagggatcgcgtcaagctgatcaacgaatccgtagatgaagcagatatggagaatgccggacacccgagtgcagacacccccaccgctactaactattttcttcagtacatttcgtcaagcctggaaaacagcacaaactccgctgatgcatcttcaaacaagtttgtgttcgggcagaacatgagcgaacgagtgctttcccccccaaagctgaacgaggtctcctccgacgctaatcgcgagaatgccgctgcagagtctggaagcgaatccagttcacaggaagccacgcctgagaaagaaagtcttgccgaatctgcagcagcgtatacaaaggcgacagcacgaaagtgtttgctggagaaagtggaggtgataacaggggaagaggctgagagcaatgtgctgcagatgcagtgtaaattgttcgtgttcgacaagacttcgcagtcttgggtggaacgcggacggggcctgctgagactgaatgacatggcttccacggacgacggtacactacagagccggttagtgatgcgcacccaggggagtctgcggctcattttgaatacaaagctgtgggcacaaatgcagattgacaaggccagcgaaaaatcgatccggatcactgccatggacaccgaggatcagggggtcaaagtgtttctcatcagtgcgtcatctaaggacaccggtcaactgtacgctgccctacatcatcggatcctggctctgcgcagcagggtggaacaggagcaggaagcgaagatgccagcccctgagccaggggccgcacccagcaacgaggaggatgattctgatgacgacgacgtcctcgcgccaagtggcgccactgcagccggggccggcgacgaaggcgacggccagacaacaggaagcacatag

SEQ ID NO: 131688 - DNA, 1689 bp, synthetic construct
  misc_feature 1..1689: note = Description of Artificial Sequence: Synthetic coding sequence
  source 1..1689: mol_type = other DNA
atggcagatcttgcgaacgaagagaaaccagcaattgccccacctgtctttgtttttcagaaggacaaaggacagaaatctcctgcggagcagaaaaatctcagtgactctggagaggaaccccgaggcgaagcagaagcgcctcatcacggcactggacaccccgaaagcgcaggcgagcacgccctggagccaccagcccctgccggagcctccgcatctaccccccccccacccgctcccgaagcccagcttcccccctttccccgagagttggctggacgttccgcgggggggtcatcacccgaaggtggagaagatagcgacagggaagacggaaactactgcccccctgtgaaaagagagagaacatcctcactgacccagtttccccccagtcagtccgaggagaggtcgtccggattccgactgaaaccgcctacacttatccacggtcaggcaccttcagcaggcctgcccagccagaagcccaaggagcagcagcggtcagtgcttcggccagccgtattacaggcccctcagccgaaggccctctcacagactgttccgtcctccggcacgaacggggtgagtttgcctgccgactgcacaggggcagtacctgccgcaagtccagacacggccgcatggcggtccccttccgaggcagccgacgaggagaaagagcctcagaaaaacgagagttccaacgcctctgaggaagaagcttgcgaaaagaaggacccagccacccagcaagcatttgtgttcgggcaaaatttgcgggaccgagtgaagctaatcaatgaatctgttgatgaggccgatatggaaaacgctggccaccctagcgccgatacacccacggctactaactatttcctgcagtacattagtagcagtttagagaactctaccaattccgccgacgcttcatcaaataaatttgtttttgggcaaaacatgagcgaaagggtgttgtctccaccgaagctgaatgaggtaagttctgatgccaatagggaaaacgctgctgctgagtctggtagcgagtcttcctcacaggaagctacacccgagaaagagtccctggcagagtccgctgctgcctacacaaaagctaccgcccggaaatgtctacttgaaaaggtggaggtgatcactggtgaggaggcggaatcgaacgtcctacagatgcaatgcaagcttttcgtcttcgacaagacctcccagagctgggtggaaagagggaggggcttgctgaggctcaatgacatggcatctactgacgacggaacgctccaatccaggcttgttatgcgaactcagggatctctgcgccttatcttgaataccaagctgtgggcccagatgcaaatagataaagcttccgagaaatccatccgcataacagcaatggataccgaagatcagggcgtaaaagtgtttttgatatctgctagctcaaaagacactgggcagctatacgctgccttgcaccacagaattctcgcccttcgatctagagtggagcaggagcaggaagccaaaatgccagcgccagagcccggcgctgccccatcgaacgaagaggacgactcggatgacgacgatgtccttgccccatccggcgcaaccgctgccggggccggcgacgagggcgatggccaaactacgggcagcacatag

SEQ ID NO: 131689 - DNA, 1320 bp, synthetic construct
  misc_feature 1..1320: note = Description of Artificial Sequence: Synthetic coding sequence
  source 1..1320: mol_type = other DNA
atggccgacctggccaatgaggaggaacggagcagtgggtttaggctgaagcccccaacccttatacatggtcaagccccctctgctggactgccgagccagaagccgaaggagcagcagaggtccgtccttaggcctgccgttctgcaggcaccccagccaaaagccctgtcacaaactgtgcctagcagcggcacaaacggggtgagcctgccagctgactgtaccggtgcggtgccagcagcgtccccggacaccgcagcttggcgctccccgagcgaagctgctgatgaagtgtgtgcccttgaggagaaagaaccacagaaaaatgagtccagcaatgcgtctgaagaggaagcatgcgaaaaaaaggatccagccacccagcaggcttttgttttcgggcagaacctgagggatcgggtgaagctcatcaacgagagcgtggatgaagctgacatggagaacgctggtcaccctagcgcagatactccgactgccacaaattattttctgcaatacatttcatcgagcctggagaacagcaccaactcagccgatgccagcagcaataaatttgttttcggccagaatatgtccgaacgtgtactaagtccacccaagctaaatgaagtcagttccgacgcaaatcgtgagaacgcggctgctgagagcggctcagagagcagctcacaggaggctactccggagaaggagagcttagccgagagtgccgccgcctacaccaaggcaaccgctaggaagtgcttgctggagaaggtcgaggtgattaccggagaggaagcagagagcaacgtgttgcagatgcagtgtaagctgtttgtctttgacaagacgtctcagtcttgggtggaacgaggacgcggattgctcagactgaatgacatggcaagcactgatgatggaacgttacagagtcgcctggtcatgaggacacagggcagcctgaggctgatcctcaacacgaagctatgggcgcagatgcagatcgacaaagcgtctgaaaaatcaatcagaatcacggccatggatactgaggaccaaggcgtcaaagttttcctgatctctgccagcagcaaggatacaggccaattgtatgcagccctgcaccacaggattttagctttacggtcaagggttgagcaggaacaagaagcaaaaatgccagcaccggagcctggagccgcccctagcaacgaagaagacgatagcgacgacgatgacgtcctggccccatctggagccactgcggcgggagcgggcgatgagggggatggccaaaccactggatccacttag

SEQ ID NO: 131690 - DNA, 2190 bp, synthetic construct
  misc_feature 1..2190: note = Description of Artificial Sequence: Synthetic coding sequence
  source 1..2190: mol_type = other DNA
atgtcaggacagcctcccccaccccccccccagcagcagcagcagcagcagcaactgtccccgccaccgccggcagccctagcaccggtgtcaggcgttgtgttgccagctcctcccgccgtgtcagccggaagcagcccagcgggttctccagggggcggagctgggggagaaggactgggcgccgccgctgctgctttgctgctgcatcctccccctcccccaccaccagcaaccgctgctccacctcccccgccacctcctccacccccacctgcatcggcggccgctccagccagtggccctccagccccaccgggtcttgctgcaggccctgggcccgccggcggagctcctactccagccttggtggcaggaagttccgctgcagccccatttcctcatggggatagcgcgctgaacgaacaggaaaaagagctgcaaagacgcctcaaaaggctgtacccagcagttgacgaacaggaaacacccctcccgcggtcttggtcaccaaaagacaaattttcttatatcggcttgagccagaataatctcagggttcattataagggtcatggaaaaacaccaaaagatgctgctagcgtgcgcgcgacccaccccattcccgctgcatgtggcatctattatttcgaggtgaaaatagtctctaaaggccgcgatggctatatggggatcgggctgtccgcacaaggggtcaacatgaaccgcctccctggctgggataagcattcctacggctatcacggagatgatgggcattctttttgctcatccggaaccgggcaaccttacgggcccacatttacaaccggagacgtgatcggctgttgtgtgaacctcatcaataatacctgcttctacaccaaaaacggtcatagcctcggcatcgcatttactgatctgcctccaaacttgtaccccactgttggtctgcaaaccccgggagaggtcgttgacgccaacttcggccaacaccctttcgtgttcgacatcgaagattatatgcgggaatggcgaaccaagatccaagcccagatcgaccgctttcccatcggcgatcgggagggggaatggcaaactatgatccagaagatggtgagtagctacctcgtacatcacgggtactgcgcaaccgccgaagccttcgccagatcaacggatcagacggtcctggaagagctggcctcaatcaagaaccgacagcggattcagaaactggtcttggccggcagaatgggcgaggctatcgaaacaacgcaacagctctacccatctctcctcgagcggaatcccaacctgttgtttacacttaaggtcaggcagtttattgagatggtgaacgggaccgactctgaagtgcgatgcctgggcggaaggtctcccaaatcacaggattcttacccagtctccccgagacctttcagttctcctagcatgagcccttcacacggtatgaacatccataatttagcctctgggaagggtagtacagcacacttcagtggttttgaatcctgttctaatggagtcataagtaacaaggcccaccagagttattgccactcgaataaacaccagtccagtaatcttaatgtgcccgaacttaattcaatcaacatgagcaggagtcaacaggttaataatttcacctctaacgatgtggacatggagacggatcactattccaatggtgtaggagagacttccagcaatggttttctcaatggatcttcgaagcacgatcacgaaatggaggattgtgatacagaaatggaggtagattcttcgcagctaagacgccaactgtgcggaggaagccaggcggctatcgaacggatgattcatttcggaagagagctacaggcaatgagcgaacagctgcgccgagattgtggcaaaaatacagcaaacaaaaaaatgctcaaggacgcgttctctctcctggcctactccgacccctggaattcacccgtcggaaaccagctcgacccaatacagagagagccggtgtgctcagccctgaatagcgctatactggaaacccataaccttcctaaacagccaccactcgcactggccatggggcaggccacgcagtgtctgggcttgatggcaaggtctggaatcggcagctgtgcgtttgccaccgttgaagactacctccattag

SEQ ID NO: 131691 - DNA, 1176 bp, synthetic construct
  misc_feature 1..1176: note = Description of Artificial Sequence: Synthetic coding sequence
  source 1..1176: mol_type = other DNA
atgtcagggcaaccgccacctcctcctccccagcagcagcagcaacagcagcagctgagcccacccccgcctgcagcactggccccggtgtccggagttgtgctccctgcgccccctgccgtgtccgccggctcttcgccggccggaagcccgggcggaggagcagggggagagggactgggcgcagccgcggcggcactgcttttgcacccacccccgcccccaccgccggcaactgctgcaccacctccacctccacctccaccccccccacccgcttccgcggccgctcccgcatctgggccaccggcgccccccgggctcgccgccggccctggtcccgctggaggcgccccaactccagctctggtggctggcagctccgccgctgctcccttcccgcacggggattccgccctgaacgagcaagagaaagagttacagaggcgtctcaagcgactttatcccgcagtggacgaacaggaaaccccactgcctcggtcttggagccctaaggacaaattcagttacattggtctctcacagaacaacttgagggtgcactacaagggccacggaaagacccctaaggacgccgcttcagtccgtgctactcaccctatacctgctgcctgcggaatctactatttcgaagttaagatagttagtaaaggtcgggacggctacatggggattggactcagtgctcagggcgtgaatatgaatcggttgcctggttgggacaaacattcttatggatatcacggagacgatggacatagtttttgctcctccggcactggtcagccttacggccctactttcaccaccggggacgtgattggatgttgtgtgaacctgatcaataatacttgtttctacaccaaaaatggccacagtttagggattgcctttaccgacttacccccactcgattaccctgtgtcaccccgcccgtttagctcaccatctatgtctccatcacatggcatgaacattcacaatctcgcatccggtaaaggatcgacagctcattttagtgggtttgaaagttgtagtaacggggtgatatctaataaggctcaccagagctattgtcattcaaacaagcaccaatccagcaatgagtgtacacggaccaagcagtacaaatatgttaaaatcaccgcctcttag

SEQ ID NO: 131692 - DNA, 1503 bp, synthetic construct
  misc_feature 1..1503: note = Description of Artificial Sequence: Synthetic coding sequence
  source 1..1503: mol_type = other DNA
atgggcattggattatccgcccaaggggtgaatatgaacaggctgcccggctgggacaagcattcttatggctatcatggggacgatggccatagtttctgctcatcaggcacaggccaaccttacggccccactttcaccacaggagatgtaatcggatgctgcgtgaatctgataaataacacctgcttctataccaagaacgggcactccttggggatagccttcacagatttgcccccaaatttataccctacagtcggtctgcagacaccaggggaagttgtggacgcaaatttcggacagcacccctttgttttcgatatagaagactatatgcgtgagtggaggacgaaaatccaagcacagattgacaggttcccaataggcgacagagagggggaatggcagactatgattcagaagatggtgtcaagttatctggttcaccatggatattgcgcgaccgccgaagcatttgcaagatccacggaccaaaccgtgctggaagagctcgcctctattaaaaaccgacaaaggatacagaagttggtgttggccggtcgcatgggagaagcgattgagacaacgcagcagctgtacccttcactgttagagcgcaaccccaacctgctgttcactctcaaagtaagacagttcattgaaatggtgaatggtactgactcagaagtgagatgtctcggtggtagatcaccgaaatcacaggactcctatcctgtctcacctaggccattcagcagccctagtatgtcccctagtcacgggatgaacatacataacctggcctccgggaaaggctcaacagcccacttctctggttttgagtcatgttctaatggagtcatatctaataaggcacatcaatcatactgccacagtaataagcaccagtcttcaaaccttaacgtgccagaactgaactctattaacatgagcaggtcccaacaggtgaacaacttcaccagcaacgacgtcgacatggagactgatcactactccaacggggtgggagagacctctagcaacggattccttaacggaagcagcaagcacgaccacgagatggaagactgtgatacggaaatggaagtagacagctcacaattacgaaggcaactctgtgggggtagtcaggccgccattgaacgcatgatccacttcggacgggagttgcaggctatgtcagaacaactgaggcgggactgtgggaagaataccgccaataagaagatgttaaaggacgctttttccttgctcgcgtatagtgacccctggaattcgcccgtcgggaatcaactggatcctatacaaagagagcccgtttgctcggccctgaacagcgccatcctcgagacgcacaacctccctaaacagcctccacttgcgctagctatgggccaagctacccaatgcttgggattgatggctcgcagcgggatcggatcatgtgcattcgcgactgtagaggattaccttcactag

SEQ ID NO: 131693 - DNA, 387 bp, synthetic construct
  misc_feature 1..387: note = Description of Artificial Sequence: Synthetic coding sequence
  source 1..387: mol_type = other DNA
atgttcgacgtaacttcccgggtgacttacaaaaacgttcccaactggcatagagatttagtccgagtatgcgagaacattcctatagttctgtgcggtaataaagtggatataaaggaccgaaaagtgaaagctaaatcaatagtattccataggaagaagaacttacagtactatgatatctctgccaagagcaattacaacttcgaaaagcctttcctttggttagcgaggaagctgattggggatcccaaccttgagttcgttgccatgcccgctttagcaccccccgaagtagtcatggacccggctcttgccgctcagtacgaacacgaccttgaggttgctcagactaccgccttgccggatgaggacgacgacttgtag

SEQ ID NO: 131694 - DNA, 702 bp, synthetic construct
  misc_feature 1..702: note = Description of Artificial Sequence: Synthetic coding sequence
  source 1..702: mol_type = other DNA
atggccgctcagggggagcctcaggtacagtttaaactagtcttggtaggggacggtggaaccggtaagacaaccttcgtaaagagacaccttactggggagttcgagaaaaagtacgtggctaccttaggcgtcgaagtgcaccctctagtcttccacacaaataggggcccaattaaatttaatgtgtgggatacagctggccaggagaagtttggcgggctacgggacggttactacatccaggagatgggtattcatcatgtagcccatgctgggttggagctgatgagcagtgctcaatgtgcgattattatgttcgacgttactagtcgcgtgacatacaagaatgtcccaaactggcacagggatctcgttcgcgtctgtgaaaacatccccatcgtgctatgtgggaataaggtggatataaaagatagaaaggtgaaagcaaaatccattgtgttccaccgcaagaagaatctccagtattatgatatttcagccaagtcaaactataactttgaaaaacctttcctgtggctggctcgcaaactcatcggggaccccaatctcgagttcgtcgcaatgcccgcccttgctcccccggaggtggtaatggatcccgccctggccgcacaatatgagcatgacctggaagtcgctcagaccaccgctctgcccgacgaggacgatgatctttag

SEQ ID NO: 131695 - DNA, 651 bp, synthetic construct
  misc_feature 1..651: note = Description of Artificial Sequence: Synthetic coding sequence
  source 1..651: mol_type = other DNA
atggccgcccagggggagccgcaggttcaatttaagctcgttctggttggcgatggcggtacgggcaagacgacctttgtaaagcgccacttgacgggagagtttgaaaagaagtatgtggctacacttggggtggaggtgcatcccctcgtgtttcataccaacaggggcccaattaaatttaacgtttgggacacggccggacaggagaagttcggaggccttagggatggatactacattcaggcccaatgcgccatcatcatgttcgatgtgacgagtcgagtaacttataagaacgtgccgaactggcacagagacctcgtgcgtgtatgcgaaaacatccctatcgtgctgtgtggcaataaggtggacatcaaagaccgcaaagtgaaggccaaaagtatagtcttccacagaaagaagaacctgcagtattacgatatttccgccaaaagcaactacaacttcgagaagccatttctttggctggcccgaaagttgataggcgaccccaacttggagtttgtggcgatgccggctttagcacccccggaggtcgtgatggacccagccttagccgcgcagtacgaacacgatctcgaggtggcacagactacagctctccctgacgaggacgacgacctctag

SEQ ID NO: 131696 - DNA, 705 bp, synthetic construct
  misc_feature 1..705: note = Description of Artificial Sequence: Synthetic coding sequence
  source 1..705: mol_type = other DNA
cggagacgtagactgcgcctcaggcgcctgaattgtgcctcagccatcttcccggcctctgtggggcgcgcccggaggagattttggaagctggtacttgtgggcgacggcggaacagggaagaccacgtttgttaagagacacttgacaggggagtttgagaagaaatacgttgccacactgggagtggaagttcaccccctcgtgtttcacaccaatcgcggccctatcaagttcaatgtttgggacacagctggccaggaaaaattcggcgggctgcgcgatggttactatattcaggcacaatgtgcaatcataatgttcgacgtgacctccagggtgacttataagaacgtccccaattggcaccgcgatttggtcagggtgtgtgaaaatatccctatcgttttatgcggcaataaggtagacatcaaagatcgaaaagtgaaagcaaagtctatcgtgttccaccgaaagaaaaaccttcagtactacgacatctcagctaaaagcaattacaattttgagaaaccctttctgtggctggctaggaagttaatcggagacccgaacctagagtttgttgccatgcccgccctcgctccaccagaagtggtcatggatccagctttggcagcacagtacgaacacgatctcgaagtcgcccaaacaactgccctgcccgatgaggatgacgacttgtag

SEQ ID NO: 131697 - DNA, 387 bp, synthetic construct
  misc_feature 1..387: note = Description of Artificial Sequence: Synthetic coding sequence
  source 1..387: mol_type = other DNA
atgtttgacgtgacgagtagagttacttacaagaatgttccaaattggcacagggatttagtgcgagtttgcgagaacattccaattgttctttgtggcaataaggtggatatcaaggacaggaaagtaaaagctaaaagcatcgtttttcaccggaaaaagaatctacagtactatgacattagtgccaagagcaactataactttgaaaaacccttcctgtggctcgcccggaagctgataggcgaccccaatctcgagtttgtcgccatgccagccttagcccctccagaggttgttatggatcccgcgttggcggctcagtacgaacacgaccttgaggtcgcccaaaccaccgccctgccagacgaggacgacgacctatag

SEQ ID NO: 131698 - DNA, 651 bp, synthetic construct
  misc_feature 1..651: note = Description of Artificial Sequence: Synthetic coding sequence
  source 1..651: mol_type = other DNA
atggcagctcagggagagccgcaagtgcaattcaaactggtactcgttggggacggaggaacaggaaaaaccacattcgttaagaggcacctcaccggcgagttcgagaagaaatacgtggccaccctgggagtggaagtgcatcccctcgtgtttcatactaatagagggcctatcaagtttaatgtgtgggacaccgcagggcaggagaagttcggaggtctgcgcgacggttactacatccaagctcaatgcgccattataatgtttgacgtgacaagccgcgtgacctacaagaatgtgcctaactggcaccgagacctcgtcagggtgtgcgagaacattccgattgtcctctgcggcaacaaggttgatattaaggaccggaaagtgaaggctaaatcaatagtttttcaccgcaagaaaaatctgcagtactatgacatcagcgcgaagtccaattacaactttgaaaaaccgtttctatggctggcccgaaaacttattggcgaccccaacttggaatttgtcgccatgccagcattggcacccccggaagtggtcatggatcccgcactcgccgcccagtacgagcacgatctcgaagtggcccagactacggctcttcccgacgaagacgacgatctgtag

SEQ ID NO: 131699 - DNA, 5271 bp, synthetic construct
  misc_feature 1..5271: note = Description of Artificial Sequence: Synthetic coding sequence
  source 1..5271: mol_type = other DNA
atgcggcgatccaaggcctacggcgaacgatacttggctagcgttcagggctccgctcccagtcctggcaagaagctgcgggggttctacttcgccaaactgtactacgaggccaaagaatatgacctggccaagaagtatgtctgtacatatttatctgtccaggagagggacccaagggctcatcgcttcctcggtcttctgtacgaactcgaggaaaacaccgagaaagccgtcgaatgctaccgtaggtctctggaattgaatccacctcagaaggatctcgtgttgaaaatcgctgagctgctttgcaagaacgatgtgaccgatggcagagccaaatactgggttgagcgcgccgccaagttgttccccggctcaccagcgatttacaagttaaaggaacaccttttggattgcgagggtgaggacggatggaataagctcttcgactggatacagtccgaactatatgtccgcccagacgatgttcacatgaatatccgcctagtggagctatatcggtcaaacaaaagactgaaagacgctgttgcgaggtgtcatgaggctgagagaaatatcgccctccgctcatctctggaatggaactcctgcgttgtacaaacactcaaggagtatttagaatcactgcaatgtttggaatcggataaaagtgactggcgggccaccaacaccgatctgctactcgcttacgctaacctgatgttgctcactctgagtacccgcgacgtccaggaaagcagagaactgctggaatcttttgattctgcgcttcagagtgcaaagagcagcctgggtgggaatgacgaattaagcgccacctttctggaaatgaaaggacacttttatatgcatgcaggcagcctgctgcttaaaatgggccaacacgggaacaatgttcaatggcaggcactgagcgagctggccgcactctgctacgtgatcgccttccaggtcccaaggccaaaaattaagctcattaagggcgaagctggtcagaacctgctggagatgatggcctgcgaccggctctctcagtccgggcacatgctcttaaatcttagccggggtaaacaggacttcctgaaggaggtcgtggagacttttgcgaacaaatctggccagagcgtcctttataacgccctgttcagctcacagagctcgaaggatacctccttcttgggttcagacgatatcggaaatatagatgtgcaggagcccgagctggaggatctggcacggtacgacgtaggggccattcaggcccataacggtagtttgcagcacctaacatggttgggcttgcagtggaactctctgccggccctcccaggcattcggaagtggttgaagcagttgttccaccatctgcctcaagaaacttcaagattggagaccaatgcccctgagtctatctgtatcctcgatctcgaggtatttttgctgggggtggtttacacatctcacctccaactcaaggagaaatgtaacagtcatcattcttcctaccagcctctgtgcctgcccttacctgtctgcaaaagattatgcaccgagcggcagaaatcatggtgggatgcagtttgtacactcattcatagaaaggccgtgcctggaaacagcgcggaactacgattggtggtccagcatgagatcaataccctcagagcccaagagaaacacgggctgcagccagcactccttgtgcactgggccaagtgtttgcagaaaatgggacgaggcttgaactcctcctatgaccagcaggagtatatcggtcgcagcgtgcattattggaagaaggtgctacccctgctcaagataatcaagaaaaactcaatccccgagcccatcgaccccctgttcaagcactttcatagcgtggatatacaggcaagcgagatcgttgaatacgaggaggacgctcatattacattcgctatccttgatgcagtacacggaaatatcgaagacgctgtaactgcatttgagtcgattaaatcagtcgtgtcgtactggaacctagccctgatctttcaccggaaggctgaagacattgaaaatgacgccgtatttcccgaggagcaggaagaatgcaaaaactatctgcgcaagacccgcgactacctaataaagattatcgacgactctgatagcaacctctcagtagtgaagaaattgcctgtccccctagaatctgtgaaagagatgctcaagtcagtaatgcaagagctggaggattactccgaaggcgggccgctgtacaagaacggatctctgaggaacgccgactctgagatcaagcatagtacccccagtcccacaaaatattccctcagtccgtcaaagagttacaagtatagcccaaaaacacctcccagatgggctgaggaccagaacagcctgaggaagatgatttgtcaggaggtaaaagcgataacaaagttgaatagctctaagtctgcttcccgacaccgatggccaacagaaaactacggaccggattcggtgcctgatggctaccaaggttctcaaactttccacggcgcccccctcactgtggcaaccaccgggcctagtgtgtactattcacagagccctgcttacaatagtcagtaccttttgcgccccgctgccaacgtcaccccaaccaaagggagctctaacacggagtttaagtccacgaaggaagggttttccatagctgtatcagccgatgggtttaagttcggcatctccgaacctgggaaccaggagaagaaaagcgagaaaccgctggagaatgacacaggattccaggcccaggacatcagtgggcagaagaatgggagaggcgtaatttttggccagacatccagtacctttacattcgcggacgtagccaaatcaacgagcggcgaaggatttcaatttgggaaaaaggatcccaatttcaaaggcttttccggcgccggcgagaagctgttcagctcacagtgtggtaaaatggccaacaaggccaatacttccggcgacttcgaaaaagatgatgacgcatgcaaaaccgaggactctgacgacattcattttgagcctgtggtccaaatgcccgaaaaagtcgaactagttacaggtgaagagggggaaaaggtgctttattctcagggtgttaagctgttcagattcgacgccgagatctctcaatggaaggagcgtggtctgggaaatttaaagattctaaaaaatgaggtcaatggcaagcccagaatgctaatgcgcagggaccaagtgctgaaagtgtgtgctaaccactggatcacaactacgatgaatctgaagccactgtcagggtccgatcgcgcttggatgtggcttgctagtgacttcagtgacggtgacgccaagcttgaacgcctggccgctcagttcaaaactcctgagctcgccgaggaattcaaacagaaattcgaagaatgtcaaagactactgcttgacatccccctgcaaaccccacacaaactggtagataccgggcgtgctgcgaaactcatacagcgggccgaggagatgaagtccggcctgaaggatttcaagaccttcctcacaaatgatcagactaaggtgacggaggaggagaataaaggctcaggtactggagctgcaggagcttcagacaccactattaagcctaaccccgagaataccggtccaactctggaatgggacaactacgacctgcgggaggatgctctagatgataacgtatcttcctcttcagtgcacgactcccccttggcatcctcgccagtacgcaaaaacatcttcaggttcgacgagagcactacaggatttaactttagctttaaaagcgctctcagcctgtctaaaagtcctgctaagttgaaccaatcaggcacctccgttgggacagatgaagagagtgacgtgacccaggaggaggagcgggatgggcagtacttcgagccagtcgttcctctcccagacctggtggaagtaagctctggcgaggagaatgagcaggttgtcttctcccatcgcgcggagctgtatcgatatgacaaagacgtcggccagtggaaggagcggggtataggggatatcaaaatccttcagaattacgacaataaacaagtccgaatcgtgatgagacgtgatcaggtgctcaaactgtgcgccaatcaccgcatcaccccagacatgtctctccaaaatatgaaaggaacagaaagagtgtgggtctggaccgcctgcgacttcgccgatggggaaagaaaggttgaacacttagcagttagatttaagctacaggatgtcgccgattcattcaagaaaattttcgacgaggcgaaaacagctcaagaaaaagattccttgatcactccgcatgtgagtagaagctctaccccacgcgaaagcccatgtggaaagattgcagtggctgtgctggaggagactactcgcgagcgcaccgatgtgattcagggggacgatgtggccgatgctgcttccgaggttgaggtaagttctacctccgagaccacaaccaaggcagtggtgtctccacccaaattcgtctttggctctgaatccgtcaagagaatttttagctccgaaaagtctaatccatttgcgttcgggaatagtagcgctacgggctcccttttcggcttttccttcaacgctcccctgaaatcgaatgattcagaaaccagcagcgtagcacagagcggctcagagtcaaaagtcgagccaaagaagtgcgagctcagcaagaattccgacatagaacagtctagcgacagtaaggtgaagaatctgagtgccagctttcccatggaggaatcatccatcaattacacattcaagaccccagaaaaggaaccccctctttggcacgccgaatttacgaaggaggagctagtgcagaagttatccagtacaacaaaatcagcggaccaactcaatggcctgctaagagaaactgaagccacctcagccgtgttgatggaacaaattaagctgctaaaaagtgaaattcgtcgattggaacgtaatcaggaggagagcgcagccaacgtggagcacctaaagaatgtactcctgcagttcatctttctgaaaccaggctctgagagggaatcactgctgccggtgatcaacactatgctgcaactcagtccagaggagaagggcaaacttgcggccgtcgcccagggactccaggaaaccagcatcccaaagaagaagtag

SEQ ID NO: 131700 - DNA, 5247 bp, synthetic construct
  misc_feature 1..5247: note = Description of Artificial Sequence: Synthetic coding sequence
  source 1..5247: mol_type = other DNA
atgaacgtcatgggttttaataccgatagactggcttggaccaggaataagctacgaggattttatttcgctaaactctactacgaggccaaggagtatgaccttgccaagaagtacgtctgcacatacttgtcggtccaggagcgcgaccctcgggcacataggttccttggcctcctctatgaactggaggagaataccgagaaggccgtcgagtgttacagaagatcgctggagctgaacccgccccagaaagacctggtcctgaagatcgcagaactgctgtgcaagaacgatgtgactgatggaagggccaagtattgggtggaacgggctgccaagctgttcccgggtagccccgcaatttacaagcttaaggagcacctgctcgattgtgagggtgaggatggctggaacaagctctttgactggatccagagtgaactatacgtcagacccgacgatgtacacatgaacatcaggctggtggagctgtacaggtcaaataagcgactgaaggacgcggtggcacggtgccacgaggccgaacggaacattgcactccgctcctcactggagtggaacagctgcgtggtgcagaccttaaaggagtacttagagtctttgcagtgtttggagagtgacaagagcgattggcgcgccactaacaccgatcttctccttgcgtacgcaaatctgatgctactgacactgtctacgagagacgtccaggaaagtagagaactgctggaaagcttcgactcagctctacagagcgccaaatctagccttggaggcaacgacgagctgtccgcaacttttttggaaatgaaaggtcatttctacatgcatgccggctccctcctgctgaaaatgggtcaacatggcaataatgtgcaatggcaggccttgagcgagttggcagccctgtgttatgtcatcgcttttcaagtccccagaccaaaaattaagttaatcaagggagaagctggccagaatttactggagatgatggcatgtgatcggctgagtcaatccggacacatgctgttgaacctgtcccgaggcaaacaggattttctcaaggaggttgttgagacgtttgctaacaaaagcggacaaagcgtcctttacaatgccctgttcagctcacagagttctaaagacacaagtttcctggggagcgacgatataggtaacatcgatgtccaggagccagagctggaagatctcgcccgttacgacgtcggggccatccaggctcataacgggtctctgcagcacctcacctggcttggcctgcagtggaattctctgccagctttgcctggtatcaggaagtggttaaaacagctcttccaccatctacctcaggagacttcaaggcttgagaccaacgcccctgagtctatttgtattctcgacctcgaggttttcctcctgggcgtggtttatacttctcatctgcagcttaaggagaaatgcaacagtcatcactcttcctatcaaccactgtgtcttcctctgcccgtttgtaagcgcctgtgcactgagagacagaaatcatggtgggatgctgtctgcactctcattcatcgcaaagcagtgccagggaactcagcagaactgcggcttgttgtgcagcatgagattaataccctcagagcccaggagaaacatgggcttcagcctgccctcttagtgcattgggccaagtgtcttcaaaaaatgggccgaggcctgaatagctcatatgaccagcaagaatacataggccggtccgtgcactactggaagaaggtcttgcccctgctgaagattataaaaaaaaattctattccagaaccaatagatccgctgtttaagcacttccacagcgttgacatccaggcatccgaaattgtggagtacgaggaggatgcacatattacatttgcaatcctggacgccgtgcacggcaatattgaggatgcagtaactgcattcgaatccatcaagtcagttgtgtcgtactggaacctggctctcatcttccacaggaaggccgaggacattgagaatgacgccgtttttccagaggagcaggaagagtgcaagaattacctgaggaaaacacgggactacttgatcaagatcattgacgactccgactccaatctgagcgttgtgaagaagcttcctgtacctcttgagtccgtgaaagaaatgttgaagtccgtaatgcaggagttagaggactactcagaaggaggtccgctgtacaaaaatggctctctccgcaacgcagactccgagatcaaacactccacaccttcacctactaagtatagcctgtctccatccaaatcttacaagtactcccctaagaccccccctcgttgggctgaggatcagaattctttgagaaagatgatttgtcaagaggtgaaagcaattacgaagctgaattcaagcaagtcagcctccaggcaccggtggcctactgaaaattacggacccgactctgttccagatggatatcaggggtctcaaacttttcacggtgccccactgactgtggctactactggaccttccgtttactattctcagtccccggcttataattctcaatacctcctacgcccagccgccaacgtgaccccgaccaaaggtagctccaacaccgaattcaaatcaaccaaagaagggttctcaatcgcagtgtcagccgatggtttcaagttcggtatctctgaaccgggaaaccaggagaaaaagtctgagaaacccctcgagaacgataccgggtttcaggcccaggacattagtggacagaagaatgggagaggcgtcatcttcggccaaacctcaagtacttttacttttgccgacgtggctaagtccactagtggggaaggatttcaatttgggaagaaggaccctaattttaaggggttctcaggggcaggggagaaactctttagctcacagtgtggaaaaatggccaataaggccaacacctcaggggatttcgaaaaggacgacgatgcatgcaagacagaagatagcgacgatattcactttgagccagtcgtacagatgccggaaaaagtcgaattagtcaccggggaggagggggagaaagtgttatattcacagggtgttaaactcttccgctttgatgcagagatctctcagtggaaggaaaggggacttggaaacctgaagattctaaaaaatgaagtgaacggtaaaccccgtatgctcatgagacgtgaccaggttctgaaggtctgcgctaaccattggatcacaaccactatgaatctgaagcccttgagcggcagcgatagggcatggatgtggctcgcatcagacttctcggacggggatgccaaattagagcgcctggccgcccagtttaagactccagaattggccgaagagttcaagcagaagttcgaggaatgccaaaggctgctattagacatcccgctgcaaacacctcataagcttgtggatactgggcgggcagctaagctcattcaaagagctgaagaaatgaaaagtggtctcaaggacttcaagacctttctgaccaacgatcagacgaaggttacagaggaggagaataaggggtctggaaccggcgctgccggtgcctctgacacaactatcaaacctaatccggaaaacactggtcccaccctggaatgggataactatgatctccgcgaggacgccctcgatgataatgtttctagctcgtccgtgcacgactcacctctcgcatccagccccgtgcgcaagaacatattcagattcgatgagagcaccacggggttcaacttctccttcaaatcggcactctcactctcgaaatcccctgctaagctgaaccagagtgggactagcgtgggcaccgatgaggaatcagatgtgacgcaagaggaggagcgagacggtcagtactttgaaccagtggtaccacttccggatttggtagaggtttccagcggagaagagaatgagcaagtggtctttagccaccgcgccgagctctatcgatacgataaggacgtcggccagtggaaggaacgtggcattggcgatataaagattttgcaaaattacgacaacaaacaagtgaggattgttatgaggcgcgatcaggtcctgaaactgtgtgctaaccacaggataactcccgatatgtccctccaaaacatgaaaggtacagagagggtgtgggtgtggactgcatgcgatttcgcagatggagagaggaaggttgaacacttggcagtgcggttcaaactgcaggacgtggcggactctttcaagaagatatttgacgaggccaaaaccgcacaggagaaggattcactgatcacccctcatgtatcccgttcaagcaccccccgtgaatctccgtgcggcaaaatagctgtggcagtcctcgaggagactactcgcgagcggaccgacgtgattcagggcgacgacgtggcggatgctgcctcagaagtggaggtcagcagcacaagcgagaccactacaaaggccgtcgtatcccctcctaaatttgtcttcggatctgagtccgtgaaacgtatcttttcatctgagaagagcaatccgtttgcctttggcaactcatccgcaaccggaagcctgttcggattttcgttcaatgcacccctgaaatccaacgactccgaaacctcttcagttgctcagtcagggtccgagtcaaaggtggagccgaagaagtgtgaactgtcaaaaaattctgatatagaacagagcagtgattcaaaggtgaaaaatctttccgcttctttccctatggaagaaagctctatcaactataccttcaaaacccccgagaaggagcctcctttatggcacgccgagtttacgaaggaggagttggtgcagaaactctccagcactacaaagagtgcagaccagctgaacggactactgcgggagactgaggcaacaagtgccgtgctcatggagcagattaaactgctcaaaagcgaaataagacgcctcgaaaggaaccaggaagaaagcgctgccaatgtggagcatctgaagaatgtcttgctgcagtttatctttctgaagcctggaagcgaaagggagtctcttttgcctgtgatcaatactatgctgcaattaagtccagaggagaagggaaagttggctgcagtggcacaaggcctacaggaaacctcaatcccaaagaagaagtag

SEQ ID NO: 131701 - DNA, 1935 bp, synthetic construct
  misc_feature 1..1935: note = Description of Artificial Sequence: Synthetic coding sequence
  source 1..1935: mol_type = other DNA
atgctgatgagaagagatcaagtactcaaagtgtgtgccaaccactggatcactacgacaatgaacctgaaacccctttccgggagtgatcgggcctggatgtggctggcttcagatttcagcgacggagatgcgaaacttgagcggctcgcagcccagttcaagaccccggaacttgcagaggagttcaagcaaaaattcgaagagtgccagcgccttctgctggatatccctttgcaaacacctcataagctggtggacacgggtcgggccgctaagcttattcagcgggccgaagaaatgaagtccggtctgaaggatttcaagacctttttgacaaacgatcagacgaaggtgacagaagaggagaacaagggctccggtaccggggccgccggggcatctgacacaacgattaagcccaatcctgagaatactggtccgaccttagagtgggacaattatgatttgagagaggacgcccttgacgacaacgtgtccagttcgtctgtccacgacagccccttagcttcaagcccggtccggaagaacatattccgatttgacgagagcacaacgggcttcaattttagcttcaaaagcgcactgtcccttagcaagagccccgcgaaactcaaccaaagtggaacaagcgtggggactgatgaggaatctgatgtcacacaggaggaggagagggatgggcaatacttcgagcctgttgtgccattgccagatctggtggaagtcagcagcggagaggagaacgaacaggtggtgttctcccatcgcgccgaactttatcggtatgataaagacgtcggtcagtggaaggagcgcgggattggggatatcaagatcctccagaactatgataacaagcaggtgcggatcgtaatgcggcgggaccaggtcctcaaactgtgtgctaatcacagaattacccccgatatgagcctgcaaaatatgaagggcaccgagcgggtgtgggtatggactgcctgtgattttgccgatggggagagaaaggtcgagcacctcgccgtgcggtttaaactacaggatgtagcagactcttttaagaagatttttgatgaagcgaaaaccgctcaggaaaaggactcactcattacaccccatgtttcacggagctctacccccagagagtccccttgtggaaaaattgctgttgctgtgctcgaggaaaccacaagagaaaggacagacgtgattcagggcgacgacgtagctgacgccgcttccgaggttgaggtttcatcgaccagtgagacgacaacaaaagccgtggtgtccccacccaagttcgtatttggatcagagtctgtgaagaggatttttagcagcgaaaaatcgaaccccttcgcttttggtaactcaagtgcaactggcagtctgttcggattctctttcaatgctccattgaagtcaaacgactcagagacaagctctgtggcccagtccgggtctgaatctaaggtggaaccgaaaaaatgcgagttgtccaaaaactcagacatagagcagtcatccgattccaaagttaaaaatctctccgcaagctttccgatggaggaatcctccattaactatactttcaaaacaccagaaaaagaaccccctctgtggcatgccgaatttacgaaggaagaactagtgcagaaactctcctctactacaaagtctgccgaccagctgaacggccttctaagggaaaccgaggccacatcagcagtgctgatggagcagatcaagctcctgaaatcagagatacggcggttggaacggaatcaagaggagtccgcagccaatgttgagcaccttaaaaatgtactcctgcaatttatttttctcaagccagggagtgaaagggaacctagctcgtgctacaaatatgatgtcgccgcccagccatag

SEQ ID NO: 131702 - DNA, 5247 bp, synthetic construct
  misc_feature 1..5247: note = Description of Artificial Sequence: Synthetic coding sequence
  source 1..5247: mol_type = other DNA
atgaatgtgatgggctttaacaccgacagactcgcctggacacgaaataagttgaggggcttttactttgcgaaactttattatgaagcaaaagagtatgacctggccaagaaatatgtgtgcacttatctttccgtccaggagagggacccccgcgcccaccggttccttggactcttatacgaattggaggagaatactgagaaggccgtggaatgttacaggagaagtctggaattaaatcccccgcaaaaggacttggtgctgaagattgcagaattactgtgtaagaatgatgtgaccgatggaagagccaagtactgggtggagagagcggcgaagctgttccccggctcccccgcgatttataagctgaaggagcatctcctggattgcgagggggaggatggatggaacaaacttttcgattggatacagagcgagttgtacgtgaggcccgacgatgtgcacatgaacattaggcttgtggagctctaccgatcaaataaaaggctgaaagatgcagtcgcaagatgccatgaggctgagcgcaacatcgccctgcgatcttctcttgaatggaactcttgtgtggtgcagactctgaaggagtacctcgagagcctgcagtgcctcgaatccgacaaaagcgattggcgcgccacgaacacagatctgcttttggcatacgccaatttgatgctgctgacacttagtacccgagacgtgcaggaatcacgcgagcttcttgaaagcttcgactccgcgctgcagagcgctaaatcctcgctgggaggtaatgatgagctgtccgccacttttctcgaaatgaagggacatttctatatgcatgctggtagcctcctccttaaaatgggtcaacatgggaataatgtgcagtggcaagccctttcggagttagctgccctgtgctacgtgatcgcctttcaagtgcccagacccaaaattaagctgattaagggagaagcaggacagaaccttctggaaatgatggcctgtgaccggctttcacagtcgggacatatgctactcaatttaagccgcggcaagcaggacttcctaaaggaggtcgtggaaacttttgcaaacaaatccggtcagagcgtgctttataacgcattattctcttctcaatcctctaaagacacttcattcctggggtcagatgatatcggtaacatcgacgtccaagaacccgagttggaggatctcgctcggtacgacgttggcgcaatccaggcacacaatggaagcctgcaacatctgacgtggcttggtttgcagtggaacagtctgccggctctcccaggcattcggaagtggctgaaacagctttttcatcacctaccccaggagacaagcagactggagacgaacgcccccgagtctatatgcatcctggatctggaagttttcttgcttggcgtggtttacacctctcatctacagctgaaagaaaagtgcaacagccaccactcttcttaccagccactgtgcctacccctgccagtgtgtaaacggttgtgtacagagcgacagaagtcctggtgggacgccgtgtgtacactgattcaccggaaagctgtccctggcaattccgccgaactacgcctagtcgtgcagcacgaaatcaacaccctgagagcgcaggagaagcacggactccagcctgctctgctggtgcattgggccaaatgtctgcaaaaaatgggtcggggcttgaactcatcttatgatcagcaagaatacattggaaggtcggtgcactactggaaaaaagtgctgccgttacttaagattataaaaaaaaattcgattccagaacctatagaccccctgttcaaacatttccattctgtggacattcaggcttctgaaatcgtcgaatatgaggaagatgctcatattacctttgcaattttggatgccgtgcacggtaatattgaagacgcagtaaccgcatttgaaagtatcaaatccgtcgtctcttattggaacctggctctgattttccacaggaaggctgaggacatcgagaacgacgccgtgtttcctgaggaacaggaggaatgcaaaaactacctacgcaaaacccgggactacctcattaaaattatcgacgattcggacagcaacctgtctgtggtaaagaaactcccagtccctttggaaagcgtgaaggagatgctgaagagtgtgatgcaggagctagaggactattcagaagggggtccgctatataagaatggctcattgagaaacgctgactcagaaatcaaacattccacaccttctccaaccaagtattcattgagcccctccaaaagctataaatactccccaaagacccctccaagatgggccgaggaccaaaattccttgcgtaagatgatatgccaggaagtgaaagcaatcaccaaactgaacagttcaaaatcagcatccagacatcggtggcccaccgagaactacggccccgattcggtccctgacggctatcagggcagccagaccttccacggagctccactcaccgtggcgacaacgggtcctagcgtgtattactcacaatccccggcctacaactcccaatacctcctgcgtcccgccgcaaacgtcactccaaccaaggggtcttcaaacaccgagttcaagtctacaaaggagggttttagcatagcagtgtctgctgacggtttcaaattcggaatcagtgagccgggaaatcaggagaagaagagtgaaaaaccacttgagaacgacacaggctttcaggcgcaagacatcagcggccaaaaaaatggccgcggggttatttttgggcaaacctcaagtactttcacattcgcggatgtggccaagtccacttctggggaggggttccaattcggaaaaaaggaccccaactttaaggggttttccggcgccggggaaaagctctttagctcccagtgcggtaaaatggccaataaggcaaatacatcgggagacttcgagaaggatgacgatgcatgtaagaccgaggactctgatgacatccatttcgagccggttgtgcagatgcccgagaaagtggaactggtgaccggcgaagaaggcgagaaggtcttgtactctcagggtgtgaaactgtttagatttgacgcagagatcagtcagtggaaggaacggggcctcgggaacctgaaaattctgaagaatgaggttaacggcaaaccacgcatgttaatgagacgggatcaagtattaaaggtctgcgcgaaccactggattaccactacaatgaatctcaagccactgtccgggagtgatcgggcttggatgtggttggctagcgacttctcagacggtgacgccaagcttgaacgcctcgccgcacaatttaaaacaccagaattagcggaggagttcaagcagaaattcgaggagtgccagagactgctactggacatccccctgcagacccctcacaagttggtggatactggtcgtgcagcgaagttaattcaacgcgccgaggagatgaagagcggcctaaaggatttcaagaccttccttaccaacgaccagacaaaagtgaccgaagaagagaacaaaggcagtgggaccggtgcagctggcgcttcagacaccaccatcaagccaaaccccgagaacactgggccaaccctggagtgggataactacgacctgagggaggatgcgctggatgacaacgtgagcagcagctctgtgcacgactcacctctggccagtagccccgtcaggaaaaatatttttcggttcgacgaatcaactactggctttaattttagttttaagtctgcactgtctcttagtaagagccctgcaaaactgaaccagtcaggtacctctgtcggcaccgacgaagagagtgatgtcacacaggaagaggagcgggacggtcagtacttcgaacctgtagtccccctgccggatttagtcgaggtttcgagtggggaagaaaacgagcaggtggtgttttcacatcgggcagagctataccggtacgacaaagatgtcggccagtggaaagagcgcggcatcggtgatattaaaattctgcaaaattatgataacaagcaagtgaggattgtgatgaggcgcgaccaagtgctgaaactgtgtgccaaccataggatcactccagacatgtcactccaaaatatgaagggtactgagcgcgtgtgggtttggacagcctgtgatttcgccgacggtgagcgtaaggttgaacacctggctgtccgcttcaaacttcaggatgtcgccgacagcttcaagaaaattttcgacgaggccaagactgcacaagagaaggactccttgatcacacctcacgtcagtagaagcagcactcctagggaaagtccttgcggcaagattgccgttgccgtcttggaggagaccactagggagcgaacggacgtgatccagggggatgacgttgcagatgccgcatccgaggttgaggtcagtagcacctccgagaccacaacaaaagctgtcgtgagcccgcctaaatttgtgtttggttccgagtcagtcaagcgaatcttctcatcagagaagtctaatccctttgcatttggtaattcttccgcaactgggagtctcttcgggttctctttcaacgccccacttaagtcaaacgattctgagacatcctccgtcgcacagtctggctccgagtccaaagtcgagccaaagaagtgcgaactgagcaaaaacagtgacattgagcagtcctctgattccaaggtaaagaacttgtctgcatcttttccgatggaagaaagctctatcaattataccttcaaaacaccagagaaagagcctcccttgtggcacgctgaatttaccaaggaggagcttgttcaaaaactgtccagcactacaaagagcgccgaccaactgaatggtttgctcagagagactgaagctacttctgcggtcctcatggagcaaatcaaactcctgaaaagtgaaattaggaggctggagaggaatcaagaggaaagcgcagccaacgtggaacaccttaagaacgtcctcctgcagttcatttttttgaagccgggctcagaacgggagagcctgttaccagtcattaatactatgctccagctgtctcctgaggaaaagggaaagcttgctgcagtggcgcagggccttcaggagactagtatccccaagaagaagtag

SEQ ID NO: 131703 - DNA, 3042 bp, synthetic construct
  misc_feature 1..3042: note = Description of Artificial Sequence: Synthetic coding sequence
  source 1..3042: mol_type = other DNA
atgctgaagtcggttatgcaagagctggaggactacagtgaggggggacctctgtacaagaatggatcccttagaaacgccgattccgagatcaagcattcgaccccatccccgaccaagtactcactatcaccatccaaatcttacaaatattctcccaagaccccccccaggtgggctgaagatcagaactcattgcggaagatgatttgtcaggaggtgaaggccattaccaagttgaacagcagcaagtcagcatcccgccacaggtggccaacagagaactatggccccgatagtgtgcccgatggctatcagggaagccagacatttcatggagctcctctcaccgtagcaaccactgggccctccgtttactactctcagtcccccgcttacaatagtcagtacctgttaagacctgcagcaaacgtgacccccaccaaggggtccagtaataccgagtttaaatcaacgaaagaggggttttccatcgcagtttctgctgacggcttcaagtttggcatatccgagccaggaaaccaggagaagaaaagcgaaaagcccctggaaaacgacaccgggtttcaggctcaagatatatccgggcagaagaatgggaggggagtgattttcggacagaccagttccacttttacattcgctgacgttgccaaatccacctctggcgagggcttccaatttggaaagaaagaccccaattttaaaggcttctctggagcgggcgagaagttattttcatctcagtgtggtaagatggcaaacaaagccaacacctctggagactttgagaaagatgatgacgcctgcaaaactgaggactcagacgacatacattttgagcccgtggtgcagatgccggaaaaggtggaactggtcaccggggaagaaggcgagaaggtgctctactcgcagggggttaagctctttcggtttgacgctgaaatctcccaatggaaagaacgcggtctgggtaacctcaaaattctgaaaaatgaggtgaatggcaaaccgcgtatgctcatgagacgcgaccaggtgttaaaggtgtgtgcaaaccattggatcactaccacaatgaatttaaagcccctgagtgggagcgatagggcctggatgtggctcgccagcgacttctctgatggcgacgctaaacttgaacgtctggccgcccagttcaagacaccagaacttgcagaggagttcaagcagaagtttgaagagtgccagcgactcttgctggacatcccccttcaaactccacacaagttggtggatacaggcagggccgcgaagctcatacagcgcgccgaggaaatgaagtcaggactcaaggactttaagaccttcctgaccaatgatcaaactaaagtcaccgaagaggagaataaaggctctggaacaggcgctgcaggcgccagtgacaccacgattaaaccgaacccggagaatacgggaccaacactagaatgggacaattatgacctacgcgaggacgctcttgatgacaacgtgagcagctcatccgtgcatgacagtcctctggcttccagtcctgttagaaaaaatatctttcgttttgatgagagcaccacgggctttaatttctctttcaagagcgcactatcattatcaaaaagcccggcgaaattgaaccagtcaggcacctctgtggggaccgatgaggagtcagatgtgacacaagaggaagaacgcgacggtcaatactttgaacccgtggtgcccctcccagacctagtcgaggtttcgtccggagaggagaatgagcaggtcgtattttcacatatggccgagctctacaggtatgataaggatgtcgggcagtggaaagaacgcggcatcggagatattaaaatactgcagaactacgataacaaacaggttaggattgtgatgcgtcgcgaccaagtcctaaagctgtgtgctaaccatcgcatcaccccagacatgtcacttcaaaatatgaaaggtacagagcgagtgtgggtgtggactgcttgtgactttgccgatggcgagagaaaggttgaacatctggcagtgaggtttaagctccaagatgtagcagatagtttcaaaaaaattttcgatgaggctaaaaccgcacaggaaaaggactcactgatcacaccccatgtgagccggtctagtactccacgtgaatccccctgcggaaaaatagccgtggccgtgctggaagaaactaccagagaacgtacggacgtcatccaaggggacgatgttgctgacgctgccagtgaggtggaggtgtcctccacctctgagactaccactaaagcagttgtgtccccgcctaagttcgtgtttgggtcagagtctgtcaagcggattttctcctccgagaagagcaatcccttcgcattcggtaattcctccgcgaccggcagcctgttcggcttcagtttcaatgcccccttgaaatcaaatgattctgagacctcttctgtagcccagagcggttccgagagcaaggtggaacctaagaagtgtgagttgagcaagaattccgatatagagcaatcatcggattctaaggtgaagaatttatctgcgtcttttccaatggaggagtcttctattaactacacctttaagactccagagaaagagccccccctgtggcacgccgagttcactaaagaggagctagtacaaaaattgagctctaccaccaaaagcgcagaccagctcaatggcctattgcgtgagacagaagcaacctctgccgtgctaatggagcaaataaagctgctgaagtcagagattcgaagactggagcgaaaccaggaggaaagcgccgctaacgtagagcacttgaaaaacgtcctcttacagttcatctttctaaagcctggtagtgagcgtgaatccttattacccgtgataaacacgatgttacaattaagccctgaggaaaaaggcaagctggctgctgtggcccaggggctgcaggaaacatcgatccccaagaagaaatag

SEQ ID NO: 131704 - DNA, 5271 bp, synthetic construct
  misc_feature 1..5271: note = Description of Artificial Sequence: Synthetic coding sequence
  source 1..5271: mol_type = other DNA
atgcgtcgctcaaaagcctacggcgagcggtacctggcatcagtccaaggcagtgcaccaagcccggggaaaaagctgagaggcttctattttgccaaactgtattatgaggcgaaggagtacgacctcgctaagaagtacgtttgcacatacttgtcggtgcaggaacgcgacccccgcgctcaccgctttctgggactgctgtatgagctagaggaaaacacagagaaggctgtcgagtgttaccggcgatcattagaacttaacccgccccagaaagacctcgtcctgaaaattgccgaactgttgtgcaagaatgatgtcacagatggacgtgccaagtactgggtggagcgggcagctaagctgtttcctggatccccagccatttacaagttgaaggagcaccttctggattgcgaaggcgaggatggatggaataaactcttcgattggatacagtcagaactgtatgttcggcctgacgatgttcacatgaacataagactggtagagctttataggtccaacaagcgtctcaaggatgccgtggcaaggtgccatgaggctgagcgcaacatagctctgagaagcagtctcgaatggaattcttgcgtcgtccagacattaaaggagtacttagagagccttcagtgcctcgagtccgacaaaagcgattggcgcgctaccaacacagacctgttgctcgcctacgccaacctcatgcttcttaccctgtctactcgcgacgttcaggagagcagagagctcctggagtcattcgatagtgcactgcagagcgcaaagtcttcacttggagggaacgatgaactgtccgctaccttcctcgaaatgaagggccacttttatatgcatgcaggctctcttctgttaaagatgggacagcacggcaataacgtgcagtggcaggcactgtccgagctggccgcgctctgctatgtgattgcgtttcaggttccccgcccaaagataaagctgatcaaaggagaagcaggccaaaatttgttagagatgatggcttgcgaccggttaagccagagcgggcacatgttactgaacctgagtaggggaaaacaggacttccttaaagaagtggtcgagaccttcgcaaacaagagcggccagtcagttctgtacaatgcattgttttccagccaatccagtaaggacactagttttctggggagcgacgacatcggaaatattgatgtgcaggaaccagaactagaagatctcgcccgttacgatgtaggagcaattcaggctcacaacgggtcactgcaacatctaacatggctcgggctccaatggaattcactgcccgcactgcctggcattcgcaaatggttaaaacagctcttccatcatctcccccaggagacctcccgcctagagacaaacgctcctgaatctatatgtatcttggatctcgaggtattccttctgggcgtggtctatacttcccatcttcagctgaaagagaaatgcaattcccaccattcaagctaccagccgctgtgcctgccattgcctgtgtgtaagcgtctttgcaccgagagacagaaaagctggtgggatgccgtttgcacactcattcacagaaaggcagtgcccggcaattcagctgagcttcggctggtggtacagcacgagatcaataccttacgtgcccaggaaaaacatggccttcagcctgctttactggtgcactgggctaaatgcctacaaaaaatgggaaggggccttaactcttcgtacgaccaacaggagtacatcggcagaagcgtccattactggaaaaaggtgctgccactgctcaaaatcattaagaagaattccatacccgaacctattgaccccctctttaagcactttcattcagtcgatatccaggcctctgagatagtcgagtatgaggaggatgctcatataacgttcgctatcctggatgcagtgcatggtaatattgaagatgccgtcaccgccttcgaatcgatcaagtccgttgtgagctactggaatctcgccctcatctttcatcgcaaagccgaagatatagagaacgacgccgtcttccccgaagagcaggaagagtgtaagaactatctccgtaagacccgggactatctgatcaaaattattgatgattccgactccaatttgagcgtggtcaaaaaactcccagtccctctggaatctgtgaaggagatgctcaaatcagtcatgcaagagttggaagattactctgaaggcggccctctgtataagaacggaagcctgcgtaacgcagactctgaaataaagcatagcacaccgagtcccacgaaatatagcctgagcccttctaaatcttacaagtacagtcccaagaccccccccagatgggctgaagatcagaactccctgcgaaaaatgatttgccaggaagtgaaggctatcaccaaactaaattcttcaaaaagcgccagcaggcatagatggccgacggagaactatggaccagattccgtccccgatggctaccaaggatcccagacattccacggtgcccctctgaccgttgctactacgggcccaagcgtgtactattctcagagccccgcatacaatagccagtacctcctgaggccagcagccaatgtcacacccaccaagggctccagcaataccgagtttaagagcaccaaggaaggcttcagcatcgccgtgtcggcggacgggttcaagttcggtatctccgagcctggtaaccaagaaaaaaaatcggagaagccgctggaaaacgatacgggctttcaggctcaagatatctccggacagaaaaacggtaggggcgtaatctttgggcagacaagctcaacgttcacctttgccgatgtcgccaaatcgacttccggagagggcttccagtttggcaagaaggatcctaactttaagggattttcaggcgccggagaaaagctgttctctagccaatgcggaaaaatggcaaataaagcaaacacctccggcgacttcgagaaggacgacgatgcatgcaaaaccgaggattcagacgatattcacttcgagccagtggtgcagatgccagagaaggttgaactggtgactggcgaagaaggggagaaagtgctgtacagccagggggtgaagttgtttagatttgacgctgagattagccaatggaaagaaagagggctcggcaacttgaaaatcctcaagaacgaagtgaacggcaaaccacgaatgctcatgagacgggaccaggttctcaaagtgtgcgctaatcattggataacgaccaccatgaacctcaaaccattgtccggatctgatagagcctggatgtggctggcatccgacttttcagacggcgatgccaaactcgaaagactagcagcccagtttaagaccccagagctggctgaggaattcaagcagaaatttgaggagtgtcagcgccttctgctcgatattcctctgcagacacctcataagctcgtggacaccggaagggccgcaaagctgatccagcgcgccgaggaaatgaaatccggactcaaagacttcaagacttttttgactaacgatcaaacaaaagtcactgaagaagaaaacaaagggagtggcaccggcgctgcaggcgcctcggatactacaatcaagcctaatcccgagaacactggaccaacccttgaatgggataactacgacctgcgggaagacgcactcgatgacaacgtttcttcctctagcgtgcatgatagtcccttggcctcatcccctgtccgcaagaatatttttagatttgacgaatccacaacaggatttaatttctcattcaaatccgcactctcgctgtcgaaatcaccagctaagttgaaccagagcggcacctccgtcggaaccgacgaggagagtgatgtgactcaggaagaggaacgagatgggcagtactttgaacctgtggttcccttaccagatctggtggaagtgtcctcaggggaagaaaatgaacaagtagtcttttcacatatggcagaactgtaccggtatgacaaggatgtgggacagtggaaggaaaggggcatcggcgacataaagatattgcaaaactatgacaacaagcaggtgaggatcgttatgcgcagagaccaggtgctaaaactttgcgccaatcacaggatcacaccggacatgagtctgcaaaacatgaagggtaccgagagggtatgggtgtggactgcctgcgacttcgctgatggcgaacgtaaggtggagcacctggcagtgcgattcaagcttcaggatgtggccgacagcttcaaaaagatctttgatgaggccaaaactgcccaggaaaaagactccctgattacacctcatgtgtctcggtcaagtacgccacgcgagtcaccatgtggaaaaattgccgttgcagtcttggaagaaactaccagagaaaggactgacgtaatccaaggggacgacgtagccgacgcagcgtcggaggtggaagtctcctcaactagtgagaccactacgaaagctgttgtttccccccccaaattcgtgttcggtagcgagtctgtgaaaagaattttttcctctgaaaaaagtaatccgtttgcgttcggaaattcaagtgccacaggatctctgttcggcttttcctttaatgcccctctaaaaagtaatgactccgagacctccagcgtggcacaatccggcagtgagagcaaggtcgagcccaagaagtgtgaactgagcaaaaacagcgacatagagcaaagctccgacagtaaggtgaaaaatctgagtgcctcgttccccatggaggaatcatccattaattataccttcaagactcccgaaaaggagcctcctctgtggcatgctgagtttacaaaggaagaactggttcagaaactgagcagtactaccaaaagcgctgaccaacttaacggactgctgcgagaaactgaggccacaagtgccgtgttaatggagcagataaagctactgaaatctgaaatacgccggctggagcggaatcaggaggaatctgctgccaacgtggaacatttgaaaaatgttctcctgcaattcatttttctcaagccggggtctgagcgggagtcccttttgccagttatcaatactatgctgcaactctctcccgaagaaaaaggcaaactggcggccgtggcacagggtctgcaagagacaagtatcccaaaaaaaaagtag

SEQ ID NO: 131705 - DNA, 5247 bp, synthetic construct
  misc_feature 1..5247: note = Description of Artificial Sequence: Synthetic coding sequence
  source 1..5247: mol_type = other DNA
atgaatgtgatgggatttaatacagaccgcctcgcatggacacgtaacaagctgaggggcttttattttgctaaactgtactacgaggccaaggagtacgacctcgccaaaaaatacgtttgcacatacctgtcagtgcaggagcgtgacccaagagcacatcgctttcttggactgctttacgaactggaagagaatactgaaaaggctgtggagtgctatcgacggagccttgagttgaaccctccccagaaagatcttgtcctgaagatcgctgagctcctgtgtaagaatgacgtcacagatgggcgggcaaaatactgggtggagagagccgcgaagcttttcccagggagtcctgctatttacaaacttaaggagcacctgctggattgtgagggggaggacggatggaacaaactctttgattggattcaatctgaactctatgtaagacccgatgacgtacacatgaacatcaggcttgtggaattatatagaagtaacaaaaggcttaaagatgccgtggctcgatgccatgaagccgaacgaaatatcgctctgaggagctccctcgaatggaacagctgcgtggtgcagacgctgaaggagtatctggaatcactacagtgcctggaaagcgacaagagtgattggcgggccaccaacacagatttgcttttggcgtatgccaatcttatgctcctgactctctccaccagagacgtccaagagtcccgggagttgctcgaaagcttcgactccgcgctgcaatctgccaaatcatctttgggcgggaatgacgagctctcagctactttcttggaaatgaaaggacatttttatatgcatgccgggtccctgttattgaagatgggccaacacggaaataacgtgcaatggcaggccctgtccgagttagctgctctttgctacgttatagctttccaagttccgagaccaaagattaaactgattaagggagaggcagggcaaaacctactggagatgatggcctgcgatcggcttagtcagtcaggacacatgttactcaatctttcacgcgggaagcaagatttccttaaagaggttgttgagacattcgccaacaaatccgggcagagtgtcctttacaatgcacttttcagttctcagtcatctaaggataccagcttcctggggtccgacgacatcggcaacattgacgtccaggagccagagttagaggaccttgcacgctatgacgtaggcgccatacaagcgcacaatggatccctgcagcacctgacctggctagggcttcagtggaactccctgcccgctcttccggggataagaaagtggttaaagcagcttttccatcacctgccacaggagacctctcggttggaaactaacgccccagagagtatttgtatcctggaccttgaggtatttctgctgggcgtggtgtacacctctcacctgcagttgaaagaaaagtgcaattcccatcattcctcctaccagccactgtgcctgcctctgcctgtgtgcaaaagactctgcacagaaagacagaagtcttggtgggacgccgtttgcacgctgatccacaggaaagcagtccccgggaactcagccgaactccggctggtcgtccagcatgagatcaatacgttgagagcccaggaaaaacacgggctgcagcccgctcttctcgtgcactgggccaagtgtttacaaaaaatgggtaggggccttaacagctcctatgatcagcaagagtatataggccgctctgttcactactggaaaaaagtgttgccactcttgaagatcataaagaagaactccatccccgagcctatcgaccctctgttcaaacacttccattctgtcgacattcaagcctccgaaatcgttgaatatgaagaggacgcacatattacatttgccatcctggatgctgtgcatggcaacattgaagatgccgtcactgcgtttgagagcatcaaaagtgtggtgagttactggaacttggcacttattttccacaggaaggctgaggacatcgagaatgacgctgtgttccccgaagagcaggaagagtgtaaaaattatctgcggaagacacgcgattatttgatcaagattatagacgacagcgattccaatctgagtgtcgttaagaagctgcccgtgcccctggaatccgttaaggaaatgctgaagtcagtcatgcaggaactggaagattatagtgaggggggcccactatataaaaacgggtcactgaggaatgctgactctgagatcaaacacagtactcccagcccgaccaagtacagcctgagcccatccaaaagttacaaatattctccaaaaacccctccgcgctgggcagaagaccagaatagtctccgaaagatgatctgtcaggaagtgaaggcaattaccaaactcaacagcagcaagagcgcatctcgacaccgatggcccaccgagaactacggcccagatagcgtccctgatggctaccaggggtcacagaccttccacggtgccccacttaccgtggccacaacgggcccaagcgtttactactcccagagccctgcatacaattctcaatatctcctgaggccagctgccaatgtgacacctaccaaaggtagctccaataccgaattcaagtcaactaaggaggggttctctattgcagtctcagccgacggctttaagttcggaataagcgagccgggcaatcaggagaagaagtctgagaaacccctcgaaaacgacaccggattccaggcccaggatatcagtggccagaaaaacggccggggtgtcattttcggccaaacctcgtccacatttacgtttgcagacgttgccaaaagcacttccggagagggttttcagttcggaaaaaaggaccccaactttaagggcttctcgggggccggggagaagctctttagcagccagtgtggcaagatggcaaacaaagctaatacaagcggcgacttcgaaaaggacgacgatgcttgtaagacggaagacagtgatgatatacatttcgaacccgtcgtccagatgcctgaaaaagttgaactggtaaccggcgaagaaggggaaaaagtgctgtacagccagggggtgaaactatttaggtttgacgctgagatttcacagtggaaggagcgcggccttggaaatttaaaaatcctgaaaaatgaagtgaacggtaagccccgtatgctcatgcgcagagatcaggtgctcaaggtatgcgctaatcactggatcaccactaccatgaacctgaagcctctaagcggatctgacagggcctggatgtggctggcttctgatttctccgacggcgacgccaagctggaacgccttgccgcgcagttcaaaaccccagaactggccgaggagtttaaacagaaattcgaagaatgccagcgccttctgctcgacattcctctccagacaccccacaaactcgtggataccggaagagcagcgaagctaattcagcgcgcagaagagatgaaatccgggctcaaggatttcaagacatttcttaccaacgaccagacaaaagtcactgaggaggagaataaagggtcaggcacaggcgccgccggagcttccgacacaactatcaaacccaaccctgagaacactggtcctaccctggagtgggacaattatgacctgagggaggacgccctagatgacaacgtaagttcgtctagcgtgcatgactccccacttgccagctcccccgtgcggaaaaacatttttaggttcgacgaaagcaccacaggcttcaacttctcattcaagtctgcactgagcctgtcaaagtcgcctgcaaagttgaaccagtctggcacaagtgtgggaacagacgaggagtctgacgtgacccaggaggaggagcgcgacggacaatattttgagccagtggtgccattacctgatctggtcgaagtgtcatcaggtgaggagaatgagcaggtggtgttcagccacatggccgagctttataggtacgataaagacgttggtcaatggaaagaaagaggcatcggcgatataaaaatattgcaaaactacgataataaacaagtgcgtatcgtgatgagacgggaccaggttctgaaactgtgcgcaaaccacagaatcactccagacatgtccttgcagaatatgaaagggaccgagcgggtgtgggtgtggacggcctgtgatttcgcagatggagaacgcaaagtggaacacctggctgtccgctttaaattgcaggatgtggcagactcttttaaaaaaatcttcgacgaagccaaaacggcccaggagaaagattccctcataacaccccacgtgagtcggtcctccacacccagggagagcccttgtggtaagatcgcggtggccgtccttgaagaaactacccgggagcggacagacgttatccagggcgacgatgtcgccgacgctgcctcggaagtcgaggtgtcaagtacttctgagactacaaccaaggccgtcgtgtcaccccctaaatttgtgtttgggtccgagtccgttaaacgtattttttcctccgaaaaatcaaacccttttgctttcgggaattcttcggccacgggctctctttttggcttctccttcaacgcacctctcaagtcaaatgattctgaaacctcttcagtggctcagagcggaagtgaatcgaaagtagaacccaaaaaatgtgagctgtccaagaacagcgatatcgagcagagctcggatagtaaggttaaaaatttgagcgccagctttcctatggaagagagtagtataaattatacattcaagacaccagagaaagagcctccactgtggcacgctgaattcactaaagaggagttagtacagaagctgagctcgacaacgaaatccgccgaccagctgaacggtctcctgcgagagactgaggctacgtctgctgttctcatggaacagatcaagctgcttaaaagtgagatccggagacttgagcgcaaccaggaagagagtgccgcgaatgtcgaacacctcaagaatgtcttattacagtttatctttttaaagccagggtccgagcgcgaatctttgctgcctgtcatcaacacaatgctgcagctgagccctgaggaaaagggcaaactcgctgcagtggcccaagggctgcaagaaactagtatccctaagaagaaatag

SEQ ID NO: 131706 - DNA, 1935 bp, synthetic construct
  misc_feature 1..1935: note = Description of Artificial Sequence: Synthetic coding sequence
  source 1..1935: mol_type = other DNA
atgctgatgagaagagaccaggtgctcaaggtctgcgctaaccattggattacgactacaatgaatctcaaacctttgagcggtagcgaccgcgcttggatgtggctcgcgtccgacttttcagacggcgatgccaagttagaaaggcttgcagcccagttcaaaactcccgaactcgcagaagagttcaagcaaaaattcgaggaatgtcagcgcctgttgctggacatcccgttgcaaactcctcataaattagtggatacagggagggcggccaagctcatccagagagcagaggagatgaagtctggcctcaaggatttcaaaacattcttaaccaatgatcagacaaaggtgaccgaggaagagaacaagggctcaggcacaggagccgctggcgcatctgacacaactatcaaacctaaccccgagaacactggtccaaccctggaatgggacaactatgatcttcgcgaagatgcacttgacgacaatgtatcctctagctctgtacatgactccccccttgctagctcacccgtgcggaagaatatttttcggtttgacgagagcaccacaggcttcaatttctccttcaagagtgctttgagtctttctaaatctccagccaagctgaatcagtctgggacatctgtggggacagacgaagagtctgatgtgacccaggaagaagagcgcgatggccagtattttgaacccgtggttcccctgcccgatttggttgaagtcagctccggcgaagaaaacgagcaagtggtcttcagccacatggctgaactttaccgatatgacaaggacgtgggccaatggaaggaaagaggaattggtgacatcaaaatcttgcagaattacgataataaacaggtgaggatagtgatgcgccgagaccaggttctaaagctgtgcgcgaatcacaggatcacaccggatatgagccttcagaatatgaagggcacagagcgcgtgtgggtctggacagcatgtgacttcgctgacggagagcggaaagtagagcatctcgccgttcgctttaaactgcaagacgtggctgacagctttaagaagatcttcgatgaagcaaagactgctcaggagaaagactcacttatcacaccccatgtcagtcggagctctacaccacgtgagtcgccatgcggcaagattgccgtggcagtcttagaggaaacaacaagagagcgtactgacgtaattcaaggtgatgacgttgcagatgcggcctccgaggtggaggtatcatccacctctgaaacaacaaccaaagctgtggtttcacctccaaagtttgtttttggctctgagtccgtaaaacggatcttttcttccgaaaagtccaacccatttgcatttggcaatagctctgcaactgggagtctgttcggtttttcctttaatgccccactcaaatccaatgattcggagacgtcaagtgttgcacagagcggatcagagagcaaggtagagccgaaaaagtgcgaactgagcaagaacagcgacatagaacagtctagtgattcaaaagtgaagaatctgtcggcttcattccctatggaagagtcctctatcaattacaccttcaagacccccgaaaaggagccaccactgtggcatgccgaattcacaaaggaggagctagtccagaaactgagttccaccactaagtcagccgatcagcttaatggactgctgagagagactgaggccactagtgccgtattgatggagcagatcaaattgctcaaaagcgagattcggcgcctcgaacggaatcaggaggagtccgctgctaacgtggagcatctgaagaatgtgctgctgcagtttatcttccttaagcccgggtcggagcgcgagcccagcagttgctacaaatacgacgtagctgcacagccatag

SEQ ID NO: 131707 - DNA, 5301 bp, synthetic construct
  misc_feature 1..5301: note = Description of Artificial Sequence: Synthetic coding sequence
  source 1..5301: mol_type = other DNA
atgtcttgtagcaaagcttacggagagagatatgtggcctctgtccagggctcggcaccatccccccgaaagaaatcaacacggggcttctatttcgctaagctttactacgaagccaaggagtatgacctggctaagaaatacatttgtacgtacataaacgtgagagagatggacccccgcgcccaccgctttctcggcctcttatacgagctggaagagaacactgagaaggctgttgaatgctaccggaggtccgtagagctgaaccctactcaaaaggacctggttctgaaaattgccgaactgctatgtaagaatgacgtgaccgatggacgcgccgaatactgggtggagcgcgccgccaagctgttcccggggagtccagctatctacaaattgaaggaacagcttttggattgcgagggggaggatggctggaataaactgttcgatctcattcagagcgagctatatgtacggcccgacgacgtacatgtgaatatcaggctcgtcgagctctacaggtcgacgaaacgactgaaggatgcagtagctcgctgtcacgaagctgagcgaaatatcgcgctgaggagttcactggaatggaactcctgtgtagttcaaaccctaaaggaatacctggagagtttgcagtgcctcgagtcggacaaatcagattggagagcgacaaatactgacctgcttttagcctatgccaacctgatgcttctaacgctgtcgactagagacgttcaggagtcacgggagttattagaatccttcgactctgcgcttcagtccgctaaatctagcctgggaggcaacgacgagttgtccgccacatttctggagatgaagggacacttttacatgcacgctggatctctcctgttgaaaatgggacagcacggaaataacgtgcagtggagagctctctcagaactcgccgcgctctgctatctgatagcttttcaggtgcctaggcccaagataaagctgattaagggagaggcgggacaaaacctgctcgagatgatggcctgcgaccgactgtcccagtctggtcacatgttactaaacctcagtcggggcaagcaggattttctaaaggtggtggtagagaccttcgccaacaagagcgggcagtcggctctgtatgacgcactgttctcttcccagagtcctaaagatacatcattcctcggatcagatgatatcggaaatattgacgtgcaggaaccagagctagaagatcttgccagatacgacgtaggagctattagggcacacaacggtagtctgcaacatctgacatggcttggcttacagtggaatagcctgcccgcactgccgggaataaggaagtggctcaagcagctgtttcaccacttaccccaggagacaagtaggctcgagacgaatgctcctgaatccatttgcatcctcgacctggaggtgttcctgctcggggtggtttacacttcccatctccagcttaaggaaaaatgcaacagtcatcattcgtcgtatcaacccctgtgcttgccgctgcccgtctgcaagcagctttgtaccgaaagacagaagtcctggtgggatgccgtgtgcactcttatccatcgaaaggcagtcccagggaactctgctaagctgcggctcctggtccagcacgagattaacaccctccgggcccaggaaaagcatggactgcagccggcattgctggtgcactgggcaaaatgtctgcagaagatgggaagtggattaaacagcttctatgatcagcgggaatacattggccggtctgtgcattattggaagaaggtgctccccctgctaaagattatcaaaaaaaaaaattcaatccctgaaccaatagatccactgttcaaacactttcactccgtcgacattcaagcctctgaaatcgtcgagtatgaagaagatgcacacgtgacgtttgctatcctcgatgccgttaacggcaatatcgaagacgccatgaccgcctttgaaagcataaagtccgttgttagctattggaatttggctctgatttttcataggaaagcagaggatatcgcaaacgacgcccttagccccgaagagcaggaggagtgcaaaaattatctcaggaaaactagggggtatctcattaaaatcctggacgattctgacagcaacctctccgttgtgaaaaagctgcccgtgccgttagagtcagtcaaagaaatgcttaagtcagtcatgcaggaactggagaactatagtgaaggagggcccttatacaagaacgggtccctgcgcaacgccgactctgagataaaacactctacaccaagccctaccaaatacagtttgagcccgagcaaaagttacaaatattcccccaaaaccccccctaggtgggcggaggaccagaacagcttacttaagatgatcaggcaggaagtgaaggccattaaggaagaaatgcaggagttgaaactgaattctagcaaatccgcatcacaccaccgctggccgaccgagaactatgggccggattcagtcccagatggataccagggttcccagaccttccacggcgcgccactcactgtggcgactacagggccatccgtctactatagccagtccccggcatacaacagccaatatctgcttaggccagccgccaatgtgacccccacaaaaggtagttccaacaccgaattcaagtcaacgaaagaggggttttcaatcccggtttcagctgatggttttaagtttggaatttccgaacccgggaatcaagaaaaaaagagcgaaaaaccgctggaaaacgatacaggcttgcaggcccaggatattagcgggcgcaagaaaggccgaggtgtcattttcggccagacctcctctacatttacgttcgccgatgtagctaaaagcacctcgggagaagggtttcagttcggcaaaaaagacctgaacttcaaggggttctcaggggcgggggaaaagctgttttcgtcacagtatggcaaaatggctaataaggctaataccagcggagatttcgaaaaagatgacgacgcctataagaccgaagacagcgatgatatccactttgagccggtggtccagatgcctgagaaggtggaactggtgactggcgaggagggggagaaagtactgtacagtcagggtgtaaagcttttcagatttgacgcggaagtatctcaatggaaggagagagggctgggaaatctgaagatcctaaaaaatgaggtcaatgggaaggtgaggatgttgatgcagcgggagcaggtgttaaaggtgtgcgctaatcattggatcactaccaccatgaacttgaaacctctgtctggatccgatcgcgcctggatgtggagcgccagcgacttctcagacggagatgccaagctggagcgattggccgccaagttcaagaccccagaactagcagaggaatttaagcagaaatttgaggaatgccagcggcttctgctggacatccccttacaaactccacacaaactggtggatacaggacgtgcggcaaaactgattcagcgagcagaggagatgaaaagtggacttaaagatttcaagacattcttaactaacgatcagaccaaagtcgctgaagaagaaaataaagggtctgggaccggtgctgccggggcatccgataccacaatcaaacccaatgcagagaacacggggccgaccctggaatgggacaactatgacttgagagaagatgcactggatgattccgtcagttcgtccagtgtgcacgcatccccgctggctagctctcctgtgcgcaagaacctgttccactttgacgagtctaccaccggttctaactttagctttaaatctgctctcagcttgtcgaagtccccagccaagctaaaccagtccggaaccagtgtgggaactgacgaggaatcggacgtgacacaggaagaggaacgggacggacagtattttgagcccgtggtgccactcccagacctcgtggaggtcagctctggagaggagaatgaacaggtcgtctttagccatcgagcggagttttaccgctacgataaagatgtgggacagtggaaagagcgaggaatcggcgacattaagatcctgcaaaattacgataataagcatgtacggatcttgatgaggagagatcaggtgctgaagctgtgtgccaaccaccggattacaccagatatgtctctgcagaatatgaaaggcacagaacgcgtctgggtgtggaccgcctgcgactttgccgacggcgagagaaaagtcgagcacctggctgtaaggttcaagctccaagatgtggcggactctttcaaaaagatttttgacgaagccaaaaccgcccaagagaaggattccctgattacaccccacgtaagtcgttcgtcgacgcctagggaatctccctgcggtaagattgctgtggctgtgctggaggaaactacccgagagcggactgacgtcatccagggcgatgatgtagccgatgctgcctccgaggtcgaggtctcgagcaccagtgaaaccactacaaaggctgttgtgtctccaccgaaattcgtgtttgggtcagaatctgttaaaagaatcttcagtagtgagaaatcaaagccatttgcgtttggcaactcctccgctacaggaagcctgtttgggttctccttcaacgcccccctcaagagtaacaattccgaaacaagtagtgtggctcaatctggcagcgaaagtaaggtggagccgaagaagtgtgagctgagcaagaatagtgacatcgagcaaagctccgacagtaaagttaagaatctcagtgcttcttttcctaccgaagagtcctctattaactatacctttaagactccagagaaagagcccccgctgtggtacgccgagtttaccaaggaagagctcgtacaaaaactaagcagcacaaccaagagtgccgaccatctgaacggactccttcgcgaaattgaggctacaaatgccgtgctgatggaacagatcaaactgctaaaaagtgagattcggcgcctggagaggaaccaggagcaggaggttagcgccgctaacgtcgaacatttaaaaaacgtccttctccagtttatttttttaaagcctgggtccgagagggagagactgttacctgtgattaacactatgctgcaacttagcctggaagagaaaggcaagctggctgccgtggctcaggctgagcggggtttcgtgcttaattcaacattttag

SEQ ID NO: 131708 - DNA, 471 bp, synthetic construct
  misc_feature 1..471: note = Description of Artificial Sequence: Synthetic coding sequence
  source 1..471: mol_type = other DNA
atggaccctagggcacaccggtttctagggttactttacgagctggaagagaacaccgagaaggccgtagaatgttaccggaggtctgtcgaactgaacccaactcagaaggacttggtcctgaagatcgccgagctgctgtgtaagaacgatgtgaccgatgggcgggcagaatactgggtagaacgggcagcgaagctcttcccaggttctcccgcaatctacaagctgaaggaacagttacttgattgcgaaggcgaggacggctggaacaagctttttgacctgatccagtctgaattgtacgtccgacccgatgatgtccacgtgaatatccggcttgtggagctttacaggagtaccaagagattaaaagatgcggttgcacggtgccatgaagcagagcggaacatagctcttagatccagtttagagtggaactcttgtgttgtgcagacgctgaaattctag

SEQ ID NO: 131709 - DNA, 3378 bp, synthetic construct
  misc_feature 1..3378: note = Description of Artificial Sequence: Synthetic coding sequence
  source 1..3378: mol_type = other DNA
atgctcctcacactgtctacaagggatgtacaagaatctagagagttgctggagagctttgactctgcccttcagtccgccaaatcttcactgggaggcaatgatgaacttagtgccacctttctggaaatgaaaggacatttctatatgcacgctggttcactcctcttgaaaatgggacaacacggaaacaacgtccagtggcgagccctgtcagagctggcggctctgtgctacctgatagcatttcaggtgccacgcccaaaaatcaagctcatcaaaggggaggccggccagaatttactggaaatgatggcgtgtgatcgactgagccagtctggccatatgctgctaaatctttcccgggggaaacaggattttttgaaggtggtggtggagaccttcgcaaataagagcggccagtcagccctgtacgacgcactctttagcagccagtctcctaaggacacgtccttcttgggtagcgatgacatcgggaatattgacgtccaggagccagagctggaggacctggcgcgttatgacgtaggagcaattagagcccacaatggatcccttcagcacctcacatggctgggccttcagtggaatagtttgccagcgttgcccggcatacgtaagtggttaaaacagctgtttcatcacctgccacaggagacatcaagactggagactaacgcccccgagtcaatctgcatcttggacttggaggtgtttctcctgggggtcgtgtacacaagccacctgcagctcaaagaaaagtgtaattcacaccacagttcttaccagcctctgtgcctgccactcccagtctgtaaacaactttgtaccgagagacaaaaaagttggtgggacgccgtatgtacactgatccaccgtaaggctgtacccgggaacagtgctaaactgaggctgctggtgcagcatgagattaacacccttagagcacaggaaaagcacggcttacagcccgctctgctggtccattgggccaaatgtttgcagaagatggggtcaggtctaaattctttctatgaccagcgcgaatatatcggccgctccgtccattactggaagaaagtcctgccattgcttaaaattatcaaaaagaagaactcaatccccgagccgattgatcccttgttcaagcacttccatagcgttgatattcaggcaagtgagatcgtggagtatgaggaggatgcccacgttacctttgccattctagacgcagtgaatggcaatattgaagatgccatgaccgctttcgagagtataaaaagtgtggtctcatactggaatctggcccttatatttcacaggaaagctgaagatatagccaacgatgccctgagccccgaagaacaggaggagtgcaaaaactatttgcggaagacccgaggctacctcattaagatactggatgactccgactcgaatctgagcgtcgtcaagaagctgcccgtgcccttagagtccgtgaaagagatgttgaaatctgtgatgcaggaactcgagaactacagtgaaggtgggccactgtataaaaatgggtccctgcgcaacgccgacagtgaaatcaaacacagtacaccctctccaaccaaatacagtctctctccttccaaatcatataaatatagccccaaaactccccctaggtgggctgaagaccagaatagcctgctgaagatgatccgacaggaggttaaggcaatcaaggaagagatgcaggaattaaaactgaatagttccaagtccgcttcgcaccacagatggcccaccgaaaactacggacctgactccgtgcctgatggataccagggaagccaaacattccacggcgctccactgactgtggccaccacaggaccaagcgtgtactatagccagtcgcccgcatacaactcgcagtacctcctgcgaccggccgccaacgttacccctaccaaagggtcatccaacactgaatttaaatccaccaaggaaggcttttccatccccgtcagcgccgatgggtttaagtttggcatttcggagccgggtaatcaagaaaagaagagtgagaagcctctcgagaacgacacggggctgcaggcccaggacatctctggcaggaaaaaggggcggggggtgatcttcggacagacctcctcaacgttcacttttgcggacgttgcaaaatccactagtggtgagggtttccaatttggtaagaaggacctaaattttaagggatttagcggtgccggagagaaactgttctcatcgcagtacgggaagatggcaaataaggccaacaccagcggagacttcgaaaaagatgatgacgcgtataaaactgaggactccgatgatatccatttcgagcccgtggtccagatgcctgaaaaggtggagctcgttactggcgaagaaggcgaaaaggtgttgtactctcagggagtcaaactgtttaggtttgacgcggaagtatcgcaatggaaggaaaggggcctggggaacctgaaaatcttgaaaaacgaggttaacggcaaagtccgcatgctgatgcagagagagcaggtacttaaggtgtgcgccaaccactggattacaacaaccatgaatctaaaaccacttagcggatctgaccgtgcatggatgtggagtgcgtcagatttttctgatggggatgctaagttagaacgccttgcggctaagtttaagacccccgaattagcagaagagttcaagcaaaagtttgaggagtgtcagaggctgctactagatatcccccttcagaccccgcataagctagtggataccgggcgagccgccaagttgatccagagggccgaggagatgaagtctggttcagagagcaaagtggaacctaaaaagtgcgagctgtccaaaaactctgacattgaacagagcagtgacagcaaggtgaaaaacctgtcggcctccttccctacagaagagtcaagtattaactacacgttcaagactccggaaaaggaaccaccactctggtatgccgagtttacaaaggaagaactggtacagaagctgtcctccacaacaaaatccgcagatcatctgaatggccttctgcgggagattgaggcaacaaatgccgtgctaatggagcagattaagttgcttaaaagcgagatcagacggctggagaggaatcaagagcaggaagtgagcgccgcaaatgtagagcatttaaagaatgtcctgcttcagtttatatttttaaaaccaggctctgagcgtgagcgtctactccccgtgatcaatacgatgcttcagctcagtctagaagagaagggaaagcttgctgctgtcgcacaaggagaggaatag

SEQ ID NO: 131710 - DNA, 423 bp, synthetic construct
  misc_feature 1..423: note = Description of Artificial Sequence: Synthetic coding sequence
  source 1..423: mol_type = other DNA
acagaggagagtagcataaactatacctttaaaactcctgaaaaagaaccccctctgtggtacgctgagttcaccaaagaagaactggtacagaagctttcatccactactaagtcggccgaccatctgaacggcctcctgcgcgaaatcgaggccaccaacgctgttttgatggaacagataaagctgctgaagtctgagatcaggaggctcgagaggaatcaggaacaggaggtctccgctgctaacgtcgagcacttaaaaaatgtactgttacagtttatattcttgaagcccggctccgagagggagcgcctgctgccagtcattaacactatgttgcagctgagcctggaggaaaagggcaaacttgctgccgtggctcaaggtttgcaggaaaccagcatccctaagaagaagtag

SEQ ID NO: 131711 - DNA, 5277 bp, synthetic construct
  misc_feature 1..5277: note = Description of Artificial Sequence: Synthetic coding sequence
  source 1..5277: mol_type = other DNA
atgagctgctctaaggcctatggggaacgttacgtggcttccgtgcagggatctgctccctctcctaggaaaaaatctacgcgtggtttctacttcgccaaattgtactacgaagctaaggagtatgacctggccaagaagtacatctgcacatacataaacgtgcgtgagatggacccacgggctcataggttcctcggcctgctttacgaacttgaggagaacaccgagaaggccgtcgaatgctaccgacgtagcgtcgagctgaaccccacacagaaagacttggtgttgaagattgccgagcttttgtgtaagaatgacgtgaccgacggtcgcgcggagtattgggtggagagggcagcgaagctcttccctggaagtcctgctatctacaaactaaaagagcagttactggactgtgagggagaagatggttggaacaagctgtttgacctgattcagtctgaactttatgtgaggccagacgatgtacacgtcaacattcgcctcgtggaactgtaccgatctacaaagagactcaaggatgcagtagcacgatgtcatgaagccgaacgaaacatcgcacttcgctcctctcttgaatggaacagctgcgtggtgcagaccttgaaagaatacctggagtccctgcagtgtcttgagagcgacaaatccgactggagggccactaataccgatttactgctcgcttacgccaacctgatgctcctcacactcagtacccgcgatgtgcaggagtccagagagctcttggagtccttcgattctgctttacagtcagcaaaatcctccttgggtggcaacgatgagctgtcagcaacgttccttgagatgaagggacacttctacatgcacgccggctcactcctgctaaagatggggcagcatgggaataatgtgcagtggcgagccctaagcgaactggcagctttgtgttatctcatcgctttccaggttccccggccaaagattaaattgatcaaaggcgaggccggccagaatctcctggaaatgatggcctgtgatcgtctgtctcagagcggtcacatgctgctcaatctctcaagaggcaaacaggacttcttgaaagtggttgttgaaacttttgccaacaaatcagggcagtccgctctgtatgacgccctgtttagcagtcagtctccaaaagatactagtttccttgggtcagacgatattggtaatatcgatgtacaggagcctgagctggaggacctcgctcggtacgacgtcggcgccatccgagcacacaacgggtctcttcagcatctgacttggctcgggctccagtggaactccctgcctgccctgcctggtatccggaagtggctgaaacaattgtttcaccatcttccccaggaaacctccagactggagaccaacgcaccagagtctatatgtattctggacttagaagtgtttttgctaggggtcgtgtacacaagtcatctgcagctgaaggaaaaatgtaactcccaccactccagttatcaaccactctgtctgccactcccagtgtgtaagcagctatgcactgagagacagaagagctggtgggacgccgtgtgcactctcattcatcgcaaggccgtgcctggcaacagcgcgaaactgcgtctacttgtgcagcacgaaataaacaccctcagggcccaggagaaacacgggctgcagcctgccctgctggtccactgggccaagtgcctgcagaaaatggggagcggactgaactcgttctatgatcagagagaatacatcggccggagcgtgcactactggaagaaggtgctacccctcctgaagataattaaaaaaaagaatagcattcctgagccaatcgaccctcttttcaaacacttccatagcgtggatattcaagcgagcgaaatagttgaatatgaagaggatgcccatgtgacatttgcaatccttgacgccgtgaatggaaacatagaagatgcaatgaccgcattcgagtcaatcaagtccgtcgtgtcatattggaacctggcgcttattttccaccggaaggctgaagacatcgcaaatgacgctctcagcccagaggagcaggaagagtgtaaaaactacttacggaagacccgaggctacctcatcaagatactggatgactctgacagtaacctctccgtagttaagaagctcccagtgcccctcgaatccgtgaaagagatgcttaagagcgttatgcaggagctcgaaaactactctgagggcggtcccctgtacaagaatggctcactgcggaacgcagacagtgaaattaagcattctaccccgtccccaaccaagtactccctcagcccctccaaatcatacaagtacagtccaaagactcccccacgatgggctgaagatcagaactctctcctgaagatgatccgccaggaggtcaaagccatcaaggaggagatgcaggagctgaaactgaactcgagcaagtcagccagtcatcaccggtggccaactgagaactacggcccagactccgttccggatggataccaggggtcccaaaccttccacggcgccccacttacagtcgctaccactgggccctcagtctattactcacaatctccagcttacaattctcaatatcttctccgacctgccgccaacgtaactcccaccaaggggtcatcaaatactgaattcaaatctaccaaagaaggctttagtattcctgtcagcgcagatgggttcaagttcggaatttcggaaccagggaatcaagaaaagaagagtgaaaagccacttgagaacgacaccgggctccaagcccaggacatcagtggcaggaaaaaagggagaggagtgatattcggacagacctcctctacttttacctttgctgatgtggctaagtccaccagtggtgagggatttcagttcggcaagaaagacctgaattttaaagggttcagtggggcaggcgaaaaactcttttcatcgcagtacggcaaaatggccaataaagccaacactagtggagacttcgaaaaggacgatgatgcatacaagacagaagactcagacgacatacacttcgagcccgttgtgcaaatgcccgagaaggtcgagctcgtgaccggcgaagagggagaaaaagttctatacagtcaaggcgtgaagcttttccggtttgacgctgaggtgtcccagtggaaagaaagagggctgggaaaccttaagattctcaagaatgaagtgaacggcaaggtaaggatgctcatgcagcgagagcaggtgttaaaggtgtgtgccaaccattggatcacaactacaatgaatctgaaacctctctccggtagtgatcgcgcatggatgtggtccgcatccgatttctccgacggagatgcaaagctggagaggcttgcggccaagttcaagacaccagaacttgccgaggaattcaaacagaaatttgaagagtgccaacgtctcctgctcgacatcccactgcaaactccccacaaactcgtggatactgggcgagctgcaaagctgatacagcgagcagaggaaatgaaaagtggtttgaaggacttcaaaacattcctgacgaatgatcagaccaaagtggccgaggaagagaacaaaggaagtggcaccggagctgctggcgcatccgacaccaccataaaacctaacgcggagaatacgggaccaacattagagtgggacaattatgatctgcgcgaagacgccctggacgacagcgtgtcatctagctccgtccacgccagcccattggcttcttcgcctgtccgtaaaaacctattccacttcgacgagagcaccaccgggtccaatttttcattcaaatccgcgctgtccctgtctaaatcgcccgccaagctgaatcagtccgggacatctgtcggcacagacgaagaatcagacgtgacacaggaagaggagcgtgacggccagtacttcgaaccagtggttcccctcccagatctcgtagaagtgagttccggcgaagagaatgaacaagttgtcttttcccaccgcgccgagttttaccgatatgataaagatgtcggacagtggaaggagagagggattggtgacattaaaattcttcagaactatgacaataagcatgttagaattttaatgcggcgcgatcaggttttgaagctgtgtgccaatcacaggataactcctgacatgtctctgcagaatatgaaaggcaccgaacgagtgtgggtttggaccgcgtgcgactttgcagacggagagcgcaaggttgaacacctggcagtgcgcttcaagctgcaggacgtagcagattcctttaagaagatcttcgacgaagccaagactgcccaggagaaagacagtttgataactccgcacgtcagcagaagctctacaccgagagaatccccttgcggaaaaattgccgtggccgttctggaggaaacaacaagagagcggacagatgtaatccagggcgacgatgtcgctgatgcggctagtgaggtggaggtcagttctacctcagaaacaactactaaagccgtggtttcaccgcccaaatttgtgttcggcagcgagagcgtgaaaaggatattttcaagtgaaaagagcaaaccttttgctttcggtaactcgagtgcaaccggctcactctttggcttctcatttaatgcccccctgaaatcaaacaacagtgagacaagctctgttgcccagagtggaagcgaatctaaagtggaaccaaaaaaatgtgaactttcgaaaaattccgatattgagcaatcctctgattctaaggttaagaacttgtctgcatcttttccaactgaagaatctagcattaattacacatttaagacacctgagaaggaaccccctttatggtatgctgaattcacgaaggaggaattagtccagaaactgtcaagcaccacaaagtctgctgatcatttaaatggcctgttgcgtgaaattgaagctacgaacgcagtgcttatggaacagattaaactgctcaagagtgagatccgtcgcctggagcggaaccaggaacaagaggtgtctgccgccaacgttgagcacttgaagaacgtgctgctgcagttcatcttcctgaaaccgggctcagagagagaaagactcctccctgtaatcaacacaatgctccaactcagcttggaggagaagggtaaactagcagcagtggctcagggtgaggagtag

SEQ ID NO: 131712 - DNA, 5301 bp, synthetic construct
  misc_feature 1..5301: note = Description of Artificial Sequence: Synthetic coding sequence
  source 1..5301: mol_type = other DNA
atgagttgctctaaagcgtacggcgagcggtatgtggcatctgtccaaggctccgcaccttctccgagaaagaaaagcacccggggattttattttgccaaactttattacgaggccaaagagtatgatctcgccaaaaagtacatatgcacttacattaatgtgagagaaatggatcccagagcacaccggtttctggggttgctttacgaacttgaggaaaacactgaaaaagcagtcgagtgctaccggaggtcagtggaactgaaccctactcagaaagacctggttcttaagatcgctgaactattgtgtaagaatgatgtgaccgacggacgggcgaaatattgggtggaacgtgccgcaaaactgttcccaggatccccagccatctacaagttaaaagagcagctgctggattgtgaaggcgaggacggctggaataaactgttcgatttaattcagtccgagttgtacgttcgcccagatgacgtccatgtgaatattcgcctcgttgagctgtatcgctcgacaaagagattgaaagacgccgtggctcgctgccatgaggccgagcgaaacattgctctgcgatcgagcttagagtggaattcttgtgtagtgcagacattgaaggaatacttagagtcgctacagtgcttagaaagcgataagtccgactggagggccactaatactgacctgctgttagcatacgccaatttgatgctcctgactctgtctacccgagacgtccaagagtcacgcgaattgttagaatcgttcgacagtgctctccagagcgctaagtcttctctcggcggaaacgacgaactgtctgctacgtttttggagatgaaaggccacttctatatgcatgccggttcccttctcctgaaaatgggacagcatggaaataatgtccaatggagggctctgtcagagttagccgctctgtgttacctgatcgcattccaggtgccccgacccaaaatcaaactcatcaagggagaagccgggcagaatctgttggagatgatggcatgcgacaggctgagtcaaagtggccacatgcttctaaacctgagtcggggaaagcaggattttcttaaggtggtggttgaaacctttgccaacaaatccggtcagagcgctctgtatgatgcgcttttctcgtctcagtcaccaaaggataccagctttctgggttctgatgacataggcaatattgatgtgcaggaaccggaactggaggacttggcacgctatgatgtaggggcaatccgtgctcacaatgggtccttacagcaccttacgtggttaggcttacaatggaactccctgcccgcgttacccggaatccgaaaatggttgaagcagctcttccaccatctgccccaggagactagtaggctcgaaactaatgcaccagagagcatatgtatcctcgacctggaggtcttcttactgggggtggtgtacacaagccacctgcaactgaaagagaagtgtaactcccatcattcaagctatcagccattgtgcctgcctctgcccgtgtgtaagcagttatgcacagaacgccaaaaatcatggtgggacgccgtctgtaccctgatccaccgaaaggctgtgccgggcaattcggcgaagctgaggctgctcgtacagcacgagatcaacaccctgagagcccaggaaaaacacggcctccagcccgcactgctggtccattgggcgaagtgcttgcagaagatgggcagcggattgaacagcttctacgatcagagagagtatatcggaaggtctgtgcactattggaagaaggtgctgccactcttgaagatcattaagaaaaaaaatagtatccccgaacccatcgaccctctatttaaacacttccactcggtggatatccaagcgtcggaaatcgtggaatatgaagaggatgctcatgtcacttttgccatcctagacgccgtcaacggcaatatcgaagacgccatgacggcatttgagtcaatcaagtctgtggtgtcatactggaacctcgccctgatatttcatcgtaaagccgaggatatcgccaatgacgctctcagcccagaggaacaggaggagtgcaaaaattaccttcgaaaaactcgaggctaccttattaaaattcttgacgattctgatagtaatttgtctgtggtcaagaaactaccagtgcctttagaatctgtgaaggagatgttgaagtcggtgatgcaggagctggagaattattcggagggggacccattatacaagaacggcagcttaagaaacgccgactctgaaattaagcacagcactccctccccaactaagtattcactcagcccttcaaaatcgtataaatacagtcccaagactccccccaggtgggccgaagaccaaaactctctactcaaaatgattaggcaggaggttaaagccatcaaggaagaaatgcaggagttgaaattgaattcaagcaagtccgcatctcaccacaggtggcctacagagaactacggaccagacagtgttccggatgggtatcaaggaagccagacattccacggcgcccccctaacagtggccacaacggggccatcagtgtattattcgcaaagccctgcctataattcacaatatctgctgagacccgcagccaatgtgaccccgacgaaaggctcgtcaaacaccgagttcaagtctactaaggagggtttctccatccccgtgagtgcggatggattcaaatttggtataagcgaacctggcaaccaggaaaaggagtcggaaaaacctcttgaaaacgacacagggtttcaggcgcaggatatatccgggcagaaaaatggcagaggtgttatctttggacaaacatcctctacgttcactttcgcggacgtggcaaagtctaccagtggagaggggtttcaatttggcaaaaaagatcccaacttcaagggcttttctggcgctggcgagaaactatttagcagtcagtgtggcaaaatggctaataaggctaatacctctggggattttgaaaaagacgatgacgcctataaaactgaagattctgacgatatacatttcgaacctgtagtacaaatgcccgagaaagttgagctggttatcggggaggagggagaaaaagtgttatacagccagggagtgaaactgtttagatttgacgcagaagtgaggcagtggaaggagcgcggcctgggcaacttaaagatccttaaaaatgaagtgaatggcaagcctcgcatgttgatgcggcgagaacaagtcctgaaagtctgcgcaaatcactggatcaccactacgatgaacctcaagcctctctcgggatcagatcgggcctggatgtggagcgcctccgacttctccgatggtgacgctaaactagaacggttggccgctaagtttaagacgccagagctcgccgaggagtttaaacaaaagtttgaagaatgtcagcagctcctcctggatattcctctgcagacaccacataaactggtggacactggccgcgcagccaaattgattcaacgcgcagaagagatgaaatccggcttaaaggatttcaagacattcctgacgaacgatcaaaccaaggttactgaagaagaaaacaagggatctggcacaggggcagccggagccagcgataccactattaagcccaatcccgaaaataccgggcctacactggaatgggacaactgtgatctccgagaagatgctctcgatgattccgtttctagtagctcagtgcatgccagccccctagcctcaagcccagtcagaaaaaacctgttccactttggggagtcaacaactggctctaatttcagcttcaaaagcgcgctcagtccttcgaagtcccctgctaaactcaatcagtcaggaaccagcgtggggacagacgaggaaagcgatgttactcaagaggaagagcgtgatgggcagtactttgaacccgtggtccccctgcccgacttggttgaagtttcgagcggagaggaaaatgagaaagtggtgttctctcaccgggccgagctgtaccgatatgataaagatgtcggccagtggaaagagcggggtataggcgacatcaagatactgcagaactacgataacaaacaggtacgcatcgttatgaggcgcgatcaggtcctgaagctgtgtgctaaccatacgattactcccgacatgtcccttcagaatatgaaaggaacagaaagagtttgggtttggaccgcgtgtgatttcgccgatggtgagagaaaagtggagcacttagccgtgcggttcaaactgcaggacgtcgccgacagcttcaagaaaatctttgatgaggccaagaccgcccaggaaaaagactcgctgatcacaccgcatgtgtctaggtcctctactcccagggagtcaccatgtggaaagatcgccgtcgctgttctggaggagactactcgtgaaagaacagatgtgatccagggcgatgacgtggctgatgcagcttctgaggttgaagtgtcgagcacatctgagaccaccacaaaagctgtcgtctcgccaccaaaattcgtttttgggtcagagagtgtcaaacgtatcttttccagtgagaaatccaaacccttcgcctttggcaactcatctgccaccggctcgctttttgggttttcgttcaacgcgagtctgaagagcaacaattcagaaacctcctcggtggcccagagtggaagtgagtccaaagttgagcctaaaaagtgcgagctcagcaagaatagtgatatcgagcagtccagcgatagtaaggttaagaatctttccgcttctttcccaatggaggagtcgagcatcaactatacctttaagaccccagagaaggaacctcccttatggcatgcagaattcactaaagaggagctcgtccagaagttatcctccacaaccaagtcagctgatcacctgaatggcttgctgcgagaagccgaggctacctctgcagtgcttatggagcagataaagctcctgaagtctgaaattcgccgactcgaacgtaaccaggaacaggaagagagcgcagccaatgtggaacatctgaagaacgttctgttgcagttcatttttctgaagccagggtcagaacgtgagcggctgctgcctgtcataaacaccatgttacaactgagcccggaagaaaaaggtaaattagccgcggttgcacaggcagagaggggattcgtactgaatagcacgttttag

SEQ ID NO: 131713 - DNA, 3378 bp, synthetic construct
  misc_feature 1..3378: note = Description of Artificial Sequence: Synthetic coding sequence
  source 1..3378: mol_type = other DNA
atgttactcactctaagtacccgggatgtacaggagagtcgggagttgctcgagtcttttgactccgctctccaatcagccaaatcttctcttggaggaaatgatgagctgtcagctaccttcttggaaatgaaggggcacttctacatgcacgctggttccctcctacttaagatgggccagcacggaaacaatgttcagtggagggctctgagcgaactcgccgccctgtgttatcttattgccttccaggtacccagacccaaaattaagctgatcaagggggaggcggggcagaatctgctcgaaatgatggcctgcgacagactgtcccaatcgggccacatgctcttgaatctgtctagagggaagcaggatttccttaaagtggttgtcgagacgttcgctaacaaatcagggcagagtgccctttacgatgctctctttagcagtcaatcacctaaggatacatctttcttgggctccgatgatatcggcaatatagacgtgcaggagcccgagctggaagacctcgcgcgctacgatgtcggagcaattcgggcacacaacggctctctacagcacctaacatggttgggtttacagtggaattccttaccagcccttcctgggattaggaagtggctgaagcagctcttccatcatttgcctcaggaaacctcccgtcttgaaaccaacgctccggagtccatttgtatcctcgacctagaggtgtttcttctgggagtcgtctacacttcccacttgcagctgaaggaaaagtgtaattcacaccattctagctaccaacctctgtgcctcccgttgcccgtctgtaaacagttatgcaccgagagacagaagtcatggtgggacgcagtatgcacgttgattcacagaaaggccgtgccaggaaactctgctaagctcagattgttagtgcagcacgagataaacaccctccgggctcaggagaaacacggactccagcctgccctgctggtgcattgggcaaaatgtttacagaagatgggttccggacttaacagtttttatgatcagagagaatatattggccgctcggttcattactggaaaaaggtgctacccctgctgaagatcatcaagaagaagaacagcatcccggagcccattgatcctctgttcaaacattttcattcggtagatatccaagcgtccgaaattgttgagtacgaagaagatgcacacgtgacctttgcaatcctggacgcagtgaatggaaacatcgaggatgccatgactgcatttgagtccattaaatctgtggtctcctactggaatctggctctgatttttcaccgaaaagccgaagacattgcgaatgatgctttgtcgcccgaagagcaggaggagtgcaagaactatttgaggaagaccagaggctacctcattaaaatactcgatgactcagacagtaatttgtccgtggtgaaaaaacttcctgtgccgctagaaagcgtgaaggaaatgctcaagtcggtgatgcaggaactcgagaactattccgagggcgatcctctttacaagaatgggagcctacggaatgctgacagcgagattaagcacagcacaccttcccccactaagtactccctttctcccagcaaaagctataagtatagccctaaaaccccaccgagatgggctgaagaccaaaactctcttcttaaaatgattagacaagaggtgaaagcaataaaggaagaaatgcaagagttaaagctgaacagtagtaagagcgcctcgcatcatcgctggccaacagagaattatggtcctgattccgtccccgacggttatcaaggatcacagaccttccacggggccccactaacagtggccactacgggtcccagtgtctattactcacagtcacctgcctataatagccaatatttgctgaggccagccgccaatgtgacccctaccaagggcagcagtaacacagaattcaaaagcaccaaagaggggttctctatccccgtttcagctgatggctttaaattcggcatttctgaaccaggtaatcaggagaaggaaagcgagaagcccctagaaaatgatacagggttccaggcccaggatatctccggacagaaaaatggccggggggtgatttttgggcaaacttcctcaacgttcaccttcgcagatgtagccaagagtacctccggcgagggattccagttcggaaagaaggacccgaattttaagggtttctctggggcaggagaaaaactattctcttcccagtgcggaaagatggccaataaggccaataccagcggcgacttcgagaaagacgacgacgcatacaagactgaggatagtgacgatattcactttgagccagtggttcaaatgccagagaaagtggagctggtgatcggagaggagggggaaaaggtgctgtactcacaaggggttaagctgttccgtttcgacgccgaggtaaggcagtggaaagagagaggtctaggcaacctgaaaattctgaagaacgaagtcaatggtaagccacgcatgctgatgcgacgggaacaggtgctgaaggtttgtgcaaaccattggatcaccacaactatgaatctgaaacccttgtccgggagtgatcgagcgtggatgtggtcagcttccgattttagcgacggggacgctaagctggagagactggcggcaaagttcaaaactcctgaactcgcagaggagtttaaacagaagtttgaagagtgtcagcaactcctgctggacataccattacagactccacacaaactcgtggatacagggagggccgctaaactgattcagagagccgaggagatgaaatctgggtctgaatccaaggttgagcccaagaaatgcgaactctctaagaatagtgacatcgaacagtccagcgattccaaagtgaagaacctttcagcttcttttccaatggaagagtccagtatcaactacaccttcaaaactccagaaaaggaacccccactctggcacgcagaatttactaaagaggagctggtgcagaagcttagttccacaaccaaaagtgcagatcatctcaatgggctgcttagagaggccgaggccaccagcgccgtgctgatggaacaaatcaaacttctgaaaagcgagattaggagactggagagaaatcaggaacaagaggaaagtgctgccaacgttgaacaccttaaaaacgtgttgctgcagttcatttttttgaaacccggctctgagagagagcgcctcctacccgtgatcaacactatgctgcaattgagccccgaggagaaaggaaagttagctgccgtggctcagggagaggaatag

SEQ ID NO: 131714 - DNA, 471 bp, synthetic construct
  misc_feature 1..471: note = Description of Artificial Sequence: Synthetic coding sequence
  source 1..471: mol_type = other DNA
atggacccccgggcacataggttcctcggcctcctgtacgagctggaggaaaatacagagaaggcagtcgaatgctacagacggtccgtcgagttgaaccctacccagaaggatctcgttcttaagatcgctgagctcttgtgcaagaacgacgtgacagacggaagagccaaatattgggtggaacgggcggcaaaactgttccccggcagtcccgccatctataaactgaaagaacagctgctggattgtgaaggagaagatggctggaataaactgttcgacctcatccaaagcgagctgtatgttagaccagacgacgtgcatgtgaacatcaggctggttgaattgtacagatcaaccaagagactgaaagacgcagtcgcccggtgccacgaagctgaacgcaacattgccctgcgttcttcactcgagtggaacagttgtgtcgtgcaaacccttaagttttag

SEQ ID NO: 131715 - DNA, 5277 bp, synthetic construct
  misc_feature 1..5277: note = Description of Artificial Sequence: Synthetic coding sequence
  source 1..5277: mol_type = other DNA
atgagctgtagcaaagcttatggggagaggtatgtcgccagcgtgcaaggaagcgcaccatcgccacgcaagaaaagtacgaggggcttttatttcgcaaaattgtattatgaggccaaagagtatgatctagccaaaaaatacatctgtacatacatcaacgtcagagagatggacccacgtgcccaccggttcctgggtctgctgtacgaactggaagagaacactgaaaaggctgtggagtgttacagacggtctgtcgaactcaaccccactcaaaaggacctggtgctaaagatcgcagagctgctttgcaaaaacgacgttacagacggacgggccaaatattgggtggaaagagcggccaaactgttccccgggtcaccagcaatatacaaactgaaggaacagcttctggattgtgagggtgaggacggatggaacaaactgtttgatctgatccagtcagaattgtatgtccgtcctgacgacgtccatgtgaatatccgactggtagaactgtaccggtcaactaagaggttgaaagacgctgtcgcaaggtgccacgaggctgaacgcaatatcgctttgaggtcttccctggaatggaactcatgtgttgtccagactctgaaggaatacttagaatctctgcagtgcctcgagagtgataagtccgactggagggcaacgaacacagacctgcttctcgcatatgccaacctgatgcttctgacactctcaacacgggacgtacaggagtccagagaattgctggaaagcttcgacagcgctctccaatcagccaagagctcactgggtggcaacgacgagctgtccgccacctttctcgaaatgaagggacacttctacatgcacgcaggctccctgctattgaagatggggcaacacggtaacaacgtacaatggcgcgccctgagcgagctggcggctttgtgctatctgattgcctttcaggttcctagacccaaaatcaagcttattaaaggggaagcagggcaaaacctgttggagatgatggcctgtgaccgcttaagtcagtctggacacatgcttttaaacttatctcgagggaaacaggacttccttaaagtggtggttgaaaccttcgctaacaaatcgggccagtccgccttgtacgacgcactgttcagctcccagagtccaaaggatacgtcatttctgggaagtgacgatattggcaacatcgacgttcaggagcccgagctggaagatctcgctcggtacgacgtcggcgctataagggcccacaacggatctctgcagcacctaacatggctggggctgcaatggaattctctcccagctcttcccggtatccgcaagtggttgaaacagcttttccatcacctgccccaggaaacatccaggctggaaactaatgctcccgagtctatctgtattctggatctcgaggtgttcctgctcggggtggtctatacctcacacctccaacttaaggagaaatgtaactcccaccacagttcataccagccactatgtcttccccttcccgtgtgcaagcaattatgtacggagcgccagaagtcctggtgggacgcagtctgcacactcatacacagaaaagccgttccaggcaattcagccaagttacgccttctagtacaacacgaaatcaatacactgcgggctcaagagaagcatggtctccagccagctcttctcgtacattgggccaagtgtctccaaaaaatggggagcggccttaacagcttctatgaccagagagagtacatcggcagaagtgttcactattggaagaaagtcctcccgctgctgaaaattatcaagaaaaagaatagtatcccggaaccaatcgatcctctgtttaagcactttcactccgtggacattcaggcgtctgagatcgtcgagtatgaggaagacgcccacgtgacttttgctatcttggatgcggtcaacggcaatattgaagacgccatgactgccttcgaaagcattaagtcagtcgtttcttactggaatttggcgctgatatttcatcgcaaggcggaggacattgctaatgacgccctctccccagaggaacaggaggaatgcaaaaattacctgcgaaaaactcgcggctaccttatcaaaatactggatgactcagactcaaatttgtctgtggtgaagaagcttcccgtccctttagagagtgtcaaggagatgctgaaaagtgttatgcaagagctcgaaaattattcagagggagatccgctgtataaaaacgggtcacttcgcaacgccgacagcgaaatcaaacattcaaccccttcccctaccaaatacagtctctcaccaagcaaaagctacaagtatagccctaagaccccccctaggtgggccgaggaccagaactcattgctcaagatgattaggcaagaggtcaaagccattaaagaggaaatgcaggaactgaagctgaattctagtaagtcagcgtcgcaccacagatggcctactgaaaactacggccctgattctgtgcccgatggctatcaaggcagtcaaaccttccacggggccccactgacagtggcgactaccggtccctctgtgtattactctcagagccccgcgtacaatagtcagtacctgctgcgacccgctgctaatgtgactcccactaagggctcttctaatacagagttcaaatctacaaaagaggggttttcgattcctgtgagtgccgatgggtttaagttcgggattagtgagccaggaaatcaggaaaaagaatccgagaagccactggagaacgacacaggtttccaggcccaggacatatcaggtcagaagaacgggaggggagtcatcttcggtcaaacctcaagcaccttcaccttcgcagacgtcgcgaaatctactagtggcgagggatttcaattcggaaaaaaggatcctaactttaaggggttttctggcgctggcgaaaagctgttttcgtctcaatgcggcaaaatggccaataaagccaacacctctggcgatttcgaaaaggacgacgacgcctataagacagaggattccgacgatattcactttgagcccgtggtccagatgcctgaaaaggtcgagctagtcattggggaagaaggtgagaaggtgctgtatagccagggcgttaagctttttcgtttcgatgcagaagtgagacagtggaaggagcgcgggctggggaatctcaagatcttgaaaaacgaagtgaatgggaagccccgtatgctcatgcgcagggagcaagtgctaaaggtctgtgccaaccattggataaccactactatgaacttgaagccactcagcgggtccgaccgggcatggatgtggtccgcctcagatttctctgacggagacgctaagcttgagcggctcgctgcaaaattcaagacccccgagctagccgaggagttcaaacagaaatttgaggaatgccagcagctgttacttgacattcccctgcagacccctcataaactagttgacaccggacgcgcagcaaagcttatccagcgggcagaggagatgaagtctggactgaaggactttaaaacttttctgactaatgatcaaactaaagtgacggaggaggaaaataaaggatcaggtactggggcggctggggcctccgataccacaattaagcccaatcccgagaataccggcccaacacttgagtgggacaactgtgacctgagggaagacgcactggatgactccgtatcttcttcatcagtccatgcctctcctctggcctcgtcccccgtcagaaagaacctttttcatttcggggagtccacaaccggatcaaatttttcctttaagagtgctctctccccttcaaagagtccggccaagctaaaccagtccggcacctctgtggggaccgatgaagagtccgatgtgacacaggaggaggaaagagacggccagtacttcgaacctgtggtgccgctccccgatctcgtggaggtcagcagcggtgaagaaaacgagaaggtcgtgttctcgcacagagcagaactgtacagatacgacaaagatgttgggcagtggaaggaacgcgggataggagatattaaaatcctgcagaactatgacaataaacaagttagaatcgtcatgcgacgggaccaggtgctgaaactgtgcgcaaaccatactattacgccggacatgtccctgcagaatatgaaaggcactgaacgtgtctgggtgtggacagcctgcgactttgcggatggggagaggaaggtggagcacctggcggtgagattcaagcttcaagacgtcgccgacagcttcaaaaagatcttcgacgaggccaaaaccgcccaggagaaggacagcctaattactcctcatgtctcacgatctagcacacccagggagagcccctgtgggaaaatagctgtggcagtcctggaggagactacccgcgaaagaacagatgttattcaaggggacgacgtcgccgatgctgcctcggaggttgaagtgtcttccactagcgagacgactacaaaggccgtagtgagcccccctaaattcgtgttcggatccgaaagcgtaaagcgcatcttctcctctgaaaaaagcaaaccctttgcctttgggaactccagcgccacaggctcactgttcgggttcagcttcaacgcctcactgaagtccaacaatagcgaaacgtcttcggtggctcaatccggcagtgagtctaaagtggagcctaagaaatgtgaactgagtaagaatagtgatattgagcagagttccgactcgaaggttaagaacctgagcgcctcattccctatggaggagagttcgatcaattatacatttaaaacccctgagaaggaaccgcccttatggcacgctgaattcacaaaagaagaactcgtgcagaaactgagcagcacaaccaaatccgcggatcacctgaacggacttctacgcgaagccgaggcaacgtcagccgttttaatggagcaaatcaaattactgaaatccgagattcgaaggctggagaggaaccaggaacaggaagagtccgccgctaatgtggaacacctcaagaatgtgttgctccagttcatttttttgaagccaggtagtgaaagggagaggctcctgccagttatcaatactatgctgcaacttagtcccgaggagaaaggcaaactggcggctgtcgcccagggcgaagagtag

SEQ ID NO: 131716 - DNA, 5298 bp, synthetic construct
  misc_feature 1..5298: note = Description of Artificial Sequence: Synthetic coding sequence
  source 1..5298: mol_type = other DNA
atgcgacgcagcaaggccgatgttgagcggtatgttgcgtccgtgctgggcctgactccgtccccccgtcagaagtcaatgaaaggtttctacttcgctaagctgtattacgaagcgaaagagtatgacctggctaaaaagtatatctgtacctatatcaatgtgcaggagagggaccccaaagcccatcggttcctgggactgctgtacgagctcgaggagaacacagaaaaagccgtggaatgctaccgtcggagcgtggagctgaacccaactcagaaggacctcgttctgaaaattgctgagctgctgtgtaaaaatgacgtgactgacggtcgcgcaaagtattgggtggaacgcgccgccaaactgtttcccggatcgccagccatatataagctgaaagagcaactgttggactgcgaaggtgaggacggttggaataaactgttcgaccttatacaaagcgaattgtacgtgagacctgacgacgtacacgtgaacatcagactggtggaactgtaccgttctactaaaagactgaaagacgcagtggctcactgccacgaagctgagaggaatatcgccctccgctcctctctcgagtggaattcatgtgtggtgcagactttgaaagagtacctggaaagcttgcagtgtctggaatcagataagtctgactggcaggcgacaaataccgacctgttgctagcttacgcaaatcttatgctgctcacgctgtcgacaagggatgtccaggaaaaccgtgagcttctggaatcttttgattcagcgttgcagagcgccaagagctctctggggggcaacgacgagctcagcgcaacgttcctggagatgaagggccatttctatatgtatgccgggagcctacttttgaaaatgggacagcacggaaataatgttcagtggcgagcactgtccgagctcgcagccctgtgctaccttatcgctttccaggtgcctcgacccaagatcaaattaagagaggggaaagcaggccagaaccttctagagatgatggcttgcgatcggctctctcagtccggacacatgctgttgtcactgtccagggggaaacaggatttcctcaaagaagtggttgaaacctttgctaacaaaataggtcagtccgcgttgtacgatgctttattttcctcgcagtcaccaaaggataccagctttctgggatctgacgacatcggcaagatcgacgtgcaggaacccgagctcgaggacttggctagatacgacgtgggggccatcagagcccataatggttctctgcagcacctcacctggctcggcttacagtggaactcgctgcccgctcttcctggaatacggaagtggcttaagcagttgttccacaggctcccacacgagaccagcagactcgaaacaaacgcacctgagagcatatgcatcctggacctcgaagtgtttctgcttggcgtggtgtacacctcccatctgcagctgaaagaaaaatgcaactcacatcatagctcctaccagcccctgtgcctgccattcccggtctgcaagcaactttgcactgaaaggcagaagtcatggtgggatgccgtgtgcaccctcatccatcggaaagctgtgcccggcaatttggccaaactgagactgctagttcaacatgagattaataccttgagagcccaagaaaaacacggattacagccggcactgctggtgcactgggccaaatatctgcagaagacaggctcggggctgaactccttctacgggcaactcgagtacatcggacgctccgttcactactggaagaaggtcttacctctccttaaaatcatcaagaagaactccatccccgagccaattgacccgttgtttaaacatttccacagcgtggacattcaagcctctgagatcgtggaatatgaggaagacgcccatatcaccttcgccatgctggatgcagtgaacggtaatattgaagacgcagttactgcgtttgagtctataaaatctgtggtctcttattggaatctggcactgatctttcatcggaaggctgaggatattgagaacgatgccctctcccctgaagagcaggaggaatgccgaaattacctgactaaaacacgggactacctcatcaagattattgatgatggcgacagcaatctgagtgtggtcaagaagctgcccgtgcctctggaatcagtgaaacagatgctcaacagcgtcatgcaggagctggaggactattcggaggggggacctctgtataaaaacggctcgttgcgcaatgcagacagcgagattaagcactccacacccagccccacaaagtattccctctccccgagtaaatcttacaagtattcaccagagactccccctagatggactgaggatcgtaactctctcctgaacatgatctgccagcaagtcgaagctatcaagaaggagatgcaagagctaaagttgaactctagcaagagcgcgagccgccacagatggccgacagaaaattatggacctgactccgtacccgacggctatcaaggtagtcagacatttcatggcgctccgttaactgttgccactacaggtccgtctgtttattattctcagtctcccgcttataacagtcagtaccttctgagacctgcagcaaatgtcactccaacgaagggctcttctaataccgagtttaagagcactaaagagggattcagcatacccgtgtcagcagatggattcaagttcggaataagtgagccgggaaaccaggaaaaaaaaagagagaaaccactggaaaatgacactggatttcaagcacaggatatctctgggcggaaaaagggtcgcggcgtcatcttcggccagacatccagcacctttacatttgctgacgtagccaaatccacatccggcgaggggtttcagtttggcaaaaaggatctgaacttcaaaggatttagcggggctggggaaaaactgttttccagccggtacggcaaaatggctaacaaggcaaacacaagcggggattttgaaaaagacgacgacgcgtacaaaactgaggactccgacgatattcactttgagcccgtggtacagatgccggagaaggtggagttagtaacaggtgaagagggtgagaaagtgctctattcccagggagtgaagctgtttcgattcgacgcagaggttaggcagtggaaagagcgcggcctggggaacctgaaaatcctcaaaaacgaagtaaatggaaagctccggatgctcatgcgaagagaacaagttctaaaagtctgtgctaatcattggatcacgaccaccatgaacctcaagccactgtccggaagtgatagggcttggatgtggagcgccagcgatttcagcgacggcgacgctaagctggagcggctcgccgctaaatttaagacgccggagttggctgaggagttcaagcagaagtttgaggagtgccaacgcttactcctggacatcccactgcagacccctcacaaactcgtcgacaccggaagggcggcaaagctcatccagcgggctgaggagatgaaaagtgggctgaaggacttcaaaacatttttaaccaatgaccagaccaaggtgactgaggaggagaacaaggggtcgggaactggggctgctggcgcttccgacactacaattaagccaaatgctgagaacaccgggcccaccctggagtgggacaattacgacctgcgcgaggacgcactggatgactctgtctcctcaagctcagtgcatgcatcccctttggcatcatctccagtgagaaaaaacctcttccgtttcgatgagagtactaccggtagcaacttttctttcaaaagtgccctgagtttgtctaagtcaccagctaagttgaaccagtctggaacctctgttggcaccgatgaggaaagcgttgtgactcaggaggaggagcgggatggccaatattttgaacccgtggttcctctcccagatctcgtggaggtgtcttccggcgaggagaacgagcaggtggtcttcagccatcgcgctgaaatctatagatacgacaaggatgtcggtcagtggaaagaacggggcatcggtgatattaagatattgcaaaactacgataacaagcaggttcgaattgtgatgaggcgcgaccaggtcctgaagttgtgcgcaaatcatcgcataactccagacatgagtttgcaaaacatgaaaggcactgagagagtgtgggtctggacagcctgcgacttcgccgatggagaaaggaaggtggagcacttagccgtgagatttaagctgcaggacgtcgctgacagcttcaagaaaatcttcgacgaggccaagacagcacaggagaaagactccctgattaccccacatgtgtccaggagctctacaccgagggagtccccgtgcggcaagatcgccgtagcaattttggaagaaacaacgagagaaaggactgacgttatccaaggcgacgatgttgccgacgctgccagcgaagtggaagtgagtagcacctcggagactacaactaaagccgtggtcagccctcccaaattcgttttcgtgtccgagtccgttaaaagaatcttttcctctgagaagtccaagccttttgtgttcggaaactcgtccgctaccgggagtttatttggttttagcttcaatgcccccctcaaatcaaataatagtgagaccagctccgtcgcccaatccggaagcgagtctaaggtagagccgaagaaatgtgaactaagtaaaaactccgacatcgagcagagctcggacagtaaggtcaagaacctgtccgcgtccttcccgacagaggagtccagcatcaactacactttcaagaccccagaaaaggagcccccgctgtggcacgccgaattcacgaaggaagagctggtgcagaagctgagaagtacaaccaaatctgcagaccacctgaacgggctactgcgcgaaatcgaggcaactaatgccgtgcttatggaacagatcaagttactcaagtccgagatccgccgcttggagaggaaccaggagcgggagaaatccgcggctaatctagaatacctgaaaaatgtgcttctccagtttattttcttgaagccaggctccgagcgagagaggctactccccgtgatcaatactatgttgcagctttcaccggaggaaaagggaaagttggcagctgttgctcaggacgaagaagagaatgcaagtagatcctctgggtag

SEQ ID NO: 131717 - DNA, 2715 bp, synthetic construct
  misc_feature 1..2715: note = Description of Artificial Sequence: Synthetic coding sequence
  source 1..2715: mol_type = other DNA
atgcgccggagcaaggctgacgtcgaacgctacgtggcgtctgtactgggattaaccccgagtccgaggcagaagtctatgaaaggattttactttgccaagctctactatgaggccaaagaatatgacctggcaaagaagtatatttgtacctatattaacgtgcaggagagggacccgaaggcccaccgtttcctgggcctgctctatgagctggaggagaacacggagaaagcagtggaatgctaccgtagatcggtggaactgaacccaacacagaaggaccttgttctgaaaatcgccgagcttttatgcaaaaatgatgtaaccgatggccgggccaagtattgggtcgagcgcgccgctaagctttttcccggtagtccagctatctacaagctcaaggaacaactgctggattgcgagggggaggatggctggaataagctattcgatctcatacagtccgaactatacgtccgacccgacgacgttcacgtcaatatccgcttggtggaactttaccgcagtacgaagagactgaaagacgccgtggcccattgccatgaagcagagcggaatattgccctgcggtcgagcctcgagtggaacagttgtgtcgtgcagaccctgaaagagtaccttgagtcactgcagtgtcttgaatcagataagtccgattggcaagcaaccaatacagacttactgctcgcctatgcgaatctcatgcttctgacactctcaaccagggacgtgcaggaaaaccgcgagttgcttgagtcattcgatagcgcattacaaagcgccaaaagctctttaggcggcaatgatgaattgtccgctaccttcttggaaatgaagggacacttctatatgtacgctggatctttgctgttgaagatgggccagcacggcaataatgtgcagtggagggcattgtctgaactggccgccctatgctatctaatagctttccaggtacctcgaccaaagatcaaattgagggaggggaaggctggacagaaccttctggaaatgatggcttgtgatcggctctcacagagcgggcatatgctgctcagtctaagccgaggtaagcaagatttcctgaaggaggtcgttgagacttttgccaacaagattgggcaaagtgccctgtatgatgccctcttcagttcacagtctcctaaggatacctccttccttggtagcgatgatatcggaaagatagatgtccaggagcctgaactggaggacctggctaggtatgatgtgggggcaattcgcgcacacaatggctccttgcaacacctgacttggctgggactgcaatggaatagtctaccagctttacccggcatcagaaaatggctgaaacagctctttcaccgacttccccacgagaccagcagactcgaaaccaacgcacctgagtcgatctgtattttagacctagaagtcttcttgctgggggttgtgtacactagtcacttacaattaaaggagaaatgcaattcccatcattcgtcttaccaacccctgtgtcttccatttcccgtttgcaagcagttgtgtacagagagacaaaaatcctggtgggatgccgtgtgtacactgatccaccgcaaggcagttcccgggaatttagctaagttgagattgctggtccagcacgagatcaacaccctgcgggcccaggaaaagcatggattacagccggccctgttagtccattgggcgaaatacctccaaaaaacaggttctgggctcaattcattctacgggcagctcgaatatattggccgcagcgtccattattggaaaaaggtcttaccactccttaagatcatcaagaaaaattctatcccggaacctatcgaccccctatttaagcacttccacagtgtggatattcaagcctccgagatcgtggaatacgaggaagacgcccacatcactttcgccatgttggatgctgtgaatggcaacatagaggacgctgtgacagcatttgaaagcatcaagagcgtggttagttactggaacttggcccttatttttcatagaaaagcggaagacatcgagaacgatgctctatccccagaagaacaggaagaatgccggaactacctgacaaaaactcgtgactatctaattaaaatcattgatgatggtgattcgaacctgtctgtggtcaaaaaattgcctgtgccgcttgagtccgtgaaacagatgttaaattctgtgatgcaggagctggaggactactcagaaggcggacctctttacaagaatggatcactgcggaacgccgacagcgagattaaacatagcaccccctctccaacgaagtactccctgagcccaagcaagtcatataaatacagccccgagaccccgccccgttggactgaggacaggaattccctgcttaatatgatctgtcagcaggtggaagccatcaaaaaagagatgcaggagctcaagttgaacagcagtaaaagtgcatcccggcacaggtggcctaccgagaactacggaccggattcagtgccggatgggtaccaaggatctcagacatttcatggagcacccctcaccgaagccgctcatcggcacttcactatcgagaaacacggggactcaaagtggatcatttaccggtttactaagcaactctgcggaactgagagagctagggcgaagatttcatag

SEQ ID NO: 131718 - DNA, 459 bp, synthetic construct
  misc_feature 1..459: note = Description of Artificial Sequence: Synthetic coding sequence
  source 1..459: mol_type = other DNA
atgtggtctggcacgtctccaaggtgctgggtgtccccacgcagactggaccgctacatttgcacctatattaatgtgcaggagagagaccctaaagcccacagattcttggggctgctctatgaacttgaggagaacacagaaaaggctgtggaatgttacagaagatccgttgaactaaacccaacacagaaggatttagtcctgaaaatagccgagttgttgtgtaagaacgatgtgacagatgggcgggctaagtactgggtcgaacgcgcagccaagctgtttcccggctcccccgccatctataaactcaaggagcagctgctggattgtgaaggcgaagacggatggaataaactattcgatctcattcagtccgagctatacgtgcgccccgatgacgtgcatgtcaacataaggctcgtcgagctgtaccgatctaccaagcggctgtag

SEQ ID NO: 131719 - DNA, 2715 bp, synthetic construct
  misc_feature 1..2715: note = Description of Artificial Sequence: Synthetic coding sequence
  source 1..2715: mol_type = other DNA
atgcgaaggagtaaggccgacgttgagcgatacgtagctagtgtgctggggctgaccccatccccccgccagaaaagtatgaaggggttttactttgctaaactatattacgaagcgaaagaatacgatctagctaaaaaatatatttgcacctatattaacgtccaagagcgagaccccaaagcacatcggttcctgggcctgctctacgagctcgaggagaacactgagaaagccgtagaatgttacaggcgtagcgtggagctcaacccaactcagaaagatctggtgcttaagatagctgagttactctgtaagaacgatgtgaccgacggccgggctaagtattgggtggagcgggcagcgaagctgttccccggatcaccagccatctataagctgaaggagcagttgctcgactgcgaaggcgaagacggttggaacaaactctttgacctgattcagagcgagttatacgttaggcccgatgacgtgcatgtcaacatccggcttgtagaactgtacagaagcacaaagcggttaaaggatgccgtcgcccactgtcacgaggcggaaaggaatattgcactgaggagcagcctagagtggaatagctgcgtggtccaaacactcaaagagtatctggagtctctacaatgtttggagtcggataaatcagactggcaagcgactaacacagatctcctgctcgcgtacgctaacctgatgttgttgaccttgtccacacgggacgtgcaagagaaccgggagcttctagaatcttttgattcagctctacaaagcgccaaatcatcacttggcgggaatgatgagcttagcgctacgttcctggagatgaagggccatttctatatgtacgccggcagtctgttgctcaagatggggcaacacggaaataacgtacagtggagggccctctctgagctggcagcactttgctatcttatcgcatttcaggtgcctaggcccaaaataaagttaagggagggaaaagccggtcagaatttgctagaaatgatggcatgcgaccgcctctcccaaagtggacacatgctgctcagcctcagcaggggcaaacaagattttttgaaagaggtggtggaaaccttcgctaataagattggacagtctgccctttatgacgccctatttagctctcagtctccaaaggatacttcattcctcggctctgacgatattgggaaaatcgacgtgcaggagcccgagctggaggatctagctcggtacgatgtgggcgccatacgcgcccataatggctcccttcagcatttgacttggctcggccttcagtggaatagcctgcccgcactacctgggatacggaagtggttgaagcagctctttcaccgactccctcatgagacatccagactggagaccaatgcaccagagtcaatctgtattctcgatctagaggtgttcttactgggagtggtgtacacctctcacttgcagctgaaggagaaatgtaatagccatcattcctcctaccagcctctgtgtttgcccttccctgtctgcaagcagctctgcacagaacgccagaagtcctggtgggatgccgtctgtacactcatccaccggaaggcagtccctgggaatctcgccaagctgagactgctcgtgcagcacgaaatcaataccctgcgggcccaagagaagcatgggctgcagccagcacttctggtccactgggcaaagtatttacagaagacaggatctggcctcaattccttctacgggcagcttgaatatatcgggcgatcagtccattattggaaaaaagtcctgcccctgctcaaaatcatcaagaagaattctatccctgagccaattgaccccctgtttaagcacttccattccgttgatatccaggcatcagagatcgttgaatacgaagaagacgcacacattactttcgctatgcttgatgcagtgaatggaaacattgaagatgctgtcacggcattcgagtctattaagtccgtcgtgtcttactggaacttagcactcatttttcaccgaaaggccgaggacatagaaaacgatgctctgagccccgaagaacaggaagaatgtagaaattacttaaccaagacccgggattatctgattaaaatcattgacgacggcgactccaacttgagtgtcgtaaaaaaattacccgttcccctagaatctgtaaagcagatgctcaactcagtcatgcaggaactcgaggattatagtgagggtggcccactctacaagaacggatccctgagaaatgctgacagtgagataaagcattcaacccccagcccaaccaagtacagcctttcacctagtaaaagctacaagtactctccagaaaccccccctcgctggaccgaggacaggaactccctactaaacatgatttgccaacaggttgaggccataaaaaaagaaatgcaggagttgaaacttaatagctctaagagcgcctcccgccacagatggccgacggagaactacgggcctgactctgtgcccgacggataccaagggtcccaaacttttcatggggctcccttgacggaggcggcccataggcacttcaccatcgagaaacacggggattcaaagtggattatctaccgtttcacaaaacagctgtgtggcaccgaaagggctagagccaaaatcagctag

SEQ ID NO: 131720 - DNA, 5298 bp, synthetic construct
  misc_feature 1..5298: note = Description of Artificial Sequence: Synthetic coding sequence
  source 1..5298: mol_type = other DNA
atgaggcgctcgaaggcggatgtggaaaggtacgtggcatcagtgttgggtctaacaccatcgccacggcagaagagcatgaaaggattttatttcgctaagctatattatgaagcgaaggagtatgatttggccaaaaaatacatatgcacttatatcaacgtccaggagagggaccccaaggcacaccgattcctaggtctgttatacgaactggaggaaaatactgagaaggccgtggaatgttatcgaaggagcgtggagctgaatcccactcaaaaggatctggtcctcaagatcgccgaacttctttgcaaaaatgatgttaccgacggccgggctaagtattgggtggagcgggccgccaaactgtttcctggctcacccgccatatataagctgaaggaacagctgctggactgtgagggggaagatggatggaacaaacttttcgaccttatccagtcagagctgtacgtgagacccgacgacgtgcatgtcaatatcagactagtcgaactgtatagaagcacaaaacgtttgaaggatgctgtggcgcattgtcatgaggctgagcggaacattgcactgaggagtagcctggagtggaattcctgtgttgtgcagacactcaaggagtatctcgagagcctccagtgtcttgagagtgataaatccgactggcaggctactaatacagatctgttactcgcttacgccaacctgatgctgcttaccctgtccactcgtgatgttcaagaaaaccgcgaactgttggaatcattcgacagtgctctccagtctgctaaatcgtctctggggggcaatgacgagctatccgctacctttttggagatgaagggacacttctacatgtatgccgggagcctgttgcttaagatggggcagcacgggaacaacgtccaatggcgggccctgtctgaactggccgccctgtgttacctgattgcatttcaggtccccaggcccaaaattaagctgcgcgagggcaaagccggccaaaatctgcttgaaatgatggcctgcgacaggctgagccagagcggccacatgctgctgagcctaagccgcggcaagcaggactttctgaaggaagtggtcgagacttttgcaaacaagatcggacagagcgcgctatacgacgccttgtttagctcgcaaagccctaaggatacctctttccttggatctgacgatatcggcaaaattgacgtccaggagcctgaactggaggacttagcgaggtacgatgtcggggcaatccgggcgcacaacggcagtctccagcacctcacgtggctgggcctacagtggaatagtctgcctgcattacctggtatacggaaatggcttaagcagctgtttcaccgcctccctcatgaaacctccaggcttgaaactaacgccccagaatctatctgtatattggatcttgaagtgttcctgctgggtgtcgtttacaccagtcaccttcagttgaaggagaagtgcaactctcaccactcctcctaccagcctctttgcttgccattccctgtctgtaaacagctgtgcaccgaacgtcagaaaagctggtgggatgccgtgtgtactctgatacacagaaaagccgtaccagggaacctcgctaagctccgacttctcgttcagcacgagatcaatacacttcgcgcccaggagaaacacgggctgcagccggccttgctcgtgcattgggccaagtatcttcagaaaacagggtctggcctaaactccttttacggacagctggagtacatcggtagatctgtgcactactggaagaaggtgctcccattgctcaagattatcaaaaaaaattccatcccagaaccaattgatccattgttcaagcactttcactccgtcgacatccaggccagcgaaatcgttgagtatgaagaagacgcccacatcacatttgccatgctcgacgccgtaaatgggaacatcgaggacgcagttaccgcatttgagagcatcaaatccgtagtgtcttactggaacttggctttaatcttccataggaaggctgaggatattgagaacgatgctttgtctccggaggagcaggaggaatgtcggaactacctcacgaaaactagagactacctaatcaagatcatcgatgacggagactccaatctgagtgttgttaagaaactgcctgttcccctggagagcgtgaaacagatgctaaatagcgttatgcaagaactggaagactattcggaaggcgggcctctgtataaaaatgggtctctgcgcaacgcggattctgagataaagcatagtaccccctctcctactaagtattctttgtcccccagcaaaagctacaagtacagccctgagacaccccctaggtggaccgaagaccgaaattccctgctgaacatgatctgtcaacaggtggaggcaattaagaaagaaatgcaggagttaaaactaaactcttcgaaatcggcttcacgccaccgctggcccacagagaactacggcccagactccgtgcctgacggataccagggaagccagacatttcacggcgccccactaaccgtggccaccactgggccttcagtttattattcccagagccctgcatacaattcccagtacctactgcgccccgcggcaaatgtgacgcccacaaagggctcctctaacacagaattcaagagcaccaaagaaggcttttccatccccgtttccgcagacgggtttaaatttggcatatctgaacctgggaaccaagaaaagaaaagggaaaagcctctggagaatgacacgggcttccaggctcaggacatctccggacgaaaaaaggggaggggagtgatattcggtcaaaccagctcaacttttacttttgcagacgtggcaaagagcacaagtggcgaggggtttcagttcggcaagaaagatcttaactttaagggtttctccggggccggtgaaaagctcttttcatcacggtatggcaagatggcgaacaaggccaacacatccggggatttcgaaaaggacgatgatgcctacaaaactgaagactctgacgacatccatttcgagcccgtggtccagatgccagagaaggttgagttggtcacaggggaagagggcgaaaaagtactctactcgcagggggttaagcttttccgtttcgatgctgaagtaagacaatggaaggagaggggcctcggcaatctgaagattctgaagaatgaggttaacggtaaactgcggatgctcatgcgcagggaacaagtgcttaaagtgtgtgcgaatcactggatcaccactactatgaacctcaaacctctgagtggctctgatagagcctggatgtggagcgcttccgatttttccgacggtgacgcaaagcttgagcggctggccgctaagttcaagacaccggagctggctgaggagttcaagcagaaatttgaggaatgccagcgactccttctcgatatccccttacaaactcctcacaaactcgtggatactggccgagcggccaagttaatccaacgcgctgaagaaatgaagagcgggcttaaagacttcaagacgtttcttacaaacgatcagaccaaagtaactgaagaagagaacaaaggatcaggaactggggctgccggcgcgtccgatacgactatcaagcctaatgcggaaaacactggcccgaccctggagtgggataattatgatttgcgcgaggacgccctggatgattcagtgtcatctagcagcgtgcacgcctcccctctggcaagctcccccgtgaggaagaatcttttcaggtttgacgagagcaccaccggatcgaacttcagtttcaaatctgcgttaagcctctccaaatctcctgcgaaactcaatcagtctggcacttctgtaggcaccgatgaggagagcgtcgttacacaggaggaagagcgtgacggacagtactttgagcctgtagtgcctctccctgaccttgtggaagtcagttccggtgaggaaaatgaacaagtcgtgttttctcacagggcagaaatttatcgctacgacaaggacgtaggacaatggaaggaacgagggatcggagatattaagatattacagaattatgacaataagcaggtgaggatcgtgatgcgccgggatcaggtgttgaaactgtgcgctaaccatcgaatcactcccgacatgagcctccaaaatatgaaggggactgagagagtttgggtctggaccgcatgtgactttgctgatggagagcggaaggtcgagcatctggcggtgagattcaaactgcaggacgtggctgattcgtttaaaaaaatcttcgatgaggccaagaccgcgcaagaaaaagactccttgattactcctcacgtctcccggtcgtcaacccctcgggaaagcccttgcgggaaaatagctgtggccatactggaagagaccaccagagaacggactgacgtaattcagggcgacgacgtggcggatgccgctagtgaagtggaggtttcctcaacatcggagaccacaactaaggctgtcgtctctcccccaaagttcgtcttcgtgagcgaatctgtcaaaaggatctttagctccgaaaagagcaaaccttttgtgtttggcaactccagtgccaccggctccttgtttgggttctctttcaacgcccctctaaagtccaataattccgagacctcttccgtggctcaatcgggatccgaatcaaaagttgagccaaagaaatgcgaactgagtaagaactctgacatcgaacagagctctgatagtaaggtgaagaatttatcagcctcatttccaaccgaagagtccagcataaactacacattcaaaactcctgagaaggaacctccgctgtggcacgctgagtttacaaaggaggaactggtgcaaaagttgcgttccacgaccaagtcggcagaccatttaaatggacttctgcgcgaaatcgaggccaccaatgcagtcctcatggagcagataaagcttctcaaatccgagatccgccgcctcgaacgtaatcaggaaagggaaaagtctgcagccaacctagagtatttgaagaatgtactgctccagtttatatttctgaaacccgggtccgaaagagagcgacttctgccagttatcaatacgatgctccagctgagccctgaagagaaggggaaactcgccgcggtggcgcaagacgaagaggagaatgcgagcagaagctcaggttag

SEQ ID NO: 131721 - DNA, 2715 bp, synthetic construct
  misc_feature 1..2715: note = Description of Artificial Sequence: Synthetic coding sequence
  source 1..2715: mol_type = other DNA
atgaggcgttcaaaggcagacgtggagcgatatgtcgctagcgtgctcgggttgacaccctctccacggcaaaagagcatgaaaggtttctactttgcaaagctgtactacgaagccaaggaatatgacttggcaaagaagtatatttgtacatatatcaatgtccaagagcgggatccaaaggcacataggttcctgggccttttgtacgaattggaggagaacaccgaaaaagctgtcgagtgctatcggaggtctgtagaacttaacccaacccagaaggatctggtactgaagatcgcagagttgctttgtaagaacgatgtcacggacggaagggcaaaatactgggtggaacgagctgcgaagcttttccccgggtccccagcaatctacaagctgaaagagcagctcctcgactgtgaaggggaggatggatggaacaaactgttcgacctgatccagtcagagctctacgtaaggccggacgatgtgcacgtgaatatccgactcgttgaactctacagatccaccaagcgattgaaggatgcagtagcacattgtcatgaagccgaacggaacatagcactcaggtcttcattagagtggaatagctgcgtggtgcagacactgaaggagtatctagagtcactgcaatgtctcgagtctgataaaagtgattggcaggctacaaacaccgacctgctacttgcctatgccaacctcatgctcttgactcttagtactagagacgtgcaggaaaaccgagaacttctggaaagcttcgactccgcccttcagtctgcgaaatcgtctcttggaggcaacgatgaactgtccgccacatttttagaaatgaagggtcacttctacatgtatgcaggtagcctgcttctgaaaatggggcagcacggtaacaacgttcagtggagggccctcagtgagctagctgcactctgctacctcattgcctttcaagtgcctaggcccaagatcaagctcagagaaggcaaggccggccagaatctgctcgagatgatggcctgtgaccggctttcgcaatctgggcacatgctcttgtctctcagtaggggcaagcaggatttcctcaaggaagttgttgagactttcgcaaacaagattggtcagtctgccctttacgacgcacttttcagtagtcagagcccgaaggacacttcttttcttggatctgacgatatcggtaagattgacgtgcaagagccagagctggaggacctcgctcgttatgacgtgggggccattcgggcccacaacggcagcctgcagcatcttacctggctggggctgcagtggaactcactccctgcgttgcccggtataaggaagtggctaaaacagctgttccaccgtttgccacacgagacctctcgccttgagaccaacgcccctgagagcatctgcattctagatctggaagtgtttcttctgggagttgtctacacaagtcaccttcagctgaaggagaaatgtaactcacaccattcatcatatcagcctctctgtctcccctttccagtctgcaagcagctgtgcaccgaacgccagaagtcttggtgggatgccgtctgcacactgattcacaggaaggcagttccaggaaatctcgcaaaactgcgcctgctcgtacagcatgagattaataccctgcgcgcccaggagaaacacggactccagcctgctctgctcgtccactgggccaaatatctgcaaaagaccggctctggcctgaactctttctatggccagctggaatatataggcaggtccgtgcactactggaagaaagtgcttccactattgaagatcatcaaaaagaatagcataccagagcccatagatccgttgtttaagcattttcacagcgtggatatacaggcttccgagattgtcgagtatgaagaggacgctcacattacatttgccatgctcgacgcagtgaacggtaatatcgaggacgccgttaccgccttcgagtctattaaatcggtggtgagttactggaatttggctctcatcttccatcggaaagcagaggatatcgaaaatgacgctctgtcgccggaagaacaggaggagtgtaggaattatttgactaaaacgagagattaccttattaaaatcattgacgacggcgactcaaatctgtccgtcgtgaagaaattgcccgtccctctcgagtctgtgaaacagatgctcaactctgtgatgcaggaactggaggactactctgaggggggtcctttgtataaaaacgggtccttgagaaacgccgacagcgaaatcaagcacagcactccctcaccaaccaaatactccctgtccccatccaaatcctataaatatagtcccgagactcctccaaggtggactgaagaccgcaactccctactgaatatgatatgccagcaagtcgaggcaatcaaaaaagaaatgcaggagctgaaactgaactctagtaagtcagcctctagacacagatggccaaccgagaactacggccccgactctgtaccggatggatatcagggaagccagacttttcacggggcgccactcacagaggccgctcaccgccacttcaccattgaaaaacacggagactcaaaatggattatttaccggttcacgaagcaactgtgcggcaccgaaagagcgcgcgcgaaaattagctag

SEQ ID NO: 131722 - DNA, 5298 bp, synthetic construct
  misc_feature 1..5298: note = Description of Artificial Sequence: Synthetic coding sequence
  source 1..5298: mol_type = other DNA
atgcgcaggtccaaagcagacgttgagcgatacgtggcttccgtgctgggcctcacaccttcacctagacagaagagcatgaagggattctactttgctaagctgtactacgaagccaaggaatacgatcttgccaagaagtacatatgtacctatataaacgttcaagaaagagaccccaaagcgcaccgcttcctaggcttgctctacgagttagaggaaaacactgagaaagccgtcgagtgctatagacgctccgtcgaactgaacccaacacagaaggaccttgttctcaagatcgctgagctcctgtgtaagaatgacgtgacggacgggagggcaaagtactgggtcgagagggcggccaaactgttccccggctctcctgccatctacaaattaaaagagcaattgctcgactgtgagggcgaagatggttggaacaagctttttgatctgattcagtctgaattatacgttcgcccagacgatgtacatgttaatatccggcttgttgaactataccggtccaccaagcggctgaaggatgctgtggctcactgccacgaggctgaacggaacatcgccctgcgatcttccctggaatggaactcttgtgttgtccagacactgaaggaataccttgagagcctccagtgcctcgagtctgacaagtccgactggagagcgacaaatactgacctgctgctggcatatgccaatctgatgcttctcacactttctacacgcgatgtacaagaaaatcgggagctcctcgagtcctttgacagcgcccttcagagtgctaagagctccctgggcggaaacgatgagctgtcggcaaccttccttgagatgaaggggcatttttacatgtatgccggatctctcctgctcaaaatgggtcagcacggtaacaacgttcaatggagggccctctctgaactggctgccttatgttatttgattgcctttcaggttccccgccccaaaatcaagctgcgtgaggggaaggcaggccaaaacctcctcgagatgatggcatgcgacaggctcagccagtccggccatatgctgctgtctctcagtcgggggaagcaggactttttgaaagaggtggtcgagacgtttgcaaacaagattggccaatcagctctctacgacgcgctgttctcgtctcagagcccgaaagatacttctttcctgggcagcgacgacataggaaagatcgatgtgcaggagcctgaactcgaagacctggcacgttacgatgtgggagctatcagggctcataacggatctttgcagcacctgacctggctgggcctgcagtggaactccttacctgccttgcctggtataaggaagtggttaaagcagctgttccaccgccttccgcatgagacctctcgcctggagacgaacgcccccgaatcgatctgcattctggacctggaggtgtttcttttgggggttgtgtatacgtctcaccttcagctcaaggagaagtgcaacagccatcactcctcctaccagccgctgtgcctgccctttccggtgtgcaagcagctgtgtacggagcgccaaaagagctggtgggacgcggtttgtactttaatccacaggaaagcggtcccgggcaaccttgcaaagctgcggcttctggtgcagcatgagatcaatacacttagagcccaggagaagcacggactccagccggctctactcgttcactgggctaagtatcttcagaagacaggatcaggccttaactctttttacggacagctggagtacataggacggtcagtacattattggaaaaaagtgctgccccttctgaagatcatcaagaagaattccattcctgaaccgattgatcctctcttcaagcattttcactctgtggacatccaagcatctgagatcgtagagtacgaggaagatgcacatattactttcgccatccttgacgccgtgaatgggaacatcgaggacgccgtgaccgccttcgagtcaatcaaatccgtagtgagctactggaaccttgccttgatcttccatcgaaaagcggaagatattgagaacgatgcactttctccagaggagcaggaggaatgccggaattatttgacgaagactcgggactatctcatcaagatcattgacgacggcgattctaatctctctgtggtcaaaaagttaccggttcccctcgagtccgttaagcagatgctgaactctgtaatgcaggaactggaggactatagtgaaggaggccctctgtacaagaacggttctctgagaaatgccgactcagagattaaacactcaacaccaagccctaccaaatactccctctccccctccaagagctacaaatactcaccggagacccccccacgttggacagaagatcgaaactcccttctcaacatgatatgtcagcaggtggaagcgattaagaaagagatgcaggagctgaagcttaacagctcgaaatcagccagccggcatcgatggcccacagaaaactacggcccagattcagtgccagacggataccaaggcagccaaactttccacggtgctccacttactgtggctaccacagggccttccgtctactatagccaatcacccgcttataactcacaatacctcctacgtcccgctgctaacgtgacaccaacaaaaggcagctccaacaccgagtttaaatctaccaaggaaggtttctcaattcccgtttctgctgacggctttaaatttggtatctcggagccaggcaaccaggagaagaagcgggagaagcccctggagaacgacacggggcttcaggcccaggatatccgggggcgcaaaaagggacggggggtgattttcggccagactagctcaacatttacatttgccgatgtcgctaaatccacaagcggagagggctttcagttcggcaagaaggatctgaactttaaaggtttctccggggcaggtgaaaaactcttttccagcaggtatggaaaaatggcaaacaaggcgaacacttctggagacttcgaaaaggacgatgatgcttacaagaccgaagatagtgatgacatacacttcgaacctgttgtccagatgcctgagaaggtggagctcgtgactggcgaagagggcgagaaggtgttgtattctcagggggtcaagctctttcgcttcgacgccgaggtgcgtcaatggaaggagcgggggcttggtaatttgaaaatccttaagaatgaggtgaatggcaaactccgcatgcttatgcggcgggagcaagtcctcaaggtgtgtgcaaatcactggattaccactacaatgaacctgaaacctctcagcggaagcgatcgtgcatggatgtggtccgcctccgacttttcagacggggatgcgaaacttgagcgtctggccgctaagttcaagacacccgagctcgctgaagagttcaagcagaaattcgaggagtgccagagactattgctggatataccattacagactccgcacaagctggtggatactgggagagctgccaagctgattcagcgcgccgaggagatgaagtctgggcttaaagacttcaaaacattcctgactaacgaccagacaaaggtgactgaagaggaaaataagggcagtggaacaggtgtagctggagcttctgacacaacgataaagccaaatgcggagaataccggaccgactttggaatgggacaactacgatttaagggaggatgcccttgacgacagtgtgagcagctctagtgtgcatgccagtcctctggcatcctccccagtccggaagaatctattccgtttcgatgagagcacaaccggatccaactttagctttaaaagtgctttatccctctccaagtctcccgccaagctgaaccaatcaggcacttctgtcggcacggatgaagaatcagtcgtaacacaagaggaggagcgagatggccaatacttcgaacctgtcgtacctctgccggatctggtggaggtgtcctctggcgaggagaacgagcaagtcgtattcagccaccgggctgagatctatcgatatgacaaggatgtcggccaatggaaagagagaggcatcggtgacatcaaaattcttcagaactatgataacaaacaggtgagaatcgtaatgagaagggatcaagtgctgaaactctgcgccaatcaccggatcacacccgatatgtctctccagaacatgaagggcactgaaagagtgtgggtatggacagcatgcgatttcgccgacggggagcggaaagttgagcacttagcagtacgatttaaacttcaggatgtggcagacagttttaaaaaaattttcgatgaggctaagactgctcaggagaaagactcattaataacaccacacgtgagtagatcatccacacctcgagagagcccttgcgggaagatcgctgtggcagtgctggaggagataactcgcgagcgtaccgacgtcattcagggtgatgatgttgccgatgccgcatctgaggtggaggtgagttcaacctccgagacaacgaccaaggccgtcgtgagtccgcctaaattcgtgtttgtctcagagtcagttaagcggatcttctcatcagaaaaatccaagccctttgcctttggcaactcctcagctaccggctcattgttcggcttctcatttaatgcccccctgaaatcaaataacagtgaaacatcatccgtggcccagtcaggctctgagtcaaaggtagagcctaaaaaatgtgagctgtccaaaaacagcgatatcgagcagtcttcggactcaaaggttaagaacctttcggccagtttccccaccgaggagagctccatcaattacaccttcaagacccctgaaaaggagcccccattgtggcacgccgagtttaccaaggaagagctggtgcagaagttgcgctccacaacaaaatccgcggaccacctgaatggtctgctccgcgagattgaggccactaacgcggtcctgatggaacagattaagctgctgaagagcgaaatccggagactagaaagaaaccaggagagggaaaagtccgcggcaaatctggagtacctgaagaacgtactgcttcaattcatcttcctgaagccggggtcggagcgggagagactcctcccggtaataaacactatgctgcaattaagccctgaagagaagggcaagctggccgctgtcgcccaggatgaggaagaaaatccttcgaggtcatctggatag

SEQ ID NO: 131723 - DNA, 1407 bp, synthetic construct
  misc_feature 1..1407: note = Description of Artificial Sequence: Synthetic coding sequence
  source 1..1407: mol_type = other DNA
atggggactgctacgcccgatggcagagaggatcaggagaggctctgggtctccgtcgaagatgcccaaatgcacaccgtgactatatggctgacagtacgccctgacatgactgtagcatcgctcaaggacatggtgtttcttgattacggttttccccctgtgttgcaacagtgggtcattggtcaaaggttggcacgcgaccaggaaacactgcactcacacggcgtaaggcagaatggggactcggcctacctgtatctgctgagtgccaggaacacatcccttaacccccaggaactgcagcgagagaggcagctccgcatgctggaggacttaggatttaaggatcttacattgcaaccgcggggtcctcttgagcccggtccgcctaagcccggggttcctcaggagccaggaagggggcagccagacgctgtccctgagccacctccagtgggatggcaatgcccgggctgcacattcattaacaaacctacaaggccagggtgtgagatgtgctgcagggctcggccagaggcatatcaggtgcccgcctcgtatcaacctgacgaagaagaacgagcccgcctcgccggagaggaagaggcacttagacaataccagcagcggaaacagcaacagcaggagggcaattaccttcagcatgttcaactggaccagcggagcttagttttaaataccgagcctgccgagtgccctgtttgttattctgtcctcgcgccaggggaggctgtcgtgcttcgtgaatgcctgcatacgttttgccgtgaatgccttcagggcacaattcgcaacagccaggaagccgaggtatcgtgcccgtttatagacaatacttactcatgctcaggaaagttgctcgagagagagatcaaagccttactgacccccgaagattaccaacgtttcctcgacttaggaatctctatagctgaaaatcggagcgctttttcctatcattgcaagacacccgactgcaagggatggtgcttcttcgaagacgatgttaatgaatttacttgtccagtttgttttcacgtgaactgtcttttatgtaaagctatccatgagcaaatgaattgcaaggaataccaggaggatctcgctttgcgcgcacagaatgacgtagcggccagacaaacaaccgagatgctgaaggtgatgctccagcagggtgaggccatgcgctgccctcagtgccagatagtcgtgcagaagaaggacggctgcgactggatccgctgcactgtctgccacaccgagatctgctgggtgactaaggggcctagatggggacctggcggcccaggcgatactagtggggggtgccggtgcagagttaatggcatcccttgtcacccatcctgtcagaactgccactag

SEQ ID NO: 131724 - DNA, 1533 bp, synthetic construct
  misc_feature 1..1533: note = Description of Artificial Sequence: Synthetic coding sequence
  source 1..1533: mol_type = other DNA
atggatgaaaaaacgaaaaaggccgaagagatggcactctcactgaccagggcagtagccggcggcgacgagcaggtcgcaatgaagtgtgcgatatggcttgccgaacagagagtcccactgagcgtgcagctgaagcccgaggtgagccccacacaggatattcgattgtgggtgtccgtagaagacgctcaaatgcacactgttaccatctggcttacggtgaggcccgatatgaccgtcgctagcttaaaggacatggttttcctggattacggattccctccagtactgcaacagtgggtgatcggtcagcgcttggcaagagatcaagagactctccacagccatggggtgagacagaacggcgactccgcttatttataccttctgtccgcacggaatactagtctgaatcctcaggaacttcagcgtgagcgtcagctcagaatgctcgaagaccttggatttaaggacctcaccctgcagccgagggggcccctggagccgggtcctcctaagccgggggtccctcaggagcctggaagagggcagcccgatgctgttcccgagcctcccccggtggggtggcaatgtccagggtgtacctttattaacaagccaactcgccccggttgtgagatgtgctgtcgggctcgtccggaagcctaccaggtgcccgcaagctaccagcctgatgaagaagagcgggcacggttggcgggcgaggaagaggcgctgcggcagtatcagcagcgtaaacagcagcagcaggagggcaactatctccagcacgtacagctggatcagagatccctcgttctcaatacagaacctgcggaatgcccggtttgttactcagtgctggcgcctggcgaagccgtggttcttagggaatgcttacacacattttgtagggagtgtctccaaggaacaattcggaacagtcaggaagctgaagtcagctgcccattcattgacaacacctactcatgcagtggtaagctgctggagcgggaaataaaggccctcctcacacccgaggattaccagagatttctggatcttggcatatcaatcgcagagaacaggagcgctttcagttaccactgcaagaccccagattgtaaggggtggtgcttttttgaggacgacgttaacgaatttacttgcccggtgtgttttcatgtcaactgtctgctctgtaaggcaatccacgaacagatgaattgtaaagaatatcaagaggacttggccctgagggcccaaaacgatgtggctgcccggcagaccacagagatgctaaaagtgatgctacagcagggagaagcaatgagatgtccacagtgccagattgtggtgcagaagaaggacgggtgtgactggatcaggtgcaccgtgtgtcatactgagatttgctgggtgaccaaggggccgagatgggggcctggtggacccggggacacatcaggaggctgcagatgtagagtgaatggcattccgtgccatcccagctgtcagaactgtcattag

SEQ ID NO: 131725 - DNA, 1011 bp, synthetic construct
  misc_feature 1..1011: note = Description of Artificial Sequence: Synthetic coding sequence
  source 1..1011: mol_type = other DNA
atggacgaaaaaacaaagaaggcggaggaaatggccctgtcactgactcgagcagtggctggcggggatgagcaggtggccatgaagtgcgccatatggctcgctgaacaaagagtgccactcagtgttcagttgaagcctgaggtgtctcccacccaagatatccgcctttgggtgtccgtggaagacgctcagatgcatacggtcaccatctggttgaccgtcaggcccgacatgaccgtcgcttcgctgaaggatatggtcttcttagattatggcttcccgcccgtccttcagcagtgggtcatcgggcaacggctcgcacgggatcaggagactcttcattcccatggagttaggcagaacggtgattcagcttatctgtacttgctttccgctaggaacacctctctgaacccccaagaactacaacgggagagacagcttaggatgctcgaggatctgggattcaaagatctgacgctgcagccccggggccctctcgagcccggtccgcccaaacccggcgtgcctcaagaacctggaaggggccagcccgacgcagtcccggaacctccacctgtagggtggcaatgtcccggctgtacattcattaacaagcctaccagacccggctgtgaaatgtgttgtcgggctagacccgaggcttaccaggtccccgcttcttatcaacctgatgaggaggaacgagcaagactggccggggaggaagaggctctccgtcagtaccagcagcgcaagcagcagcagcaggagggaaattaccttcagcacgtccagttagaccagaggtcactggtgctgaatactgaacctgccgaatgtcccgtgtgttattcagtcctcgccccgggcgaggctgtggtccttcggtccgcctgtagggcaccatcagccaccgctagacgaaggcggagcccagctccctcactcacaacccccacgcgggcaagggctagctgctggaggggaagaagccgaaggtcctag

SEQ ID NO: 131726 - DNA, 792 bp, synthetic construct
  misc_feature 1..792: note = Description of Artificial Sequence: Synthetic coding sequence
  source 1..792: mol_type = other DNA
atggatgagaagaccaaaaaggccgaagagatggccttgagcctgacacgggcagtggctgggggggatgaacaggtcgcaatgaagtgcgctatctggcttgcagagcaacgggtgcccctctctgtgcagctcaaaccagaagtctcacccacccaggatataaggtccaggggggagaagaccgaagaggtgggagaggtccgcgaagtgccggatcatggcggcccccgggtgctacctagagtggactcgaagtcgagtgttgaaccactggaaggacctaattggctttgggtgtcggtggaggacgctcagatgcacacagtcacaatatggcttacagtgagaccagacatgaccgttgcttctctcaaggacatggtgtttctggactacggcttccctcctgtgctccagcagtgggtgattggacagagactcgcccgggaccaggagaccctccatagccatggtgtaaggcaaaatggggactcagcctatctctatttgctcagcgccaggaacacttctctcaatccacaagaattgcaaagggaacggcagttgcggatgctggaggacctgggattcaaggacctaaccttgcagccaaggggtcccctagaaccaggaccacccaagcctggtgtgccccaggagccagggagagggcagcccgatgccgttccagagcccccacccgtaggctggcagtgtccgggctgtaccttcattaataagccaactaggccaggatgcgaaatgtgctgtagagctcgccccgagtag

SEQ ID NO: 131727 - DNA, 819 bp, synthetic construct
  misc_feature 1..819: note = Description of Artificial Sequence: Synthetic coding sequence
  source 1..819: mol_type = other DNA
atggacgagaagacaaagaaggccgaagagatggccctgagccttactagggctgttgctggtggggatgagcaggtcgccatgaagtgtgcaatctggctcgccgagcagcgggtgcctcttagtgtgcagcttaagcccgaagtgagccccacacaggatatcaggctctgggttagtgtagaggacgcacagatgcatactgtgacgatctggctgaccgtgcgacccgacatgacagttgcatcgcttaaggacatggtcttcctcgattatgggtttccacccgtgctacaacaatgggtaatcgggcagcgtctcgcacgcgaccaggaaaccttgcattctcacggggtcagacaaaatggagacagtgcttatctttacctgctgtcggcaaggaatacaagccttaatcctcaagagctgcagcgggaaagacagcttcggatgttagaggatctcgggtttaaggatctcacactgcagccaaggggacctctggagccaggaccccccaaaccaggcgtgcctcaggaaccggggcgtggccaacctgacgcagttccagagccgcccccagtaggctggcagtgtccaggatgcacttttatcaacaaacccacacggccagggtgcgagatgtgctgtagggcccgccccgaggcttaccaagttcccgcctcatatcagcccgatgaggaggaaagagcacgccttgctggagaagaagaggcactgcgacagtatcagcagggcgttcccgccgggcatcatcctcaacagcctgggggcggcggcctcctccccctgcactag

SEQ ID NO: 131728 - DNA, 354 bp, synthetic construct
  misc_feature 1..354: note = Description of Artificial Sequence: Synthetic coding sequence
  source 1..354: mol_type = other DNA
atggacgagaaaaccaaaaaggccgaagagatggctctcagtctgaccagggctgtcgcggggggagatgagcaggttgccatgaaatgcgcgatttggttggccgagcaaagggtcccattgagcgttcagctcaagccggaggtgagtcctacacaagatatcagattgtgggtcagcgtcgaagatgcccagatgcataccgtgaccatctggctgacggtgcgcccagacatgacagtcgcatcactcaaggacatggtttttcttgactacgggtttccacccgtcctccagcaatgggtgatcgggcaacgtttagctcgtgaccaagaaaccctgcattcacattag

SEQ ID NO: 131729 - DNA, 768 bp, synthetic construct
  misc_feature 1..768: note = Description of Artificial Sequence: Synthetic coding sequence
  source 1..768: mol_type = other DNA
tgagaaatggcactgagcttgacgagagctgtggccggaggggatgaacaggtggccatgaaatgtgctatttggctggcagaacagcgggtccccctgtctgtccaactgaaaccagaggtatctcctactcaggatatcaggtcccgcggcgaaaagaccgaagaagtgggcgaggtgcgggaggtgcccgaccatgggggacctagggtgctgccaagagtggattctaaatccagtgtggagcctctcgaaggtccaaattggctttgggtcagcgtcgaggacgctcaaatgcatacagtcacaatctggcttaccgtccgaccagacatgaccgtcgcttccctgaaggacatggtgtttctcgactacggtttccctcctgtgctgcagcagtgggtgatcgggcaaagacttgcccgcgatcaggaaaccctgcatagtcacggagttaggcagaacggtgattcagcctatttgtacttattgagcgctagaaataccagcctgaaccctcaagagctgcagcgcgaacgtcagctgcgaatgctcgaagacttaggcttcaaggatctcaccctgcaaccccggggccccttggaacctggtcctccgaaacccggagtcccacaggaacctggtcgcgggcaaccagacgccgtccccgagccacccccagtgggctggcagtgtcctggatgcacattcatcaacaaacccactagaccgggctgtgagatgtgttgtagagccagacctgaatag

SEQ ID NO: 131730 - DNA, 819 bp, synthetic construct
  misc_feature 1..819: note = Description of Artificial Sequence: Synthetic coding sequence
  source 1..819: mol_type = other DNA
atggatgaaaagacaaaaaaagccgaggagatggctctcagcctgacaagggctgttgcaggcggcgatgagcaggtcgccatgaagtgtgctatttggctggccgaacagagagtccccctctctgtgcaattaaagccggaagtcagcccaacccaggacatacgcctctgggtgtcagtcgaggacgcacaaatgcacactgttactatctggttaactgtgcggcccgacatgactgtggcatctcttaaggacatggtcttcctggactatggttttccccccgtgctgcaacagtgggtcatcggtcagagattggcgcgcgaccaggagaccctgcactcccatggcgttcggcagaatggtgactcagcttacctgtatctcctctcagccaggaatacctccctgaatccccaggaactgcagagggagcgtcagctccgaatgttggaggacctggggttcaaggacctgacactgcaaccacgcggcccgttggaacccggcccacccaaacctggggtgccacaagaacccggaagggggcagccggatgccgtacccgagccgccccctgttgggtggcagtgcccaggctgcacttttatcaataagccgacgcggccggggtgtgagatgtgttgccgcgcaagacctgaagcataccaggtgcctgcttcttatcagccagacgaagaagaaagagcccggctggctggggaggaagaggccttgagacagtatcagcagggggtccctgctggccatcacccacaacagccaggcggcgggggcctgctgcctctgcattag

SEQ ID NO: 131731 - DNA, 4830 bp, synthetic construct
  misc_feature 1..4830: note = Description of Artificial Sequence: Synthetic coding sequence
  source 1..4830: mol_type = other DNA
atgaacagccctgtagatcccggggcccgccaggccctgcgaaaaaaaccccccgagcggacaccagaggacttgaacactatctatagctacctgcatggaatggaaatactgtccaatcttcgcgagcaccaactccgtctcatgagcgcaagggctcgctacgagcgatacagcggaaatcaggtgctgttctgctctgagaccattgccaggtgctggtacattctcctgagtggaagtgtactcgtcaagggttccatggtgctgccgccgtgtagcttcggaaagcagtttggcggtaaacggggctgtgattgccttgttctagagccatcagagatgattgtcgtagaaaacgccaaagacaatgaagactccatccttcagcgcgagattccagctcggcaaagcagacggaggttccggaagattaactacaagggtgagaggcagaccatcaccgacgacgtggaggtcaactcctacttgtctcttccagcggatctcacgaagatgcacctgacagagaacccacatccgcaggtgactcacgtgtcctcaagtcagagtggatgcagtattgcttccgactcagggagctcttctcttagcgacatttaccaggctacagaatcagaggtgggtgacgttgatctgacccgactgccggagggacccgtagactccgaggacgacgaggaagaggacgaggagattgacaggaccgacccgctgcagggccgcgacctagtgcgcgagtgtcttgaaaaggagccagctgataaaacagacgacgacatcgagcagctgctcgagtttatgcaccaactgcctgcctttgccaacatgactatgtcagtaagacgggaactgtgctccgttatgatttttgaagttgtcgaacaagccggagcaataatcctcgaagacggccaggagcttgattcttggtacgtaatcttgaacggtaccgtcgagatttcccatccagatggcaaggtggagaatctgtttatgggaaactcctttggcatcacgcccaccctcgacaaacaatatatgcatgggatcgtgcggacgaaggtggacgactgtcagtttgtgtgtatcgcccagcaggactactggcggatattaaatcatgtggagaaaaacacccacaaggtagaggaggagggagaaatagtgatggtgcacgaacacagggagctggatcggagcggaactagaaaaggccatattgtcataaaggcaacacccgagcgactgattatgcatctcattgaggagcactccatagttgatccaacatatattgaagacttcttactgacttaccggacgttcctcgaatcaccacttgacgtgggaatcaagctgctggaatggttcaagattgacagtcttagagacaaagttactagaatcgttttactatgggtcaataatcattttaatgacttcgagggagaccctgccatgaccaggtttctggaagagtttgaaaagaatctcgaggataccaagatgaatggccatctgcggctactcaatatcgcatgtgctgcgaaggcaaaatggagacaagtcgtcttgcagaaagcctcacgagagtctccattgcagttttctctaaacggtgggtctgagaaggggttcggaatctttgtggagggcgtagaacccgggagcaaagctgcagattctggcctgaagagaggagaccagattatggaggtgaacggtcagaacttcgagaacatcacgttcatgaaagccgtggagatcctgcgcaacaatacacacctggccctgaccgtaaaaactaacatctttgtcttcaaggaactgctgtttcgcaccgaacaagagaaatcgggagtcccccacatccctaagatagctgagaaaaagagtaatcgccattccatccagcacgtccctggcgacatcgagcaaacaagccaagaaaagggttccaaaaaggtgaaagcaaacacagtatctggaggccgaaacaagattaggaaaattctggataagactcgcttcagtattttgccacccaaactcttcagcgacggggggttgtcacagtcccaagacgactctattgtcggaacgagacattgtcgccatagcttggcgatcatgcctattccagggacactctcttcaagctcaccggacctgctccagcccaccacttccatgttagatttctcaaacccgtcagacatacccgatcaggtcatccgtgttttcaaggtagatcagcagtcctgctacatcatcataagcaaagatactaccgcaaaggaagtcgtgtttcacgcggtccacgagttcggcttgactggtgcctctgacacctattcgctatgcgaggtgtccgtcacacccgaaggcgtgataaagcagcgtagacttccagatcagttttcaaaattagccgacaggatccagttgaatggtcgttactacttgaagaacaatatggagacagaaacgctgtgttcagacgaggatgcccaggaactcgttaaggagtcccaattgtccatgcttcaactttccacaatcgaagtcgccacacaactgtctatgcgcgatttcgacttgttcaggaacatcgagccaactgaatacatagatgatctgtttaagttgaacagcaaaacaggaaacactcatctcaagcggttcgaggacatagttaatcaagagacattttgggtggcaagtgagattctgaccgaggctaatcaactcaaaagaatgaagattataaaacattttatcaaaattgctttgcattgtcgtgagtgcaaaaactttaacagtatgttcgctatcatttccggcttaaacctcgcaagcgtcgcaaggctcaggggaacttgggaaaagcttccatccaagtacgagaaacacctgcaggatttgcaggacatttttgatccctcaagaaacatggctaagtaccgcaacattctttcaagtcaaagcatgcagcctccaatcattccattatttcccgtggtgaaaaaggacatgacattcctgcacgagggcaacgacagcaaggtggatggattagtgaacttcgaaaagttgcggatgatatccaaagaaatcaggcaggtcgtgaggatgacatccgccaacatggacccggccatgatgttcaggcagagaaaaaaaagatggcgctccctaggttctctttcccaggggtcaactaacagcaacatgctcgatgtgcaaggaggagcacacaaaaagagagcgaggaggagttcactcctaaatgccaagaagctttatgaggacgctcaaatggctcggaaggttaagcaatacctgtccagtctggacgtggaaaccgatgaagagaagttccaaatgatgtccttgcagtgggagccagcctacgggactctcacgaaaaacctaagtgagaagcggagcgccaagtcttcagagatgagccctgttccaatgcgaagcgcaggccagacaaccaaggcccacctgcatcaaccccaccgcgtttcacaagtgttgcaggtgcctgcagtgaatttgcacccaattagaaaaaagggccagacaaaggaccctgctctcaacacatcactgccccaaaaggtgctaggtactactgaggagatcagcggcaagaaacataccgaggacaccattagcgttgcttcgagtttacactcgtctcctcccgcctctccacaggggtcaccacataaaggatatactctgatcccatcagcaaaaagcgacaatctgtctgactcatcccacagtgaaatatcctcccggtctagtatcgtttcaaattgttccgtcgattctatgagtgctgctctccaagacgaacgctgctcttctcaggccctggccgtcccagaatctactggggccctcgagaagaccgagcacgcctctggtattggggaccattcgcagcacggccctggctggaccctcctgaaacccagtctgatcaaatgtctggccgtctcaagtagcgtcagtaacgaagagatttcccaagagcatattattatcgaggcagctgacagcgggcgaggcagctggacatcctgctcgagcagtagccacgacaatttccagtccctgccaaatcccaaatcatgggactttctgaatagctaccgccacacacacttggatgacccaattgctgaggtcgagcctaccgatagcgagccctattcctgcagcaagagttgcagccgaacatgcggccagtgtaagggatctttggagaggaaaagctggacctcatctagttccctctctgacacatacgagcctaattacggcacagtgaagcagcgcgtgctggagagcaccccagccgagtctagcgaaggccttgaccccaaggatgctacagacccagtgtataagaccgtgaccagttctaccgagaaaggcctgatcgtttactgtgttacatctccgaaaaaggacgaccggtacagggagccgccaccaacacccccagggtatctggggatctcgctcgccgatctgaaggagggaccacacactcacttaaagccccccgactacagcgtcgcggtgcagcggtccaagatgatgcataatagcctaagccggctgccccccgccagcctgagctctaacctggtggcctgcgttcccagcaagatagtgacacagccccaaaggcataacctgcagccctttcaccccaagctaggagacgtgactgacgcagacagcgaggccgatgagaatgagcaggtctcagcggtgtag

SEQ ID NO: 131732 - DNA, 4530 bp, synthetic construct
  misc_feature 1..4530: note = Description of Artificial Sequence: Synthetic coding sequence
  source 1..4530: mol_type = other DNA
atgaactcaccagtggatcctggagctagacaggctctgagaaaaaagcccccagaacggactcctgaggacctgaacaccatatatagttatctccatgggatggaaatactgagcaacttgcgtgaacatcagctgagacttatgtccgctagagcccgctacgaaagatatagcggaaaccaggtgctgttctgtagcgagaccattgcccggtgctggtatattctgctgagcggatctgtgttagtcaaggggagtatggttctccccccatgcagtttcggtaaacagtttggaggaaaacgtggctgtgactgtctggtgctggaaccctccgagatgatcgtggttgaaaatgccaaagacaacgaggactcaatcctccaacgcgaaattccagcaagacagagcaggagacgttttaggaagatcaattacaagggagaacgccaaacgattacagacgatgtcgaagtgaactcatacctgagtctgcccgcagacctgacgaagatgcatttaactgagaacccgcacccgcaggtgactcacgtgtctagctctcagagtggatgttctattgcgtcagactcaggctcatcatccctgagtgatatctatcaggcaactgaatccgaggtgggtgacgtggatctgacacgactgccagaaggacccgtcgattcggaggacgacgaggaggaagatgaggaaattgacagaactgacccactacagggtcgggacctcgttcgcgagtgcctagagaaagagccagcggataagaccgatgacgacattgagcaattactcgaattcatgcaccagctaccagcgtttgctaatatgaccatgtctgtgagaagagagctgtgcagcgttatgatcttcgaggtcgtggagcaggcgggtgcaatcatccttgaagacgggcaggagctcgactcatggtatgttatcctgaacggcaccgtcgaaatatcccacccagacgggaaagtcgagaatctcttcatgggtaattctttcggcataactcccacgctggataagcagtatatgcacgggatcgttcgcaccaaagtggacgactgtcagtttgtttgtatcgctcaacaggactactggaggatccttaaccatgtcgagaagaatactcataaagtggaggaagaaggcgagatagtgatggtacatgaacatcgggaactcgaccggtcaggcactagaaaggggcacatcgtgatcaaggcgacccctgagcggttaattatgcacttaattgaggagcactctatcgtggacccaacttatatcgaggactttttgctcacataccgaacattcctcgaatcacctctggatgtcggaataaaactgctcgaatggtttaagatcgactcccttcgcgataaagttaccaggatcgttctgctgtgggtgaacaatcacttcaacgacttcgaaggtgaccctgccatgactcggttcctggaggagttcgaaaagaatctagaagacactaaaatgaatgggcatctgcggctgcttaatatcgcctgcgcagcgaaggcaaagtggaggcaggtcgtgcttcagaaagcctcccgggaatccccattacaatttagtctgaatggcgggtctgagaaaggcttcgggatcttcgttgagggtgttgagcccggctccaaagctgccgactctggcctgaaacgcggcgaccagattatggaggtgaatgggcagaacttcgaaaacattacatttatgaaagcagtggagatcctgaggaacaacacccacctcgcactgaccgtgaaaactaatatcttcgtgttcaaggaactgttgtttcgcactgagcaggaaaagtctggggtcccacacatcccaaagatagcagaaaagaaaagcaatcgccattcgatacaacacgtgccgggagacatcgagcagacttcccaggaaaaaggcagcaaaaaagtgaaagccaacactgtgtccggaggcaggaacaagatcaggaaaattctcgacaaaactcggttctccatcctccccccgaaactgttctcagacggtggattgagccaaagccaggatgacagcatcgtggggacacgacactgccgacactctctggccatcatgcctataccaggcaccctgtcctcttcttcgccggaccttcttcagccaaccacctctatgctggacttcagtaatccctccgctgtgggattttattacatacccgaccaggtgataagggttttcaaggtggaccagcagtcttgttacattattatcagcaaggatactacagccaaagaagtggtcttccatgccgtgcacgaatttggcctgaccggagcctcggatacatactccctctgtgaggtctccgtgactccggaaggcgtcataaagcagagacgtcttcctgaccaattttctaagctggccgaccggatccagttgaacggaagatactacctgaagaacaatatggagaccgagactctgtgctcagacgaggacgcacaagaattagttaaggaatctcagctgtcgatgttacagctgtccacaatcgaggtcgccactcaactatcgatgagagacttcgacctctttcgcaacatagagccaaccgaatacatagatgatttattcaagcttaacagcaagacagggaacacacaccttaagagatttgaagatattgttaaccaagagaccttttgggtggctagtgagatactaaccgaagccaaccaattaaaaaggatgaagataatcaagcactttatcaaaatcgccttgcactgtagagagtgcaagaacttcaatagcatgtttgccatcattagtgggttaaatctcgccagcgtggcccggctccgtggcacttgggagaaattgccctccaagtatgaaaagcatttacaggacctccaagacatctttgatcccagccgcaacatggcaaaatatcgcaatatcttgagtagtcagagcatgcaaccccccatcattccgctctttccagtggtgaaaaaagacatgacctttctgcacgagggcaatgactcgaaggtggatggcttagtgaatttcgagaagttacgtatgatttcaaaagagatccggcaggtagtgcggatgaccagtgccaacatggaccctgccatgatgttccgccagagaaagaagagatggcggtcacttgggtccctgtcccagggatccaccaattccaatatgctcgatgtccagggcggcgcgcacaagaaacgagctcgcaggtcatctctcctcaatgctaagaagctctacgaagacgctcaaatggccaggaaggtcaaacagtatctctccagtcttgatgtggagacagacgaggagaaattccagatgatgagcttgcaatgggaacctgcctatggaaccctcactaagaatctatccgaaaaacgcagtgctaagtccagcgagatgtctcctgtcccaatgcgatcagctggtcagacaacaaaggctcacttgcaccagccccacagggtgtcacaagtccttcaggtccccgcggttaacctgcatccaattagaaaaaagggccagactaaggacccggccttgaacacatccctccctcagaaggttttgggaaccacggaagagatctcaggaaagaaacacaccgaagatacaatctctgtggccagttccctacattccagcccacctgcatctcctcagggctcgcctcacaaaggctatacactcatcccgagcgcaaaaagcgacaacctgtccgatagttcccattcagagatcagctctcgtagctcaattgtatccaactgcagtgtggattcaatgtctgctgccctgcaggacgagcggtgcagttcacaggctcttgccgtgcccgaatcaaccggagccttggagaagacggaacacgcatctgggatcggagatcatagccagcacgggcctggctggaccctactgaagccaagcttaattaaatgtctcgcggtgtccagcagtgtgtccaatgaagaaatctcccaggagcatatcattatcgaggctgccgactctgggcgaggatcttggaccagctgttcttcctctagccacgacaattttcaatctctgcccaatccaaagtcctgggatttcttgaactcttatcgacacacacacctcgatgatccgattgctgaggtggaacctacagactccgagccttattcttgttcaaaatcttgctctcgtacctgtggacagtgcaaaggcagcctggaacgaaagtcatggactagttcatcctccctatcggacacctacgagcccaactacggcacagtcaagcagagggtgctggaatcaaccccagccgaatccagcgaaggtctcgatcctaaggatgctaccgacccagtgtacaagactgttaccagctcgacggagaaaggtctcatcgaaaatgagcaagtgtcagccgtttag

SEQ ID NO: 131733 - DNA, 4530 bp, synthetic construct
  misc_feature 1..4530: note = Description of Artificial Sequence: Synthetic coding sequence
  source 1..4530: mol_type = other DNA
atgaattcgccagtcgaccctggagcccgccaagctcttcgcaagaagccacctgaacggacacctgaagacctgaatacaatctacagctacctccacgggatggagatcctgtccaatttgcgagaacaccagctcaggctcatgtccgcaagggcgcggtacgagcgctattcggggaaccaggtgctgttttgctccgagacaatcgcccgatgttggtacatcttactgtccggttcagttctggtaaaaggctcaatggtgctgccaccatgctcatttgggaaacagtttggaggcaaaagggggtgtgactgtttggtgctggagcctagcgaaatgatagttgtcgagaacgcgaaggacaatgaggactcaattttgcagagggaaattcccgctcgtcagagcagacgtcggttcagaaaaataaattataagggcgagcgacaaacaattactgatgacgtggaggtgaatagttatctttccctgccagctgacctgacgaaaatgcatctcacagagaaccctcatccgcaagttacacatgtgtcaagtagccaaagtggctgctccatagcttccgactcaggctcatcatccctgagcgacatttatcaggccactgaaagcgaggtcggagatgttgatcttacccggttaccagagggaccagtcgattctgaagacgatgaggaggaagacgaggagatcgatcggactgaccctctccagggcagggacctggtgcgggagtgcctcgagaaagaacccgccgacaaaactgacgatgacattgagcagcttttggaatttatgcaccagctccccgcgttcgcaaacatgaccatgagcgtaagacgggagctgtgcagcgtcatgattttcgaagtcgttgaacaggccggggccattattttagaggacggtcaggagttagactcttggtacgtcatcttgaatgggaccgtcgaaatctcccatccagacgggaaagtggagaatctctttatgggaaattcattcgggattacccccaccctggataagcaatacatgcatggcatcgtgaggaccaaggtagacgactgtcaatttgtctgtatcgcgcagcaggattactggaggatcttgaaccacgtggagaagaatacccacaaagtggaggaagaaggtgagatcgtaatggtgcacgaacaccgcgaactcgaccgtagcgggacacggaagggacacatcgtaattaaagccaccccggaacggctgatcatgcacctgattgaagaacactccatcgtggacccaacctatatcgaggactttctgttgacttaccggacttttctcgagtcgccactagatgtagggataaagctgcttgaatggttcaagattgactctctgcgggacaaggttacccggatcgttctgctgtgggtaaataatcattttaatgacttcgagggcgaccctgccatgacccggttccttgaggagttcgagaagaatctcgaggacacaaagatgaatgggcatctacgattactgaatatcgcctgcgccgcaaaagccaagtggaggcaggtcgtcctccaaaaagcctcaagggagagccccctccagtttagcctcaatggcggatcggagaagggctttggcattttcgttgaaggcgtcgagccaggaagcaaagccgcggacagtgggcttaagagaggggaccagattatggaggttaatggacaaaacttcgagaatattacctttatgaaggctgtggagatccttcgaaataacactcatctagcgctcacagtaaagactaatattttcgtctttaaggaattgctgttccggacagagcaggagaagagcggcgtccctcacattcctaaaatagctgaaaaaaagtctaacaggcatagtattcagcatgtccctggggatatcgaacagaccagtcaggagaaaggaagcaaaaaggtcaaagcaaatacagtgagtggcggtaggaacaaaatccggaaaattctagacaagacgcggtttagtattctgcccccaaaactctttagcgatggggggctgtcacagagccaggatgattcaatagttgggactagacactgcaggcattcgctcgccataatgcccatcccaggcaccctgtcttcttcctcccccgacctgttacaacctacgaccagtatgcttgacttctctaatccctctgctaaggggttcaagaacattcccgaccaagtcatccgcgtgtttaaggtggaccagcagtcttgctacatcatcatttctaaggatactaccgcaaaggaagttgttttccatgctgtccatgaattcggtctgaccggagctagcgacacgtacagcctttgtgaggtcagtgtcacgccggagggtgttattaaacagcggaggttgccggatcaattttcgaaactagctgaccgcatccagctgaacgggcgctattatctcaagaacaacatggagaccgagacattatgttctgacgaggacgctcaggagctggtcaaggaaagccagctgtcaatgctgcagctttctactatagaggttgctacacaacttagcatgagagacttcgacctgtttcgcaatattgagccaaccgagtacattgacgatctctttaaactgaactctaagactggcaatacccacctgaagcgattcgaggacatcgtgaatcaggaaaccttttgggtggcctcggagatcctgaccgaggcaaatcagctgaaaagaatgaaaattataaagcactttatcaaaatagccctccactgccgcgagtgcaagaacttcaactccatgttcgccatcatctcagggttgaacctggccagcgtggcccgcctgcggggcacatgggagaagttgcccagtaaatacgagaagcacttacaggatttgcaagacattttcgacccgagcaggaacatggccaaatatcgtaatatcttgtcctcccagtctatgcagcctccgataataccactgtttccagttgtgaaaaaagatatgacttttctccacgagggtaacgactctaaagtggatgggctcgtcaactttgaaaaactccggatgatttccaaagagattcgccaggtggtacgcatgacaagcgctaacatggatcccgctatgatgttccgccaaaggaagaagcgttggcggtcgctcgggtcactgtcccagggcagtacaaactctaacatgttagatgtccagggaggcgcacataaaaagagagcacggcgctcctctctgctgaatgcgaagaaactgtatgaggacgcccagatggctcgaaaggtaaagcagtacctctcatccctcgacgtggaaactgacgaggagaagtttcagatgatgagcctccagtgggaacctgcttacggaactcttacaaaaaacctatcagaaaagaggagcgccaagagcagtgaaatgtcgcccgtccccatgagatccgccgggcagactacgaaggctcatcttcatcagccacaccgggtgagccaggttctccaggtgcccgctgtcaatcttcaccccatacgcaaaaaaggccagaccaaggaccccgcccttaatacgtcgctgcctcagaaggtgctgggaacaaccgaggaaatttctggaaagaaacacacagaagacacaatttcagtggcaagttctcttcactcctcaccccccgcttctcctcaaggctctccccataaaggctataccctgatcccttccgctaaatctgataatctcagcgacagtagccactccgaaatcagcagtcgctcatctatagtgtcgaactgttccgttgactctatgtccgccgctttacaagacgagcggtgtagtagccaggctttggcggtgccagagtccacaggcgcccttgagaagactgagcacgccagtgggattggtgatcactcgcaacacggtcccggctggaccctgctgaagccaagcctgatcaagtgtctggcagtgtcgtcgtcagtgtcgaatgaagaaatcagccaggagcacatcatcatcgaggctgccgatagcgggaggggatcttggacttcttgctccagcagctctcatgacaactttcagagccttcctaacccaaaatcttgggattttctgaatagctacaggcatacccatctggatgacccaattgcagaggtagagcccactgacagcgagccgtactcctgcagcaagagttgctccaggacctgtggccagtgtaaggggtcactcgagagaaagagctggacaagctcctcttccctctccgatacatacgaaccaaattacggaactgttaagcagagagttttggagagcacccctgcagagagctctgaaggactggaccccaaagatgcaacggaccctgtgtataaaactgtgacatcttcaactgaaaaaggcctgataggcaagaagcagacaagctacttttag

SEQ ID NO: 131734 - DNA, 4515 bp, synthetic construct
  misc_feature 1..4515: note = Description of Artificial Sequence: Synthetic coding sequence
  source 1..4515: mol_type = other DNA
atgaactctcctgttgatcccggagctcgccaggccctgagaaagaagccgccagaaagaaccccagaggacctcaacaccatctattcatacctccatgggatggaaatccttagtaatttacgggagcaccagctgcggttgatgtcagccagggctagatatgagcgctactctggcaaccaggtcctattttgtagtgaaacaattgcccgatgttggtacattctgttatctggcagtgtgctggtaaagggcagtatggtgctccctccatgctcctttggaaagcaatttgggggcaagcgcggatgtgactgccttgtcctggagccatcagaaatgattgtagtggaaaacgccaaggacaacgaagattctatactgcagcgagagatcccagccaggcaaagcaggaggcgcttccgcaagatcaattacaagggcgaacgacagaccattacagatgatgtggaagtcaacagttatctgtccctgcccgcagacttgaccaaaatgcacctgaccgagaacccccatcctcaggtaacccacgtttccagttcacagtccggatgcagtatcgcatccgattctggatcatcctccttgtccgacatctatcaggccacggaatctgaggtgggcgacgtcgatctgactagacttcccgagggcccggtagattctgaagacgatgaagaggaggatgaggagatagatcggacagatcccctgcagggccgggatctggtaagggaatgcctggaaaaagaacctgctgacaagactgacgacgacatagagcagttattagaattcatgcaccagctcccggcttttgccaatatgacaatgtctgtgcgtagggagttgtgctccgtcatgattttcgaagtggtagaacaagccggcgccatcatcttggaagatgggcaggagctggacagctggtatgtgattcttaacggcacagttgaaatctcacatcctgatggaaaggtggagaatctctttatggggaattcctttggaatcacgcccactttggataagcagtacatgcacggcatcgtcaggacaaaggtggacgactgccagtttgtgtgcattgcccaacaggattactggcgtatactgaaccatgtggaaaagaacacacacaaagtggaggaggaaggtgaaatagtcatggtgcacgagcacagagaattggatagatctggaactagaaagggccatattgtgatcaaggccacccccgagagacttataatgcatctgatcgaggagcacagcatagttgatcctacatatatagaagacttcctcttgacctaccgcaccttcttagaatctcccctcgacgtaggaattaagctccttgagtggtttaagatagacagtctccgtgacaaggtgaccaggattgtgctgctgtgggtcaataaccactttaatgatttcgaaggcgatccagctatgacgagattcctggaagaatttgagaagaaccttgaggataccaagatgaacggacatctgaggctgctcaatatcgcctgcgccgctaaggctaaatggcgccaagttgtgctgcaaaaggcgtctcgggagagtcccctccagttcagcttgaacggtggttccgaaaaaggctttgggatcttcgtggaaggcgtcgaacccgggtctaaagctgcagactcgggactgaagcgcggagatcagattatggaggtgaacggccagaacttcgaaaatataacctttatgaaagccgttgagatcctgcgcaataacactcatcttgcattgacagtcaagactaatatcttcgtcttcaaggagctcctgtttaggacggaacaggagaaaagcggagtccctcatattcctaaaatcgccgagaaaaagtccaaccggcattctatccagcacgtaccaggtgacatagagcagactagtcaggagaaaggatccaagaaggttaaagccaataccgtcagtggaggacgtaataaaattaggaagattctggacaagaccagattcagtatcctgccccccaagctgttttcagacgggggcctgtcacagtcccaagacgatagcattgttgggacgagacactgcaggcactcactggccattatgcccatacccggaaccctgtcctcttcttcaccggaccttttgcagccaaccacatcaatgttggacttttccaacccttctgacataccagaccaggtgattagggtgttcaaagtcgaccagcagagctgctatatcattatctccaaggataccaccgcgaaggaggtggtgtttcatgcagtgcacgagttcggacttactggcgccagcgatacctattctctatgcgaagtaagcgtgactccagaaggggtgatcaagcagaggcggctgccagaccagttttccaaattggcggacaggatccagttgaatggacgctactatctgaaaaacaacatggaaaccgagacattatgctctgatgaggatgctcaggagttggtgaaagaatctcaacttagcatgttgcaactgtccacgatcgaggttgccacacagctgagcatgagggattttgatcttttccgcaatatcgaacccactgaatatatcgacgatctatttaaactgaatagcaagacgggaaatactcacttaaaaaggttcgaggatattgtgaatcaggagacattctgggtcgcctctgagattctcactgaagcaaaccagttgaaacggatgaagatcattaagcattttataaaaattgcactccactgcagggagtgcaaaaactttaactcgatgttcgccattatctccggcctcaacctggccagcgtggcccgtctgcgtggaacttgggaaaagttaccttcaaagtatgagaaacatctgcaggatctacaggatatctttgacccgagtaggaatatggccaaatatcggaacattctgagcagccagagtatgcagccaccaattatacccctttttcccgtggtaaagaaggacatgacgtttctgcatgaaggtaatgactctaaggtggacgggctggtcaacttcgaaaagctgaggatgatctccaaggagattcgtcaagtcgtgcggatgacctcagccaacatggaccctgccatgatgttccgtcaaagaaaaaagcggtggcgctcccttgggtccctgtctcagggctcgaccaattcgaacatgctcgacgtgcagggtggggcgcataagaaaagagcacggcgttcaagcctgttgaatgcgaagaaactgtatgaagacgcccagatggcccggaaagtgaagcagtaccttagctcgctggatgtcgagactgacgaggagaagtttcagatgatgagcttgcagtgggagcccgcctacggcacactgaccaagaaccttagtgagaagcgaagtgccaaatctagcgagatgtctccagtccctatgaggtccgccggccagacaactaaagcccacttgcatcaacctcatcgagtaagtcaggtgctgcaggttcctgccgtgaatctgcacccaatccgtaagaagggacaaacaaaagatccagctctgaatacaagtttacctcagaaggtcctgggaaccaccgaagagatatccggaaaaaagcacactgaagacacgatctctgtggcatcctcacttcacagctcacctcctgccagccctcagggttcgcctcataaaggctacactctcataccatcggccaagagcgataacctctcagacagctcccattccgagatttcctctcggtcttccatagtgagcaactgttcagttgattctatgtctgccgctctccaggacgagaggtgctcatcccaagcactcgccgtgccagagtctaccggggcattggaaaagactgagcatgccagtggaatcggagaccattctcagcacggacctggctggacattactcaagccttccctaattaagtgtctagcagtgtccagcagtgtgtccaatgaggaaatttctcaggaacacattattatcgaagcagccgactcaggaaggggttcttggactagctgctcaagctcgtcacacgataattttcagtcactaccaaaccccaaatcttgggactttctgaactcatacaggcatacacatctcgatgacccaatcgcagaggtggaacctaccgatagcgagccctattcttgctcgaagtcgtgctcccgaacatgcgggcagtgtaaagggtcactcgagcgtaagtcatggacctctagttcttctctcagcgacacatacgagcccaactacggcacagtgaaacagcgagtgctggagtctacacccgccgaaagttctgaaggcttggacccaaaggacgctaccgaccccgtctataagacggttaccagcagcacagagaaggggctcatcgagaatgaacaggtgtccgcggtatag

SEQ ID NO: 131735 - DNA, 4806 bp, synthetic construct
  misc_feature 1..4806: note = Description of Artificial Sequence: Synthetic coding sequence
  source 1..4806: mol_type = other DNA
atgaatagccccgtcgaccccggcgctcgtcaggctctgcggaagaaaccaccagagagaacgccggaagatctgaacaccatttactcctatctgcatggcatggaaatcttatctaacctgagggaacaccagctcaggttgatgagcgccagggcccgctatgagagatactctggcaaccaggttctgttctgctcagaaacaatcgcccgatgctggtatatcttactgtctgggtctgtgttggtgaaagggagcatggttctgcccccatgcagcttcgggaagcagttcggcggtaaacgcggatgcgactgcttggttctggagccctccgaaatgatcgtcgtggaaaacgcaaaggataatgaggactctattctgcagcgggagatccctgcccgacagtcacgccgacggttcagaaagatcaactacaaaggtgagcgacaaaccatcacggatgacgttgaagtgaattcctatctgtcactgcccgccgatctgacaaaaatgcaccttactgaaaacccacatccccaggtgactcatgtgtctagctcacaaagcggatgttccatcgcttccgactcgggaagttcatccctgtctgatatataccaggcaacggaaagcgaagttggcgatgtcgatttaacccgccttccagagggccccgtggattctgaagacgatgaggaggaggacgaagagatagatcggacagacccacttcagggtagagatcttgtgagagagtgtctggagaaggagcctgcggataaaacagacgatgacattgagcagttgcttgaattcatgcatcaacttcccgccttcgccaacatgacaatgtctgtgagaagagaattgtgctcggtgatgatttttgaggtggttgaacaagccggcgccatcatacttgaagatggacaggaactggactcatggtacgtgatcctgaacggaaccgtggagattagtcacccagatggaaaagtcgagaatttgttcatgggaaattctttcgggattacccccaccttagataagcagtacatgcacgggatcgtgaggaccaaagtggatgactgccagttcgtgtgtatagcccagcaggactactggcgcattcttaaccacgtagaaaaaaacacccacaaggttgaagaggaaggagagatcgtgatggtgcacgagcaccgggaactggacaggtctggcactcgaaaagggcatatagtaattaaagccacacctgagagacttattatgcatctgattgaggaacacagcattgtggaccctacatacatcgaagattttctacttacgtacagaacctttttagaatcccccctggacgtggggatcaaactgctggaatggttcaaaatagatagccttagggacaaagttacacgtatcgtgctcctatgggtgaataatcacttcaacgacttcgagggcgatcccgcaatgacaagattcctggaagagttcgagaagaatcttgaggacactaaaatgaacgggcatctgagattactgaatatcgcttgtgctgctaaggcgaaatggcgacaggtggtccttcagaaagcctcacgggaaagcccgctgcagttcagcctcaatggaggatctgaaaaggggtttggcatattcgtagagggggttgaacctggttccaaggccgccgactcggggctgaaacggggcgaccagatcatggaggtgaacgggcaaaactttgagaacatcacattcatgaaggctgtggagatactgcgcaacaacacgcatctggccttgactgttaaaactaatatcttcgtgttcaaagagctcctctttcgtactgaacaggaaaaaagcggcgtaccccatatcccaaagattgctgaaaaaaagagcaatcgccatagtatccagcacgtgccaggcgacatcgagcaaaccagccaggaaaaagggagcaagaaggtgaaggcaaacaccgttagcggcggtcgcaacaagatccggaagatactggacaaaactcggttctcgatactgccaccaaagctgttctccgatggaggcctcagccagtctcaggacgattcaatcgttggcactaggcactgcagacactcccttgccattatgccaattccaggcaccctgtcgtcctcctctcccgacctcctgcagcccaccacatcaatgctggatttttcgaatccctctgatattcccgaccaggtgataagggtgtttaaagtggatcaacagtcttgctacattataatttccaaagacaccaccgcaaaagaggtagtctttcatgccgtgcacgagtttgggctgacgggcgccagcgacacctactcactgtgcgaggtgtcagtgacacctgagggcgttatcaagcagagacgcctgcccgatcagttctcgaagctagcagataggatccagctgaatggacggtactatcttaaaaataatatggaaactgaaacattgtgtagcgacgaggatgctcaggaattagtgaaggaatcccagctgagcatgcttcagctttccactatcgaagtcgcaacccagctgtcaatgagagattttgacttattccgaaatatcgagcccaccgagtatattgatgacctcttcaagttgaattcaaaaacagggaacacccatctgaagcgtttcgaggacatcgtcaaccaggaaaccttttgggtcgcaagtgaaattctcaccgaagctaaccagctgaaacgaatgaagattattaaacatttcatcaagatcgccctacactgccgggaatgcaagaacttcaatagcatgttcgccattatctcagggctgaatcttgccagcgtcgccaggcttcggggcacatgggagaaactgccaagtaaatacgaaaaacatttacaggacctccaggatatattcgacccctctcgaaatatggccaaatacagaaacattctgagttcacagagcatgcaaccccccatcattccccttttcccagtggtgaaaaaagacatgacctttctacacgagggaaacgacagcaaagtggacggacttgtgaacttcgagaagcttcggatgatctcaaaagagataagacaggtagtgcgcatgacctcagcgaatatggatccggccatgatgtttcgccagaggtctctgagccagggctccactaactccaacatgctggatgtgcagggtggcgcccataagaagagagcacgacgcagctcactgttaaacgccaagaagctgtatgaggatgcacaaatggcaagaaaagtcaagcagtatctcagcagtctcgacgtggaaacggatgaagagaagttccagatgatgagcctacagtgggagcccgcctacggaactcttactaaaaatctgtcagagaaaagatctgctaaatctagcgaaatgtccccggtccccatgagaagcgcaggccagaccacgaaggcccatctgcaccagccccacagagtgtcacaggtcctccaggtgcccgccgtaaatctccacccaatcaggaagaaagggcagacaaaagacccggccctcaacacttcactgccacagaaagttctgggaaccactgaggagatctccggtaagaaacatacagaagatacaatatccgtggcttcttcactccattcttcaccgcccgcatcaccacagggttccccccataaggggtacacactgattcccagtgctaaatccgacaacctgtctgatagctcccatagcgaaatttcctccaggagttcgatcgtttcaaactgtagcgtcgatagcatgtccgcagcgctgcaggacgagcggtgtagtagccaagccctggccgttcctgaaagcacgggcgccctagagaagaccgagcatgcatccggaattggtgaccatagccagcacggccccggctggaccctcctgaagccctcactgatcaagtgcctcgcagtctcaagcagtgtttcaaatgaagagattagtcaggaacacattatcatagaggccgccgattctggcagaggtagctggacttcttgcagctctagttcgcatgacaatttccagtcgctgccaaatcccaaaagttgggatttcctaaatagctaccgacacacccatctcgacgacccaattgcggaggtggaacctaccgattccgagccctattcctgttctaagagctgttccaggacttgcggccagtgcaaaggttctttggagcggaagtcatggacctctagttcctccttatcagacacctatgaaccgaactatgggacagtaaaacagcgggtgctggaaagtactcctgccgagtcctcagaaggcctggacccgaaggacgctaccgatcctgtgtacaaaactgtaacaagctctaccgagaagggactgatcgtgtactgcgttacaagccctaagaaagatgatcggtatagagagcccccacccacccccccaggctacctggggatctctttggccgatctaaaggaagggcctcacacccatttaaagcctccggactactccgtagccgtgcagcgcagtaagatgatgcataatagcctcagccgcctgcccccggccagtctttctagcaatctcgtcgcttgcgtgccatctaagatcgtgacacagccccaaagacacaacctccagccgttccatccgaagcttggcgatgttaccgacgccgactctgaagcagacgagaatgagcaggtcagtgccgtgtag

SEQ ID NO: 131736 - DNA, 3615 bp, synthetic construct
  misc_feature 1..3615: note = Description of Artificial Sequence: Synthetic coding sequence
  source 1..3615: mol_type = other DNA
atgaactctcctgtggatcccggtgcaagacaggcactgcggaaaaagcccccagagcgtaccccagaagatctgaacaccatctatagctatctgcatggcatggagatcctgtctaaccttagggagcaccaacttcgcctgatgtcggcacgagccagatatgaacggtactccggtaatcaagttctcttctgtagtgagaccattgctcggtgctggtatattttactcagtgggagcgttttagtgaaagggagcatggttctgccgccgtgttcctttgggaagcaattcggcgggaaacgcggttgtgattgcttggtgttggaaccttcagaaatgatagtcgtcgagaatgccaaagataacgaagactctatcttacagcgtgaaatcccagcccgacagtccaggagaaggttcagaaaaatcaattataaaggagaaaggcagaccatcactgatgatgtcgaagtaaattcctatttgagcctgccggctgatctcacaaagatgcacctgaccgaaaacccccacccacaggttactcatgtatcttcaagccagtctggctgttctattgcatcagacagcggctcttcaagcctttccgacatctatcaggcaactgagagtgaggtgggagatgtggatttgaccaggcttccggaaggccccgtggatagcgaagacgatgaagaggaagatgaagaaattgacaggaccgatcctctacagggaagagacctggtgcgggagtgtcttgagaaggaacctgccgataagacagatgatgatattgaacagttattggaattcatgcatcagcttccagccttcgccaatatgacaatgagcgtgaggcgggagctgtgcagcgtgatgatctttgaggtcgtcgagcaagctggcgccattatcctggaagacggacaagagctggactcgtggtacgtgatcctcaatggtacagtagaaataagtcacccggatggaaaagtggagaatttgttcatgggcaactcctttggcatcacgcccacattggataagcaatacatgcacgggatcgtacgcaccaaggtagacgactgtcagttcgtatgtatcgcccaacaggattattggcggattttgaatcacgttgaaaagaacactcataaagtggaggaggaaggcgaaatagtgatggtccacgaacaccgcgagctagatcggagcggtactaggaaggggcacatcgtcattaaggccacccccgaaaggttaatcatgcatctgatcgaggagcactccattgtagatcctacttatattgaagatttcctgctgacttacagaaccttcttagaatcccctttagacgtgggaataaagcttcttgaatggttcaagatagacagtttgagagacaaagttacccgcatagtgctgctttgggttaacaatcactttaacgatttcgagggagatcctgccatgactaggttcctcgaagagtttgagaagaacttggaggacaccaagatgaatggacatctcagacttctgaacatcgcatgcgcagccaaagctaaatggcgacaggtcgtcctacagaaagcttcccgcgagtcaccactccagttctctttgaatggtggttcggaaaaaggttttgggatttttgtcgagggcgtcgagccaggtagcaaagccgccgatagtggattgaagagaggggaccaaatcatggaggtaaatggacaaaacttcgagaatattaccttcatgaaagcagtggagatcctcaggaataatactcaccttgccctgaccgtgaaaactaacatcttcgtgttcaaagaactcctattccggacagagcaggaaaaatccggtgtgccacatattcccaaaatcgccgagaaaaagagtaacagacactcgatacaacacgttccaggtgacatagagcagacaagtcaagaaaaaggaagcaagaaggtgaaggcaaacactgtgagcggggggagaaacaagatccgtaagatccttgataagactaggttctctatactccctcccaagctgtttagcgatgggggtctctcccagtctcaggatgatagtattgtggggacacgtcactgtcgtcactctttagctattatgcccatccctgggacacttagttccagcagccccgatttgcttcagccaaccacatccatgctagacttctcgaatccctctgatatacctgaccaagttattcgcgtgttcaaagtggaccagcagtcttgctacattattatctcaaaagatactaccgcgaaagaggttgtgttccacgctgtacacgagtttggtctcactggtgcctccgacacatacagcttatgtgaagtttccgtgacacctgaaggagttataaagcaacggcgactccctgatcagttcagtaagttggcggaccgaatccagctaaacggtaggtactatcttaaaaacaatatggagactgagacgctgtgctctgatgaggacgctcaggagctggtgaaagaaagtcaactgagcatgctgcagctgtccacaatcgaggtggctacgcagcttagtatgagagattttgaccttttccggaatattgaacctactgaatacattgacgatctgttcaagcttaactcgaaaacaggaaacacgcatctaaaaagatttgaggacatcgtcaaccaagagactttctgggtggctagcgaaatactaacggaggccaatcagttgaaacggatgaaaattatcaaacactttattaaaatagcgctgcattgccgcgagtgtaaaaatttcaacagcatgttcgccatcataagcggactgaacttggcctcagtggcaaggctgagagggacttgggagaagctgccctccaaatatgagaaacacctgcaggacctacaggatattttcgacccttccagaaacatggctaaatatagaaatatcctgagttctcagtccatgcagccacccattatccccctttttccggtcgtcaaaaaggatatgacctttctgcacgaaggcaatgactccaaagtggacggccttgtcaattttgaaaaactccggatgatcagtaaagagattcgacaggtcgttagaatgactagcgcaaacatggaccccgccatgatgtttcgacagcggagtctgagccagggcagcaccaattctaatatgctggacgtccagggcggtgcccacaagaagcgcgctcgccgatcaagcttgttaaacgccaagaaactttacgaggatgcccagatggccaggaaggtcaaacaatacctctcatctcttgacgttgaaactgatgaagagaagtttcagatgatgtctcttcagtgggagcccgcctatggcacactgacaaagaacctgtctgagaaacgatccgctaagtcatccgagatgtcccctgttcccatgcggtccgctggacagacaactaaggcccatctgcatcagcctcacagagtttcacaagtactccaggtgcctgctgttaatcttcaccccatcaggaaaaaaggacagaccaaagatcccgcactgatgtag

SEQ ID NO: 131737 - DNA, 4176 bp, synthetic construct
  misc_feature 1..4176: note = Description of Artificial Sequence: Synthetic coding sequence
  source 1..4176: mol_type = other DNA
atgaactcacctgtggatcctggcgccaggcaagctctgcggaaaaagccacctgaacggactccagaggatctgaatacaatttactcttatctgcatgggatggagattctcagcaatctgagggaacaccagttgaggctgatgtccgccagggcccgatatgagcgctactcaggcaaccaggtgttattctgctctgaaacaatcgctcgctgctggtatatcttgctgtccggctcagttctcgttaaagggtctatggtgctgcccccctgtagctttgggaaacagttcggcgggaaacgtggctgtgactgcttggtgctcgagccctccgagatgatagtcgttgaaaacgccaaagacaacgaagacagcatcctgcagagggagattcccgctcgccaaagccgacgtagattcagaaagataaactataagggggagcggcagacgatcactgatgacgtggaggtaaattcctacctgtcgctgcccgccgacctcactaagatgcaccttacagaaaacccccacccgcaggtcactcatgtaagcagcagccaaagtggctgttcaattgccagtgactctggatcatcgtccctgtcagacatctaccaggcaactgaatcggaggtgggtgatgtggaccttacccggctgcctgaggggcccgtggacagtgaggacgacgaggaggaggacgaggaaatagaccggactgaccctctgcaggggcgcgacctggtgagggagtgcttggagaaagagcccgccgataaaacagacgacgatattgaacagctattggagttcatgcatcaactccccgctttcgccaacatgactatgtctgtgcgaagagagctgtgtagcgtgatgatttttgaggtggtcgagcaggcaggcgctatcatcctggaggacggacaggaactggattcctggtacgtgattctgaatggcacagtcgagatctctcaccctgacggcaaagtggagaacctctttatgggtaattctttcgggattacaccgacgcttgacaaacagtacatgcacggcattgtgcggaccaaagtggatgattgccagtttgtctgtatcgcccaacaggactactggcgaattttgaatcatgtggagaagaacactcacaaggtggaggaggagggggagatcgtgatggtccatgaacacagggaattggacagaagcggtaccaggaagggccatatagtgataaaggctacccctgaacgtctgatcatgcacctaatcgaggaacacagcatcgtagaccccacttacatcgaagacttcctcctcacctataggacattcctagagagcccgcttgatgtgggaatcaagctgctggagtggtttaagattgattcactgcgagacaaagtgacaaggattgtactgttgtgggtgaataaccacttcaacgacttcgagggtgaccctgctatgacaaggttcctggaagagttcgaaaagaaccttgaggacactaaaatgaacggacatcttcggttactcaacattgcctgcgctgctaaagcgaaatggcggcaggtcgtattgcagaaggccagccgagaatcacccctccagttctcactgaacggcggttctgagaagggcttcggaattttcgtcgaaggagtggagcccggctcaaaagctgcagacagtggccttaagcggggggatcaaattatggaagtcaatggtcagaacttcgaaaatatcactttcatgaaggctgttgagatcttgcgaaacaacacacacttagcactgaccgtcaaaaccaacatctttgttttcaaagaactcctgtttcgtacagagcaggaaaagtctggagtaccgcacatcccaaaaattgcagagaagaagtctaaccgccactcgattcagcatgtgcctggggacatcgagcagactagccaagagaaaggcagcaaaaaggtaaaagccaatactgtcagtggcggacgcaacaagataagaaagatcttggacaaaactcgcttctccattttgccccctaagttgtttagcgacgggggcctgtctcagagtcaggatgactcaatcgtcggcactcggcactgccggcattccctggctatcatgcccatcccaggtactttaagctcctcatccccagatttattgcagccaacaacctcgatgttggacttctctaacccgagtgatatacctgaccaggtgatacgcgtgtttaaggtggaccagcaatcctgttatatcatcatcagtaaagacaccacagccaaagaagtcgtgttccacgccgttcacgagttcggcctgaccggtgctagcgatacatatagcctgtgcgaagtgagcgtcactccagagggcgtcattaaacagcgccgactaccagaccaattctctaaactcgccgataggatccagctcaatggaaggtattacctgaaaaataacatggagacggagacgttgtgttcagatgaggatgcgcaggaattagtgaaagaatctcaactctctatgctccagctgtccacgatcgaggtagcaacacagctttctatgagagactttgatctttttagaaacatagagccaacggagtatattgatgatctcttcaaactgaacagcaaaacgggaaatacccatctgaagcggttcgaggacatcgtgaatcaagagactttctgggtcgcaagcgaaatcctcacggaagctaaccagctaaaaaggatgaaaattatcaagcactttataaaaatcgcactacattgccgagagtgcaaaaattttaactccatgttcgcaataatctcaggcctaaatctggcttccgtggctcggttgagagggacctgggagaaattacctagcaagtacgaaaagcacctccaggacttgcaggatatatttgatccaagcagaaacatggcgaaataccggaacattctgtcttctcagagtatgcagcccccaatcattccccttttcccagtggtgaagaaggacatgacattcctacatgagggaaatgactccaaagtggacggattagtcaatttcgagaaacttcggatgataagtaaggaaatcagacaggttgtgagaatgacaagcgctaacatggatcccgccatgatgtttcggcagagaagcttatcccaggggtccaccaattccaacatgcttgacgttcaaggtggcgcacataaaaaacgagctcgcaggagctctctccttaatgctaagaaactttatgaagatgctcagatggctagaaaggttaagcagtacttgtcttccttggatgtcgaaaccgacgaagagaaatttcagatgatgtcattgcaatgggagcccgcttatggcactctaaccaagaacttatcagaaaagcgaagtgccaaatctagcgagatgtcaccggtgcccatgaggtccgccggtcaaaccactaaagcccatcttcaccagcctcatcgggtgtctcaagtactgcaggtgccggctgtgaatctgcatccaatacggaagaaaggccagacgaaggaccccgctctgaatacttccctccctcagaaggtcctgggaactacggaagaaatctcaggaaagaagcatactgaggatacaatatcggtagctagttccctgcactcatctcctcctgcgagtcctcagggatccccacacaaggtcgggagtattatcagtgaccactccagcaagattagtggacagagttgtcccggcatcggaggtgcttacctgcagaaaaagattctacagatcacgcggagtacggctaaacggaccgactccactgagaaagcaaccgaggaaaacagagaccgtacaagttgcgaaaacaccactcgaaaacggatgacatcaccgtttcgtaggctgcgggaaagaatgctctccagggaaagactggtcaactctcagaaggaggacacagatcataaccaggctacagaaagttgcgagaaggttaaggacgtggggtctaatatcaaagatgagaagggcagtgccattttcaatagtaattctcaaggcaactctaacactttgaattgcttctatacaagattcaagtctaagagaaggaagaccttatag

SEQ ID NO: 131738 - DNA, 2484 bp, synthetic construct
  misc_feature 1..2484: note = Description of Artificial Sequence: Synthetic coding sequence
  source 1..2484: mol_type = other DNA
atgaatagccccgtggaccccggagccaggcaagcgctacgcaaaaagccccccgagcgcaccccggaggacttgaacacaatctattcctatcttcacggtatggagattttgtcaaacctgcgcgagcaccagctgcggctaatgtctgcgcgggccagatatgagaggtactccggcaaccaggtccttttctgtagcgaaactatcgcaagatgctggtatatcttgctgagtggctccgtgttggtcaaaggttcaatggtgctgcccccttgctcctttggtaagcagttcggcgggaaacggggctgtgactgcctagtacttgaaccatctgagatgatcgtggtcgaaaacgctaaggataacgaagactcaattctgcagagggagattcccgccaggcagtctcgccgccgtttcagaaagatcaactacaaaggggagagacaaactatcaccgacgatgtcgaagtaaacagttatctctctctgcctgccgacctcacaaagatgcacctcaccgagaacccccatcctcaagtcacacatgtctcttcgagccaatcagggtgctccatcgcgagcgactccggatcaagcagtctgtctgatatttaccaggccaccgaatccgaagtgggagatgtggatctgacccggcttccagaagggccagttgacagcgaggatgatgaagaagaagatgaggagattgaccgcactgatccattgcaaggaagagacctcgtacgggagtgcctggagaaggaacctgctgacaaaacagatgacgatattgagcagctgttagaattcatgcaccagctcccagcttttgcgaatatgacaatgtctgtgcggagggagctctgtagcgtgatgatttttgaagtggtggagcaagccggcgccatcatcctggaagacggccaagagcttgactcctggtatgtgatcctgaatggtacagtggaaatttcacatccagacggtaaagttgagaatttgttcatggggaattctttcggcataactcctactctcgataagcaatatatgcacgggatagtgcgtaccaaggtggatgactgccagttcgtgtgtatagcccagcaggattattggaggattttgaatcacgttgagaagaatacccataaagtggaggaggagggcgaaattgtgatggtccatgaacatagggaactggaccggagtgggactcgaaagggacatatcgttatcaaggctacccctgagcggctgattatgcacttgatcgaagagcacagtatcgttgaccctacttacattgaagacttcctgcttacatatcgtacctttttagagtctcctcttgatgtaggtatcaagctcctggagtggtttaagatagattccctgcgtgacaaggttacaaggattgtactgttatgggttaataaccattttaacgatttcgaaggagacccagccatgacccgcttcctggaggaattcgaaaagaatctggaagacaccaagatgaacggacatctaagactgctcaatattgcatgtgccgctaaagccaagtggaggcaagtcgtgctccagaaagctagccgcgagagccctctgcagtttagcctaaatggaggtagtgaaaagggcttcggcatcttcgtagaaggagtggagccaggctctaaggcggccgactcaggcttgaagcggggggatcaaattatggaggttaatggacaaaactttgaaaatattacctttatgaaggctgtcgagatactgagaaacaacactcacctggcgctgacagtgaaaaccaatatctttgttttcaaggaactgctctttcggactgagcaggaaaagagcggagtgcctcacattccaaaaattgccgaaaaaaaatccaatcggcactccatacagcatgtgccaggggacatcgagcagacatcacaggagaaggggagtaaaaaggtcaaagccaatacggtttccgggggtcgcaacaaaatccgcaaaatactggataagacgcggttttccatactcccccccaaattgttttctgacggtgggctgtctcagagccaggatgattcaatcgtcggtactcggcattgtcgccactctcttgctatcatgccaattcccggtaccctgtcgagcagctcaccagacctgctccaaccaaccacctccatgctggattttagcaacccctccgacataccagatcaggtgattcgcgtcttcaaagtggaccagcagtcctgctatatcattatcagcaaggacaccacagccaaggaggtggtttttcacgccgttcatgagttcggcctgaccggtgcatcagatacctattcgttatgcgaggtgagcgtgacccctgagggagtgataaagcaacggcgcctcccagaccaattttctaaactcgccgatcgtattcagctgaatggaaggtag

SEQ ID NO: 131739 - DNA, 1551 bp, synthetic construct
  misc_feature 1..1551: note = Description of Artificial Sequence: Synthetic coding sequence
  source 1..1551: mol_type = other DNA
atggccgataatttgtccgacactctgaagaagctgaagatcacggccgttgacaagaccgaggactccctagagggctgtctcgattgtttactgcaggccttggcgcagaacaacactgaaacctcagaaaaaatccaggccagcggtattctgcaactttttgcgtccctgctcactccccagtcttcttgcaaagcaaaggtcgccaatattatagccgaagtcgccaagaatgagttcatgaggatcccctgcgtggacgctggccttatttccccccttgttcaactgcttaactccaaggatcaagaggtgttgctgcaaacaggaagagccctgggcaacatttgctatgactcacagtcctcaaaggaacaatttgcttccacgaatatcgccgaagagcttgttaagctttttaaaaaacaaatcgagcacgataagagagaaatgatttttgaggtcctcgccccactggcagaaaacgatgccattaagttacagttggttgaggcaggtctggtggaatgcctccttgagatcgtgcagcagaaagtcgatagcgacaaggaggacgatattacggagttgaaaaccggctctgatctgatggtacttctgctgctgggagacgagtcaatgcagaagctgttcgaaggggggaaaggcagcgtgttccagagggtcttaagctggattccatctaacaaccaccaactccagctggccggggccctcgcaattgccaattttgcacgcaacgacgctaactgcatacacatggtagacaatggtatcgtggagaagctgatggacctcctggaccggcatgtggaagacgggaacgtgacagtccagcatgcagcattgtctgcccttaggaacctggctatccccgtgatcaataaggccaaaatgctctccgcaggcgtgactgaggccgtcctcaaatttttgaaatctgaaatgcctcctgttcagtttaagttactgggtactctcagaatgcttatcgacgcccaggccgaggccgcggagcagctggggaaaaatgtcaagctcgttgagaggctggtggaatggtgtgaggctaaggaccatgctggggtcatgggagagtccaaccggctgttgagcgcgttgatcagacactcaaagagcaaggatgttatcaagactatcgtgcagagcgggggcatcaaacatctcgttaccatggccacctccgaacacgtgattatgcaaaatgaagctctggtggccttggccctcattgccgctctcgaactgggaaccgcagagaaagacctggagtctgccaagttggtacaaatacttcatcggttgctcgccgacgaacgatcggctccagagatcaagtacaactctatggtgctgatttgtgccttaatggggtcagaatgcctccacaaggaggtgcaggacctggcattcttggacgtcgtttccaagctgaggtctcacgagaataagtcagtcgctcagcaggctagtctgacggagcagcggctgactgtcgagagctag

SEQ ID NO: 131740 - DNA, 1827 bp, synthetic construct
  misc_feature 1..1827: note = Description of Artificial Sequence: Synthetic coding sequence
  source 1..1827: mol_type = other DNA
atggccgataatctgagcgatacgctgaagaaactcaaaataactgccgtagataaaaccgaggactcattagaaggttgcttagattgtctcctgcaggctctcgcacaaaataatacagaaactagtgaaaaaatccaggcttccggcatactgcagctctttgcctcccttctgaccccacagagctcctgcaaggcaaaggttgccaatattatcgcggaggtcgccaagaacgagtttatgcgcataccgtgtgttgacgctgggttgatttctcccttggtgcagctgcttaacagcaaagatcaagaggtgctgctgcagaccggaagggcgctcggcaacatttgttatgactctcatgagggaagatcggccgtagaccaagctgggggcgctcagatcgtcatagatcacctaaggtctctgtgtagcattactgatccggcaaatgagaaactgctaacagtcttttgcggaatgctcatgaactactccaatgaaaatgatagtcttcaggctcaacttatcaacatgggcgtaatcccgactttggtcaagcttctcggaatccactgccagaatgccgccctaacagagatgtgcctggtggcctttgggaatctagccgaattggaatcgtcaaaagagcagttcgcatcaaccaacatcgcagaggaactcgttaagttatttaaaaagcagatcgagcacgataagagggagatgattttcgaagtccttgccccattagccgaaaatgacgctatcaaattacagttggttgaagctggtctggtcgaatgcctcttagagatagttcaacagaaggtggactcagataaagaggacgatattacagaattgaaaactggcagtgacctgatggtcctgcttctgctgggcgacgaaagcatgcaaaagctgttcgagggcggaaagggctcagtctttcagagggtcctgagctggatcccctcgaacaaccaccagcttcaacttgctggagccttggctatcgccaatttcgcgcggaacgacgcaaactgtatccatatggttgataacgggatcgtcgagaagctcatggacctcctcgatagacatgtagaggatgggaatgtgacggtccagcacgccgcccttagtgcccttcgaaatctcgccattccagtgataaacaaagccaagatgctgagcgcaggggttacagaggctgtcctgaagttcctcaagtcagaaatgcccccagtgcagtttaaactgctggggactctaaggatgctgattgacgctcaggcggaagcagcagagcaactgggcaaaaatgtgaagctggtggagaggctggtggagtggtgcgaagccaaggatcacgccggggtgatgggcgaaagcaatcgactgctctctgcactaattcgacattcaaagtcaaaggacgttatcaagactatcgtccagagtggcggtatcaaacatctcgtgacaatggctacttcagagcatgtgattatgcaaaatgaggcactcgtggctctggccttgatagccgccctagaacttggtacagcagaaaaggacttggagtccgctaagttggtacagattctccacagacttttggccgacgaacgcagtgccccggagatcaaatacaattcaatggtgcttatttgcgccctgatggggtcagagtgccttcacaaggaggttcaggaccttgccttccttgatgtcgtcagtaagctgaggagtcacgaaaacaagtctgtggcccagcaggcctcgttaacagagcagcgcttaacagtcgagagctag

SEQ ID NO: 131741 - DNA, 1680 bp, synthetic construct
  misc_feature 1..1680: note = Description of Artificial Sequence: Synthetic coding sequence
  source 1..1680: mol_type = other DNA
atggccgataacctctccgatacactaaaaaagctgaagattactgccgtggataaaacggaagattcactggagggatgcctggattgcctgctgcaggccctggcccagaacaacaccgaaactagcgaaaagattcaagctagcggaatcctccagcttttcgcctctctgctgaccccacagagtagctgcaaggcgaaggtcgctaatattatcgcggaggtggccaaaaacgaattcatgaggattccctgtgtggacgctggcttgatttctcccctggtgcagctgttgaactctaaagaccaggaggtgttactgcagactggtcgcgctctagggaatatctgctatgacagccacagcctccaggcacagcttatcaacatgggagtgattccaacattagtgaaactgctgggcattcactgtcagaacgctgctttgaccgaaatgtgtctagtggctttcggtaaccttgccgagctggagtcctccaaggagcagtttgcctctactaacatcgccgaggagctggtgaaactgtttaagaagcagattgagcatgataagcgggagatgattttcgaggtgctggctccccttgccgaaaacgacgccatcaaactgcaattggttgaggcgggcctggtggaatgtttgctggagattgttcagcagaaagtggatagtgacaaggaggatgacatcactgagttgaagaccggctccgatttgatggtcttgcttttactgggcgatgagtccatgcagaagttatttgaaggcggcaaaggatccgtgttccagcgcgtgctgtcatggattcccagcaataaccaccagcttcagctggcaggcgctctcgccatagcaaacttcgccaggaatgacgctaattgcattcatatggtggacaatggaattgtcgagaagctgatggacctcctagatcgccatgtggaagatgggaacgtgactgtccagcacgctgctctgtcagcactgcgtaacctggctattcccgttatcaacaaggccaaaatgctcagcgcaggcgtgactgaggccgtgttaaaatttctgaagtccgaaatgccgcctgtgcagtttaagctgctgggtaccttgagaatgctgatcgatgcacaggccgaggcagccgagcagttggggaagaatgtgaagctcgtggaacgtctcgtggagtggtgtgaagccaaggatcacgcaggggtaatgggtgaaagcaatcgactactcagtgctcttatacggcactccaaatccaaggatgtgattaagaccatagtgcagtctggtgggattaagcatctggtcaccatggctactagtgagcatgtcattatgcaaaacgaagccctggttgcgttggctctgatcgctgctctggaattgggcacggccgagaaagaccttgagagcgctaagctggtccagatactgcacaggctcctggcggacgaacgctccgcaccagagataaaatacaacagcatggtgcttatctgtgcactcatgggcagcgagtgcttgcataaggaggtacaggatctggcctttctggacgtcgtaagtaagctgcgcagtcatgagaacaaaagcgtggcccagcaggcctcactaaccgaacaaagattgaccgtggagtcatag

SEQ ID NO: 131742 - DNA, 1677 bp, synthetic construct
  misc_feature 1..1677: note = Description of Artificial Sequence: Synthetic coding sequence
  source 1..1677: mol_type = other DNA
atggacaatctctcagatacccttaagaagctcaaaatcaccgctgtggacaagaccgaagatagcctggaggggtgcttggattgcttacttcaggccctggctcaaaacaatacggagacatcagagaagatacaggcaagcggcatcttgcagctgttcgcttctttgctaacgccccaatcttcctgtaaggctaaggtcgcaaatatcatcgctgaggtggctaagaacgaatttatgagaattccttgcgtcgacgcgggactgataagcccccttgtgcagctccttaactcgaaagaccaggaagttcttctccaaactggaagagcactgggtaacatctgttacgattcacattctcttcaggctcagctcatcaatatgggagtgattcccaccctggtcaaacttcttgggatacactgtcagaacgccgcacttactgagatgtgtttggtggccttcggtaatctcgccgagttggaaagctcaaaggagcagtttgcgagtacaaatatcgcggaggaactggttaagctctttaaaaagcagatcgagcatgataagagggagatgatatttgaggtgctggcccctctcgcggagaacgatgctatcaagctgcagctggtggaagctggcctggtggaatgcctgttggagatagtccagcaaaaggtcgattcagataaggaagatgatatcaccgaacttaagactggtagtgatctgatggtgctgcttctccttggggacgagtccatgcagaaactgttcgagggcggaaagggatccgtgttccagagagtcctatcatggattccaagtaacaaccatcagctccaactggccggcgcactcgctattgccaattttgcccggaacgatgctaattgcatccacatggtggacaatggaatagtggaaaagctgatggaccttctggaccgacacgtggaggacggcaacgtaactgtacagcacgccgcactttcggcactgaggaaccttgccattccagtcataaataaagccaaaatgctgtctgccggtgtgactgaggcggttttgaagtttctcaagtcagaaatgccgcctgtacagtttaagctgctgggtaccctccggatgctgatagacgcccaggcagaagctgccgagcagctgggtaagaatgtcaaattagtcgagcgcttagtggaatggtgcgaggccaaggatcacgccggcgtgatgggagaatccaataggctcttgagcgcgctgattcggcacagtaaaagtaaagacgttattaaaacaatcgtccagtctggtgggattaagcacctcgttacaatggccacgagcgaacacgtgattatgcagaacgaggctcttgtggcactcgcccttatcgctgcgttggaacttggaacagcggaaaaagatctggagtctgccaaacttgttcagattctgcaccgactccttgctgatgagcggagcgccccagaaataaaatataactccatggttctcatctgtgcactcatggggagtgaatgtcttcacaaggaggtgcaggatctggcctttcttgatgtggtcagtaaactgcgatcccacgagaacaaatccgtggcccaacaggcatcccttaccgagcagcggctgacggtggagtcgtag

SEQ ID NO: 131743 - DNA, 1824 bp, synthetic construct
  misc_feature 1..1824: note = Description of Artificial Sequence: Synthetic coding sequence
  source 1..1824: mol_type = other DNA
atggacaatctttcagacacattgaagaaacttaagattaccgcagtagataaaaccgaagattcactggaaggatgcctggattgtctgttacaggctttggcacagaacaataccgaaacgtctgagaaaattcaagctagcggcatactccaattgttcgcctccttactcaccccccagagtagctgtaaagctaaggtcgcaaatattatcgccgaagtcgctaagaatgaatttatgcgaattccctgcgttgacgcaggcctgatctcccccctcgtgcagctgctgaactcgaaagatcaggaggtgctactccagaccgggcgagctttggggaacatctgttatgacagtcacgagggtcggtctgccgtcgaccaggccggcggtgctcagattgtcatcgaccatcttcggagtctctgtagtattactgatccagccaacgagaaactcctaaccgtgttttgcggcatgttgatgaactatagtaacgaaaacgacagcctccaggctcagctcatcaatatgggcgtcatcccaactttagttaagcttcttggcattcattgtcagaacgccgccctgactgagatgtgcttggtggcctttggcaatctggccgaattggaaagttctaaggagcagttcgcttcaaccaatattgctgaggagctggtgaagctgttcaaaaaacagatcgagcatgacaaaagggagatgatctttgaagttctggcgcctcttgccgaaaacgacgccattaaattgcagttagttgaggcaggcttggtggagtgcctccttgagattgtccagcagaaagtggatagcgataaggaggacgacattacggaactcaaaacaggttctgacctgatggttctgctcctgctgggagacgagagcatgcaaaagctcttcgaaggtggtaaggggtccgtgttccagcgagtgctcagctggatcccatccaataatcaccaactgcagctagccggagcccttgcgattgctaattttgctcgcaatgacgctaactgtatccatatggtggacaacgggatcgttgagaaactgatggatcttttggataggcatgttgaggatgggaatgtgaccgtgcaacacgccgcactctctgcactaaggaacttggccattcctgtgatcaataaggcaaagatgctctccgcaggcgttactgaggccgttctaaagtttttgaaatccgagatgccgccagtccagttcaagttgctaggcactcttcggatgctcattgatgcccaggcggaagcggcagagcagctgggcaagaacgttaaactggttgaacggctggtcgagtggtgtgaggccaaagatcatgcgggagttatgggcgagagcaaccgcttgctctccgcgctgatacgtcactccaagtccaaggacgtcatcaagactatagtgcagtccggcggtatcaagcacttggtaaccatggctacgagcgaacacgtgattatgcagaacgaagcgctggtggctcttgctctgatcgccgccctcgaactagggaccgctgagaaggaccttgagtctgctaaactggtacagattctccatcgtctcctggccgatgagagatccgcacctgaaattaagtacaacagtatggtgcttatctgcgccttgatgggatcagaatgcctgcacaaagaagtccaggatctagcttttctggacgtggtgtcgaaactaaggtcccacgaaaataagtcagtggctcagcaggcatctctgacggaacagcgtttgaccgtggaatcttag

SEQ ID NO: 131744 - DNA, 1824 bp, synthetic construct
  misc_feature 1..1824: note = Description of Artificial Sequence: Synthetic coding sequence
  source 1..1824: mol_type = other DNA
atggcggataatttatcagataccctgaagaagctgaaaatcacagccgtggacaagactgaggacagtctggagggctgtctggactgtcttctgcaggccctcgcccagaacaacaccgagacttccgagaaaattcaggccagcggaattctgcaactgtttgcctctctcttgactccacagtcttcctgtaaagccaaagtggctaacattatcgcggaagtggccaaaaacgagtttatgcgcatcccctgcgttgatgccgggctgatctcacccctagtgcagctgctgaactcaaaagaccaggaagtccttttgcagactggccgggcactgggcaacatatgctatgattcccatgaggggcggtccgccgttgatcaggctgggggggcacagatcgtcatcgaccacctcaggtcactctgttccataactgatccggcaaatgagaaactactgacagtgttttgcggaatgctgatgaactatagtaatgagaatgacagtttacaagcacagctcataaatatgggagtcattcccacactggtgaagttgctcggaattcattgccaaaacgcagctctgaccgaaatgtgtctggttgcctttggaaatcttgccgagctagaatcctccaaagaacaattcgccagcactaatatcgcagaggaactagtcaagctatttaagaaacagattgagcatgacaagcgggagatgatattcgaggtgctggcaccattggcagagaatgatgccataaagcttcagttggtagaggcggggttggtggaatgcctgctggaaatcgtacagcaaaaggtcgactctgacaaggaagacgacatcaccgagctaaaaactggcagtgatttgatggtgctgctgctcctcggcgacgagagtatgcagaagcttttcgagggaggtaaggggtcagtgttccaaagagtattatcatggatcccgagtaataaccaccagctgcaactggcaggcgcgcttgccattgctaacttcgcccgcaacgatgcgaactgtatacatatggtagacaacgggatcgtggagaagttgatggatttgctggatcggcatgtggaggatggtaatgtgacagtccagcatgctgctctgtctgcccttcgaaacctcgccatcccagttattaacaaggcaaaaatgctctcggccggtgtgactgaagctgttctgaagttcttaaagtccgaaatgccacctgtccagtttaaactgctcggaacgctgaggatgctgattgacgctcaggaagccgccgaacagctgggcaagaacgttaagctggtagagagactggtggagtggtgcgaggccaaagatcacgccggcgttatgggagagtctaatagactcttgtctgctctcatcagacacagtaaatccaaggatgtcatcaagaccatcgtgcagagcggagggattaagcatctggtcacgatggctacatcagagcacgtgattatgcagaatgaagcactagtggctctagctctcatcgccgcgctggaactggggacagccgagaaggatctcgaatccgccaagctggtgcaaatcttgcaccgactgctggccgacgagcgctctgctcctgagatcaaatacaacagtatggtgctgatctgtgctctgatggggtcagaatgtctgcataaagaagttcaggacctagccttcctggacgtggtatctaagctgaggagccatgagaacaaaagcgttgctcagcaggctagtctgaccgagcagcgcctgacagttgagtcttag

SEQ ID NO: 131745 - DNA, 555 bp, synthetic construct
  misc_feature 1..555: note = Description of Artificial Sequence: Synthetic coding sequence
  source 1..555: mol_type = other DNA
atgagggaatacaaacttgtcgtcctcggctccggcggcgtcggcaaatctgcgcttactgtgcagttcgtgcagggcattttcgtcgagaagtatgatcccaccattgaagacagctaccgcaagcaggtagaggtggacgcccagcagtgtatgcttgaaatccttgatactgccgggactgaacagtttacagctatgcgagatctgtatatgaagaacggccagggcttcgctttggtatactctattaccgctcagtctaccttcaatgacttacaagatctcagggagcagattctgcgggtaaaagataccgacgacgtgcccatgatcttggtaggcaacaaatgtgatttggaggatgagcgggttgtggggaaagaacagggtcagaacctcgctcgccaatggaataattgtgcctttcttgagagttctgcgaagtctaagatcaatgtaaacgaaattttttacgacttggttaggcagataaatagaaagacccctgttccaggcaaggcccgcaaaaaatcatcatgtcaattgctttag

SEQ ID NO: 131746 - DNA, 555 bp, synthetic construct
  misc_feature 1..555: note = Description of Artificial Sequence: Synthetic coding sequence
  source 1..555: mol_type = other DNA
atgagggagtataaacttgtggttctcggatccgggggcgtgggtaaatctgcattaactgtacagtttgtccaagggatcttcgtggagaagtatgatcccacaattgaggattcttaccgaaaacaggtggaggtggatgcccagcagtgtatgctggagattcttgacaccgcgggtacagaacaatttactgcaatgcgggacttgtacatgaaaaatggccagggcttcgctctcgtgtactcaatcacagcccagagcaccttcaatgatctgcaggacctccgcgagcagatcctccgcgtcaaggataccgacgacgtgcccatgatccttgtcgggaacaaatgtgaccttgaagacgaacgtgtagtcgggaaagagcagggccagaacctggcaaggcaatggaacaattgcgcttttctcgaatcttcagcaaaaagtaagatcaatgttaatgagatattctacgatctggtgcgtcagattaatagaaagacaccagtccccggtaaagcccgtaaaaagagttcctgtcaactactgtag

SEQ ID NO: 131747 - DNA, 357 bp, synthetic construct
  misc_feature 1..357: note = Description of Artificial Sequence: Synthetic coding sequence
  source 1..357: mol_type = other DNA
atgcgagacctatatatgaagaacggtcagggcttcgctttggtatattctatcactgcacagagcactttcaatgatttgcaggatctacgcgagcagatcctgcgggtgaaagacacggacgacgtaccaatgatactcgtgggcaataagtgtgacctggaggacgagcgcgtcgtgggaaaagagcagggacagaacctggctcgtcagtggaacaattgcgccttcctagagtcctccgccaagagcaagattaatgttaatgaaatattctacgacctggtgaggcagatcaaccgcaaaacgcccgtacctggcaaggcccgcaagaagtcctcctgccaactcctctag

SEQ ID NO: 131748 - DNA, 555 bp, synthetic construct
  misc_feature 1..555: note = Description of Artificial Sequence: Synthetic coding sequence
  source 1..555: mol_type = other DNA
atgagggagtacaaattagttgtcctggggagtgggggtgtcggaaaatccgccttgactgttcagtttgtccaagggatctttgtagaaaagtacgacccaacaattgaagattcttaccgcaagcaagtggaggtggacgcacagcagtgcatgctggagatcctggacaccgccggcacagaacagtttaccgctatgagggatttgtacatgaagaacggacaggggttcgccctggtatacagtatcactgcgcagagcactttcaacgacctgcaggatctgcgggagcagatcctacgcgtgaaagacacagatgatgtcccaatgattttagtggggaacaaatgcgatctggaagacgagcgtgtcgtgggtaaagagcagggccagaatctcgcacgccagtggaacaattgtgcgttcttagagtccagtgctaagtctaagatcaacgtcaacgaaattttttacgatctcgtgcgccaaataaatagaaagacccctgtgcctgggaaggcacgtaagaaatcttcttgtcaactactctag

SEQ ID NO: 131749 - DNA, 99 bp, synthetic construct
  misc_feature 1..99: note = Description of Artificial Sequence: Synthetic coding sequence
  source 1..99: mol_type = other DNA
atgagagaatataagttagtggtcttaggaagcggcggggtgggcaaatccgccctgaccgtgcagttcgtgcaggggatctttgttgagaagtactag

SEQ ID NO: 131750 - DNA, 429 bp, synthetic construct
  misc_feature 1..429: note = Description of Artificial Sequence: Synthetic coding sequence
  source 1..429: mol_type = other DNA
atgcgcgaatataaactggttgtcttggggtccggcggagtggggaagagcgccctcgaacagttcaccgcaatgcgggacctttacatgaaaaacgggcagggcttcgcactcgtgtatagtatcacagcacagagtacgtttaacgatctgcaggatctgagagaacaaatcctgagggttaaagacactgacgacgtgcccatgattctggtgggcaataaatgcgatttagaagacgaacgggtcgtgggcaaggagcagggtcagaatctggctcgtcagtggaacaactgcgcgtttctcgagtctagcgcaaaaagcaagatcaacgtgaacgagatattctatgatcttgtccgccagatcaaccggaaaactccagtcccaggcaaggctcgtaaaaaatcttcttgccagctgttgtag

SEQ ID NO: 131751 - DNA, 384 bp, synthetic construct
  misc_feature 1..384: note = Description of Artificial Sequence: Synthetic coding sequence
  source 1..384: mol_type = other DNA
atgagagagtataagctggttgtgctagggagtggaggtgtcggtaaatcagccctgacagtccagttcgttcagggcatttttgtcgaaaagtacgaccccactatcgaagactcttaccggaagcaggtcgaagtagatgcacagcaatgcatgctggaaattctggacaccgctggaactgagcagtttacggctatgagagacctgtacatgaagaacgggcaagggttcgctctggtgtattccatcaccgcacaaagcacttttaacgaccttcaagatttgcgagaacagatcctgagagtgaaggatactgacgacgtgccaatgattttagtgggtaacaaatgcgacctggaagacgagcgtgtggtaggatag

SEQ ID NO: 131752 - DNA, 429 bp, synthetic construct
  misc_feature 1..429: note = Description of Artificial Sequence: Synthetic coding sequence
  source 1..429: mol_type = other DNA
atgagggaatacaagctcgtggtactgggtagcgggggggtcggcaaaagtgcactgaccgttcaatttgtgcagggcatcttcgtagagaaatacgaccccacaatagaggacagttatcgcaagcaggttgaggtagatgcccagcagtgtatgctggaaatattagataccgccggcaccgaacaattcactgctatgcgcgatctgtacatgaaaaacggccagggcttcgctttggtgtattccatcacggctcagtcaacctttaacgatctgcaggacttgcgcgagcaaattcttcgcgtgaaagacacagacgacgtacccatgatcctcgtgggcaacaaatgtgatttagaagacgaacgggtggtgggcaaggagcagggccagaacctagataacggcacaaccgtccacagttag

SEQ ID NO: 131753 - DNA, 147 bp, synthetic construct
  misc_feature 1..147: note = Description of Artificial Sequence: Synthetic coding sequence
  source 1..147: mol_type = other DNA
atgagagagtacaagctggtcgtgctgggcagtggtggagtagggaaatctgccttgacagtccagttcgtgcagggcatctttgtcgagaagtacgaccccaccatagaggatagctatagaaaacaggtggaagtcgatgcttag

SEQ ID NO: 131754 - DNA, 36 bp, synthetic construct
  misc_feature 1..36: note = Description of Artificial Sequence: Synthetic coding sequence
  source 1..36: mol_type = other DNA
atgcgggagtacaagttagtggtgttagggagttag

SEQ ID NO: 131755 - DNA, 264 bp, synthetic construct
  misc_feature 1..264: note = Description of Artificial Sequence: Synthetic coding sequence
  source 1..264: mol_type = other DNA
atgagggagtataagctggtggtattaggcagtggtggggtgggtaagtcagctttgacagttcagttcgtacagggcatcttcgtcgaaaagtacgaccccactattgaggacagttaccggaaacaggtcgaagtcgatgcccaacagtgtatgctagaaatactggataccgccggaactgagcagtttaccgcaatgcgtgacctctatatgaagaatggccagggattcgcgttagtatactcaattacagcacagtag

SEQ ID NO: 131756 - DNA, 555 bp, synthetic construct
  misc_feature 1..555: note = Description of Artificial Sequence: Synthetic coding sequence
  source 1..555: mol_type = other DNA
atgcgagaatataaactcgtggtcctcggctcaggcggagtgggcaaaagcgccctgacggtccaatttgtgcaaggcatttttgtggagaaatacgatcccaccatcgaggactcgtacaggaaacaagttgaggtggacgctcagcaatgcatgctagaaatactggacaccgccgggactgagcagtttacggctatgagggacttgtatatgaagaacggacagggctttgctcttgtgtattcaatcacagcacagagtacctttaacgatctgcaagatctaagagagcagatactgcgggtgaaggacacagatgatgtgcctatgattctggtgggtaataagtgtgatctcgaggatgagcgcgttgtcggaaaagaacaaggccagaaccttgcaagacagtggaataactgcgcttttttagaaagttctgccaaaagtaagatcaacgtgaatgaaattttttatgacttggtccgacagattaatcggaaaacccccgtgccaggcaaggcaagaaaaaagtccagctgtcagctcctgtag

SEQ ID NO: 131757 - DNA, 306 bp, synthetic construct
  misc_feature 1..306: note = Description of Artificial Sequence: Synthetic coding sequence
  source 1..306: mol_type = other DNA
atgcgggagtacaaactcgttgtgctgggatctggcggagtgggcaagagtgccctaaccgtccaatttgtccaagggatctttgtcgagaaatatgaccccacaatcgaggactcataccgcaagcaggtcgaagtggacgcccaacagtgcatgttggagatcctcgacacagcaggaacagagcagttcaccgctatgagagatctgtacatgaaaaatgggcagggcttcgccctggtgtattccataaccgcccaatcaacttttaatgacctgcaggacctgagagaacagattctgtag

SEQ ID NO: 131758 - DNA, 162 bp, synthetic construct
  misc_feature 1..162: note = Description of Artificial Sequence: Synthetic coding sequence
  source 1..162: mol_type = other DNA
atgcgagaatacaagttggtagtgcttggttcgggcggagtggggaagtctgcattaaccgtgcagttcgtgcaggggatcttcgttgagaaatatgacccaacaattgaggatagctatcgcaaacaagtggaggtggacgcccagcaatgtatgctgtag

SEQ ID NO: 131759 - DNA, 429 bp, synthetic construct
  misc_feature 1..429: note = Description of Artificial Sequence: Synthetic coding sequence
  source 1..429: mol_type = other DNA
atgagggaatacaaattggtcgtgttaggaagtggcggagtgggaaagagtgccctcgaacagttcacggcgatgcgcgacttgtacatgaaaaacgggcagggctttgcattggtgtactcgatcacagcgcaaagcaccttcaacgatttgcaggacctccgggagcagatcctgcgggttaaagatactgatgatgttccgatgatcttggtcggcaacaagtgtgaccttgaagacgagagggttgtcggaaaagaacagggccagaatctggctagacagtggaataattgcgcctttttagaatcttctgcaaagtctaagatcaatgttaacgagatcttttacgatctcgttaggcaaatcaaccgcaaaacccccgtacctggaaaggcgagaaagaagtctagttgtcaactgctatag

SEQ ID NO: 131760 - DNA, 498 bp, synthetic construct
  misc_feature 1..498: note = Description of Artificial Sequence: Synthetic coding sequence
  source 1..498: mol_type = other DNA
atgcgggagtacaagctggtggtcctgggtagcggtggtgtgggcaagtctgcactgaccgtgcaatttgtgcagggaatttttgtcgaaaagtatgatcctactattgaagatagctaccgtaaagagcaatttaccgcaatgagggacctgtatatgaaaaacggacagggatttgccctcgtttactccatcaccgcccagtccacattcaacgatctgcaagacctccgcgagcagatactaagggtgaaggacaccgacgatgtaccgatgatcctggtgggcaacaagtgcgacctggaagacgagcgagttgtgggcaaagaacaaggacagaatctcgcgaggcaatggaataattgcgccttcctcgaatcctcagctaagagcaaaatcaacgtaaatgagatcttttatgatttggtgcgacagatcaatagaaagacccccgtgcctggaaaagcacgcaagaagtcgagctgtcaactcctgtag

SEQ ID NO: 131761 - DNA, 420 bp, synthetic construct
  misc_feature 1..420: note = Description of Artificial Sequence: Synthetic coding sequence
  source 1..420: mol_type = other DNA
atgcgagagtacaagctggttgtgctggggagtggaggggtgggcaaaagcgctcttaccgtccagttcgtccaggggatttttgtcgagaagtacgatccaaccatcgaggactcatatcgcaagcaggtggaggtggatgcacagcagtgcatgttggaaatacttgatacggctggaacagagcagtttaccgcgatgcgggacctttacatgaagaacggtcaggggttcgctctcgtctacagcatcacagcgcagagcacttttaatgacttgcaggacctccgagaacagattctcagggtgaaggataccgacgacgtgcccatgattttggttggcaacaagtgcgacttggaggacgagagggtcgtaggtaaggagcagggacagaacttagcccgacagtggaattag

SEQ ID NO: 131762 - DNA, 282 bp, synthetic construct
  misc_feature 1..282: note = Description of Artificial Sequence: Synthetic coding sequence
  source 1..282: mol_type = other DNA
atgcgtgaatacaaactggtggtgctcggctcaggtggtgtcggcaagagcgccttgaccgtacaattcgtacagggaatcttcgtggagaaatatgatccaactatcgaagacagctaccggaagcaagtggaagtggatgcccaacagtgcatgctggagatcctggatactgccggaactgagcaattcaccgcaatgcgcgatttgtacatgaaaaacggccaaggatttgcactggtgtacagtatcaccgcacagtccacatttaacgatttatag

SEQ ID NO: 131763 - DNA, 36 bp, synthetic construct
  misc_feature 1..36: note = Description of Artificial Sequence: Synthetic coding sequence
  source 1..36: mol_type = other DNA
atgagggagtacaaactggtggtgctgggcagctag

SEQ ID NO: 131764 - DNA, 297 bp, synthetic construct
  misc_feature 1..297: note = Description of Artificial Sequence: Synthetic coding sequence
  source 1..297: mol_type = other DNA
atgagagaatataagctagttgttctcggaagcggtggcgtgggaaaatctgccttaaccgtccagttcgtgcagggaatcttcgtcgagaagtacgaccccaccattgaggactcgtatagaaaacaggtggaggtcgacgctcagcagtgtatgcttgagatcctggatactgcagggactgaacaatttaccgctatgcgggatctgtacatgaaaaacggacagggtttcgctcttgtgtattcgattaccgcccagtctaccttcaatgatctccaagacttaagggaatag

SEQ ID NO: 131765 - DNA, 414 bp, synthetic construct
  misc_feature 1..414: note = Description of Artificial Sequence: Synthetic coding sequence
  source 1..414: mol_type = other DNA
atgagggagtataaactcgttgtacttggcagcggaggcgttggaaagtcggccctgacagtgcagttcgttcagggtattttcgtcgaaaaatacgacccaacaattgaagactcctaccgcaaacaggtagaggtggacgcacagcaatgtatgctggagattcttgataccgctggaacagttcccatgatccttgtaggaaataagtgtgatctggaggacgagagagttgtgggcaaggaacaggggcagaacttagcccggcaatggaacaattgcgccttcctcgaatccagtgccaagtctaagataaacgtgaacgagatattttatgacctggtccggcagataaatcggaagacccccgtccctgggaaagccagaaaaaagagctcttgtcagctcctttag

SEQ ID NO: 131766 - DNA, 357 bp, synthetic construct
  misc_feature 1..357: note = Description of Artificial Sequence: Synthetic coding sequence
  source 1..357: mol_type = other DNA
atgcgagacttgtacatgaaaaacggtcagggcttcgccctggtctatagcattacagctcagtcaacctttaacgatctccaggacctcagagagcagatcctgcgggtgaaggatacagatgacgtaccaatgattttggtcggcaacaagtgtgatctggaggacgaacgcgtcgtgggaaaagagcaaggacaaaacctagcgaggcaatggaataattgcgccttcctggaatcctctgctaagagcaagattaacgttaatgaaattttctacgacctggtgcgccagattaaccgcaaaaccccggtgccagggaaagctaggaaaaaaagtagctgccaattgctttag

SEQ ID NO: 131767 - DNA, 369 bp, synthetic construct
  misc_feature 1..369: note = Description of Artificial Sequence: Synthetic coding sequence
  source 1..369: mol_type = other DNA
atgcgagaatataagttggtggtgctcggctctggaggagtaggcaagtccgcattaacggtccaattcgtgcagggtatatttgttgaaaagtatgatccaactattgaggatagctacagaaagcaggtagaagttgacgctcagcagtgtatgttggaaattctggatactgcaggaaccgagcagttcaccgccatgagagacctttacatgaagaacggtcagggatttgctcttgtgtactctataacggcccagtctactttcaacgacctccaggacctgagagaacagattctcagagttaaggacacggatgatgtgcccatgatcctggttggcaataagtgcgacctggaggactag

SEQ ID NO: 131768 - DNA, 258 bp, synthetic construct
  misc_feature 1..258: note = Description of Artificial Sequence: Synthetic coding sequence
  source 1..258: mol_type = other DNA
atgagagaatacaagcttgtcgtacttggcagtgggggtgtgggaaagagtgccttaacagtccagtttgtgcagggtattttcgtggagaagtacgaccccaccattgaggattcctaccggaagcaagtagaggtggacgcacaacagtgtatgctggagatccttgataccgcgggcaccgagcagttcactgccatgagggacctttacatgaagaacggccaaggcttcgccctcgtgtacagcatcacatag

SEQ ID NO: 131769 - DNA, 552 bp, synthetic construct
  misc_feature 1..552: note = Description of Artificial Sequence: Synthetic coding sequence
  source 1..552: mol_type = other DNA
atgagagagtataaagttgttgtgcttggcagcgggggcgtggggaagtcagcactgaccgttcaattcgtgactggaacctttattgagaagtatgatcccacaattgaagatttttataggaaggaaattgaggtggatagctctcccagtgtgctggaaatcctcgacacggctggcacagaacagttcgcttccatgagggacctgtacattaaaaacggacagggtttcatcctcgtttacagcctcgtcaatcagcagtccttccaagacattaagcccatgagggaccagatcatcagggtaaagagatacgagaaggtgcccgtaattcttgtgggtaacaaggtcgacctggaaagcgaacgcgaggtatcttcctccgagggaagagccctagctgaagagtggggctgtccatttatggagacatctgccaagtccaagactatggtcgatgaactgtttgctgagatcgtccggcagatgaattacgcagcccagcctgacaaggatgacccttgttgcagcgcgtgcaacattcagtag

SEQ ID NO: 131770 - DNA, 1671 bp, synthetic construct
  misc_feature 1..1671: note = Description of Artificial Sequence: Synthetic coding sequence
  source 1..1671: mol_type = other DNA
atgaatgagggagccccgggagactccgacctggagactgaggccagagtaccctggtcaattatggggcattgtcttcggacaggccaggcacggatgtccgcgacaccaactccagctggggagggggcaaggcgagacgaactgttcggcattttacagatactccaccagtgtattttaagctccggcgacgcatttgttctgactggagtttgttgctcctggcggcagaacgggaaaccaccttacagccaaaaggaggacaaagaggtgcagacaggctacatgaatgcccaaatcgaaatcatcccctgcaagatctgcggagataaaagcagcggaatccactacggcgtgataacctgcgagggctgcaaagggtttttccgtaggtcccagcagagtaacgccacctattcatgtccacggcagaagaattgtttgatcgatcgtacttcgcgcaaccgttgtcagcattgcagattgcagaaatgtctggcggtgggaatgagccgcgatgctgtgaaattcggacgtatgagcaagaagcaacgggattcactttacgctgaggtgcagaaacatcgaatgcagcaacagcagagggaccaccagcagcaaccaggcgaggctgaacctctcacccccacctataacatttccgccaacggccttactgagcttcatgacgatctgtccaattacatcgacggtcacactccggaaggctccaaagccgactctgcggtgtcctccttctacttggacattcaacctagtcctgaccagtctggcctggatattaacgggattaaacccgaacctatttgtgattatacgccagcatctgggtttttcccttattgttcgttcaccaacggcgagacctctcccaccgtgagcatggcagaactggaacaccttgcgcagaacatttccaagtcacacttggaaacttgtcagtacctccgagaggagctgcagcagatcacttggcaaacctttctgcaggaagaaatcgaaaattatcagaataaacagcgtgaggtgatgtggcagctgtgcgccatcaaaatcacggaagcaattcaatacgtggtagagtttgccaagaggattgatggcttcatggaactctgtcagaacgaccagatagtcctgctcaaggccggtagccttgaggtggtcttcatccgcatgtgtagggccttcgattcgcaaaataacaccgtgtactttgacggcaagtacgccagccctgatgtcttcaagagtctcgggtgtgaagacttcatttctttcgtcttcgagttcggcaagtctctatgtagtatgcacctgacagaagacgaaatcgctctgttttctgctttcgtactaatgagcgcagaccgcagctggctccaggaaaaggtaaaaattgagaaactgcaacagaagatccaactagctctgcagcacgtgcttcagaaaaatcatagggaggacgggatattaacaaaactgatctgcaaggtctccaccttgcgggctttgtgtggacgccataccgagaagctgatggccttcaaagccatttatcctgatattgttcgcttacactttcctcctttgtacaaagagctgttcacctcggaattcgagcctgccatgcagatcgatggatag

SEQ ID NO: 131771 - DNA, 1647 bp, synthetic construct
  misc_feature 1..1647: note = Description of Artificial Sequence: Synthetic coding sequence
  source 1..1647: mol_type = other DNA
atgaatgagggtgcacctggtgacagcgatctggagacagaggccagagtcccatggtccataatggggcactgtttgcgcacagggcaagcacggatgtctgcaacacccacgcccgcaggcgagggagcccggtcttccagcacttgtagcagcctgagcaggttattttggagccagttggagcacattaattgggatggagcaacagccaagaattttattaacctgcgcgagttttttagcttcctgctacccgctttgaggaaagctcagatagaaattatcccctgtaagatctgtggcgataaatcctctggtatccattatggcgtgatcacctgcgaaggatgcaagggcttttttagacgatcccagcagagcaatgccacttactcttgccctagacaaaagaactgcttgatcgatcgcactagtcggaaccggtgccagcattgtcgcctgcaaaagtgcctagccgtgggaatgtcacgagacgccgtgaagtttggacggatgagtaagaaacagcgcgacagcctctacgctgaggtacaaaaacatagaatgcagcaacagcagagggaccaccagcagcaaccaggcgaggcggaacctctgacccctacctacaacatttcagcaaatgggctcactgaactccacgatgacctcagcaactatatcgatggccacaccccagagggctccaaggccgattcggccgtgtcttccttttacctggacattcagccgtctccagatcagtccggactcgacatcaatggtataaagcctgagccaatttgcgactatacacctgccagtggcttcttcccttactgttcctttactaatggcgagacttcccctacggtttccatggcggaactggagcaccttgcccagaacatttcaaagtcacaccttgagacctgtcagtaccttcgcgaagagttacagcaaattacatggcagacctttttgcaggaagagatcgaaaactaccagaataaacaaagggaagtcatgtggcagctttgcgccattaaaattactgaagccattcaatacgtggtcgagttcgccaagcggattgacggttttatggaactctgccagaacgatcagatagtgctccttaaagcaggttccttggaagtcgtcttcatccgaatgtgtagagccttcgactcccagaataatactgtgtatttcgatggcaaatacgcgtcaccagatgtgtttaagtcccttggttgtgaggatttcatttctttcgtttttgaattcggcaagtctctgtgctcgatgcacttaacggaggacgagattgccctgttcagtgcgtttgtcttgatgtcagccgatcgctcctggctccaggagaaggtgaagatcgaaaagctgcagcagaaaattcagctggcgctgcagcacgtcctgcagaaaaatcaccgtgaagacgggattctcactaagctcatttgtaaagtcagcacactgagggctctgtgcgggaggcataccgaaaaactgatggccttcaaagctatctatccagatatcgtcagacttcactttccgcccctttacaaggaactctttacctcggagttcgagccagcgatgcagatcgatgggtag

SEQ ID NO: 131772 - DNA, 1572 bp, synthetic construct
  misc_feature 1..1572: note = Description of Artificial Sequence: Synthetic coding sequence
  source 1..1572: mol_type = other DNA
atggaatctgccccggccgcaccagatccagctgcctctgaacccggttccagcggcgccgatgctgctgccggtagtcgcgaaacgcctctgaatcaggaaagcgcccgaaagagcgagccaccagcacccgtcaggcggcagtcctattctagtacatctagaggcatctccgtgacaaagaagacccatacctcccagatagagatcatcccctgtaagatttgcggagataagtctagcggaatccactacggtgttatcacttgtgagggatgcaaggggttcttccggcgtagccagcagtctaacgcaacctatagctgccctcggcagaagaattgtttgatagatcgtacatcaaggaaccggtgtcagcactgtcgcttacagaagtgcctagccgtaggcatgagccgcgatgcggttaagttcggaagaatgagtaagaagcagcgcgacagtctgtacgccgaggtacagaagcatcggatgcagcaacagcaacgggaccaccagcagcagccgggcgaagctgagcccttgactcccacttacaatatatccgcaaatggtctaaccgaacttcacgatgatctcagcaattatatagatggtcacacccccgagggtagcaaggcagacagcgctgtgtcctctttctacctggacattcaacctagccctgatcaatcaggactggatatcaacggaatcaaacccgagcctatttgtgattatacacccgcctccggcttctttccttattgctcgttcacaaacggcgagacgtcccctaccgtgtcaatggctgaacttgaacatttggcccaaaatatcagtaaatcacacctggagacctgccaatatctgcgggaggaacttcaacagattacttggcaaactttcttacaagaggaaattgaaaactaccagaacaagcagcgggaagtaatgtggcagctgtgcgcgatcaagatcacagaggctatccagtatgtcgttgagtttgctaaacggattgacggattcatggagctgtgtcagaatgaccagatcgttctccttaaagccgggtcactggaggtggtctttattcggatgtgtcgggccttcgactcccagaacaacacagtctacttcgacgggaagtacgccagccccgatgtgtttaagtcacttggatgtgaggactttatctcattcgtgtttgagttcgggaagagcctttgctctatgcacctgactgaagatgaaatagctcttttttcagcttttgtactcatgtccgcggatagaagctggttgcaggagaaggttaagatcgaaaagctgcagcagaaaattcagctagccctgcagcatgtgttgcagaaaaatcaccgcgaggacgggatcttgaccaaactcatctgtaaggttagcactttacgcgcattgtgcgggaggcacaccgaaaaactaatggctttcaaagctatataccctgatattgtgagactacattttcctccactgtataaggagctgttcacaagtgagtttgagcctgcaatgcagattgacggttag

SEQ ID NO: 131773 - DNA, 1407 bp, synthetic construct
  misc_feature 1..1407: note = Description of Artificial Sequence: Synthetic coding sequence
  source 1..1407: mol_type = other DNA
atgatgtatttcgttatcgccgcaatgaaggctcagatagagattattccatgcaagatctgcggcgataaatcatctggcatccactacggggtcattacttgtgagggttgcaagggctttttcaggcggtcccagcagtccaacgccacatatagctgtccccgccaaaaaaactgtcttattgacagaactagccgcaacagatgtcagcattgccgtctgcagaagtgtctggccgtgggcatgtctagggacgcagtcaaatttggaaggatgtctaagaaacaaagggactccctgtacgcagaggtacagaagcacagaatgcagcagcagcagagagaccatcagcagcagccgggcgaggccgaacccttaacaccaacctacaatattagtgccaatgggttaactgaactgcatgacgacctctccaattatatcgatggccatactccggagggctcaaaagctgattccgctgtttcctctttctacctggacatccagccttcccccgatcaaagcgggctcgatatcaacggcatcaagccagagcccatttgtgactacacaccagcatcagggtttttcccctactgttcatttacgaacggagagacgagcccaacggtcagtatggcggaactcgaacacctcgctcagaatatctccaagtcccatttagaaacatgtcagtatctgagagaagagctccaacagatcacatggcaaacttttctgcaggaagaaattgagaactatcagaacaagcagcgggaagtcatgtggcagctttgcgccattaaaatcacagaagccatacagtacgtggtggaattcgccaagcgaatcgacgggttcatggaactctgccagaacgatcagatagtcctccttaaggccgggagtctcgaagtggtgttcatccgcatgtgccgggcattcgacagtcagaataataccgtgtattttgacggaaagtacgccagccctgatgtctttaagagcttaggatgtgaggacttcatatcatttgtgtttgaattcggcaaatccctgtgtagtatgcatctgaccgaggacgagatagcgctgttctcagccttcgtgctgatgagtgctgaccgttcttggcttcaggagaaagtgaaaattgaaaaactgcagcaaaaaatccaactagcacttcagcatgtgctgcaaaaaaatcaccgagaggatggcatcttgacaaagctgatctgtaaagtgtctactctaagggccttatgcggccgacacacagagaaacttatggctttcaaggccatctatccagatattgttcgcctgcactttcccccactttataaagaactattcacttcagaatttgaacccgccatgcagatcgacggatag

SEQ ID NO: 131774 - DNA, 1557 bp, synthetic construct
  misc_feature 1..1557: note = Description of Artificial Sequence: Synthetic coding sequence
  source 1..1557: mol_type = other DNA
atggatagggcccctcagcgacagcaccgcgcctccagggagcttctggcagccaaaaaaacccacacgtcccagatcgaggtaatcccttgcaaaatttgcggagataagagcagtggcatccactatggcgtgatcacatgcgagggatgtaagggcttttttcggagaagtcagagatgtaacgcagcatactcttgtacaaggcagcagaactgtcctattgatcgcacttcccggaaccggtgtcagcattgtcgcctacagaaatgccttgcgctgggaatgtctcgggatgccgtgaagtttggaagaatgagtaaaaaacagcgagatagcctccatgccgaggttcagaaacaactgcaacagagacagcagcaacaacaagagcccgtggtgaaaacgcctcctgctggcgcccaaggtgcggacactctgacctacactttaggcttgccggatggacagctaccactgggctcttcgccagacctgccagaggcaagcgcatgcccccccgggcttctaaaagccagtggatcaggcccctcctacagcaataatttggctaaggctggcctaaacggcgccagttgccacttagaatactcccctgagagagggaaggccgagggtagggagtctttctattccactggctcccagcttacaccagatcggtgcggcctccggttcgaggagcacagacatcccggacttggggagttgggtcaaggacccgattcctacgggagcccgagcttcaggtccacccccgaagctccttacgcaagtttgacggaaatcgagcacctggtacaatctgtatgtaagagctatcgtgagacctgtcaactgaggctcgaggaccttcttcgtcagagaagtaatatcttttcaagagaggaggtgacgggctaccagcggaaaagcatgtgggaaatgtgggaacgctgcgctcatcacctcactgaagctatccaatacgtggtggagttcgccaagcggttgtctggcttcatggagctgtgccagaacgatcagattgtcctccttaaggctggtgcaatggaggtggtgcttgtcagaatgtgtagagcctacaacgcagacaaccggacagtgtttttcgaaggaaaatatggcggaatggaattgttccgagcattgggctgctccgagctgatttcaagcatattcgatttctcccatagtctgagcgctctgcacttcagtgaggacgaaatagcattgtacactgccttagttctcatcaacgcccacagacctggcctgcaggaaaagcgcaaggtcgaacagctgcagtacaacctggaattagccttccaccatcacctgtgtaagacgcacagacagagtatattagccaagctgcctcccaagggcaagctcaggtcactgtgctctcaacacgtagagagactgcagatcttccagcatctgcatccaatcgtagtgcaggcggccttccctccattatataaggaactgttctccacggagactgagtcacccgtcggactttccaaatag

SEQ ID NO: 131775 - DNA, 1494 bp, synthetic construct
  misc_feature 1..1494: note = Description of Artificial Sequence: Synthetic coding sequence
  source 1..1494: mol_type = other DNA
atgcggacacagattgaagtgatcccttgtaaaatctgcggggataagagcagcggtatacattacggcgtgattacgtgtgaagggtgcaaggggttcttcagacgttcccaaaggtgtaatgccgcgtacagctgtacccgccagcagaactgtcctatcgatcggaccagcagaaaccggtgccaacactgtagattacagaagtgcctcgctttgggtatgagtcgtgacgccgtgaagttcggtagaatgtctaaaaagcagcgcgatagtctccacgccgaagtccagaagcagctgcagcagcggcagcaacaacagcaggaacccgtggtgaagacccccccggctggagcccagggggcagacactcttacatatacactggggctgccagatggacagctgcctttaggcagctcccctgacctcccggaggcctccgcctgtccccctggattgcttaaggcttctggttctggtccatcctacagcaacaacctagccaaggctggactgaatggagcaagctgccatttggaatacagtccagagagggggaaggccgaagggagagaaagcttttatagtactgggagccagcttacgccggataggtgtggcctgcgctttgaagaacaccgccaccctggtctaggggagttgggacaaggtcccgacagctacggtagcccttccttcagaagcaccccagaggcaccatatgcttctttgacagaaattgagcacctagttcaatccgtctgtaaatcctaccgggagacatgtcagttgaggctagaagacctattgagacagcgtagcaatatattctctagggaagaagtcactggttaccaacggaagagcatgtgggaaatgtgggaaagatgcgcccatcacttgacagaggctattcaatatgttgtcgagtttgcaaaaaggctgtctggcttcatggaactttgccaaaatgaccaaattgtgcttcttaaggcaggtgcaatggaggttgtcttagtgagaatgtgcagagcatataacgccgataatcgcaccgttttcttcgagggcaaatatggcgggatggaactttttcgggcactcggctgctctgagctaatttcctccatatttgacttttcccacagtctgtccgcgctacatttcagtgaggacgagatcgctctgtataccgccctggtactgatcaatgcccaccgcccgggcctgcaagaaaagcgcaaggtcgagcagctgcagtataatctggaactggcctttcaccaccacttatgtaaaactcatagacagtctattctcgccaagttgccccccaaagggaaactgaggtctttgtgctcacagcacgtggagcggctgcaaattttccagcacctgcaccctatcgtggttcaggccgcctttcccccattgtacaaagagctgttctctacggaaaccgagagtccagtcgggttgtctaaatag

SEQ ID NO: 131776 - DNA, 1719 bp, synthetic construct
  misc_feature 1..1719: note = Description of Artificial Sequence: Synthetic coding sequence
  source 1..1719: mol_type = other DNA
atgtggggcacaggcccctcggccgggaaagaccggatgtctgggcgcccatggccccacccctggtccaagagtggaacaccctctgaacaggatcgtcgcgcaacaggcctcgtctcgtgtgaacacggaggcgggaagtttgagggacagtcccatcaggctccaggcccccctggcggaggacgtaccggctgcctcgagcttttagccgccaagaaaacgcacacatcacagattgaagtgatcccctgcaaaatttgcggtgacaagtcatccgggatccactatggcgtaattacctgcgagggttgcaaaggtttctttcggcgttctcagaggtgcaacgccgcgtattcttgcacacggcagcagaactgccccattgacagaacatcgaggaacaggtgccaacattgtagacttcagaaatgtctagcgctgggaatgtcacgcgatgcagtgaaatttgggaggatgtccaagaaacagcgggacagcctgcatgccgaggtgcagaagcagctgcagcagagacagcagcagcagcaggagcctgtcgtaaagacacccccagccggcgcccaaggggccgatactctgacatacacactgggtctcccagacggacagctgccactaggttccagtcccgacctcccagaggccagcgcttgccctcccgggctgctgaaggctagcggaagtggacccagctacagcaacaacctggcgaaggcgggcctaaatggcgctagttgccatcttgagtactcaccggaacgggggaaggcggagggacgtgagtccttctactctaccggatcacagctcacccctgaccggtgcggacttcggtttgaagaacataggcaccccgggctgggtgagcttggacaaggcccagacagttatgggagcccttctttccgctctacacctgaggctccatatgccagtttgaccgagattgagcatttagttcagtccgtctgtaagtcttatcgcgagacctgtcagctccgcctggaggacttgctgcgccagcgttcgaacatcttctcgagggaggaggtcacgggataccagcgaaaaagcatgtgggagatgtgggagcggtgcgcccatcatctgaccgaggcaatccagtacgtagttgagttcgccaaaaggctaagtggctttatggaactgtgccaaaacgatcaaatagtattgcttaaggcaggagctatggaagtggtgctcgtgcgcatgtgcagagcctataacgcagataaccggacggtgttttttgaagggaaatacggcggcatggaacttttcagagccctgggttgttcggagcttatttcaagcatctttgacttctcccactcgctgagcgccttgcacttttcagaagacgaaatcgctttgtataccgccctggtcctgatcaatgcccacagaccaggactccaggaaaagaggaaggtagagcagctacagtataacctggaactagcgtttcatcaccacctatgtaaaacgcacaggcagtctatcctggcaaagttaccacccaaagggaagttacgaagcctgtgctctcagcacgttgagaggctgcagattttccaacacctgcatccgatcgtggttcaggccgcatttccccccctctacaaggagcttttttcgacggagacagaatcgcccgtgggcctgagtaagtag

SEQ ID NO: 131777 - DNA, 2835 bp, synthetic construct
  misc_feature 1..2835: note = Description of Artificial Sequence: Synthetic coding sequence
  source 1..2835: mol_type = other DNA
atgctggactccttctcacaagagtccacgctccctttcagagaagccagaaaacgaacgagcttccaacccgtccaagtgtggcggaacttcaccgcctctcagactactgagagccctgcttgtagcggcgcctctctgggtgaaatgaccgcttggaccatgggggctagaggactggacaagaggggtagctttttcaagctgattgacactatcgcctccgaaattggagagctaaaacaggagatggtgcgcacggatgtgaacctggagaacgggctggagccggcagagacccatagtatggtaaggcacaaggacggcggatactccgaggaagaggacgttaagacttgtgctagggactccgggtatgactcattatccaacaggttgtctattttggatcgtctattgcatacacacccaatctggcttcagctgagcctgtccgaggaggaggccgccgaggtactgcaggcccaacccccaggcatctttttagtgcacaagtcaacgaagatgcaaaagaaagtgctctccttacgactgccctgtgaattcggggcgccgctgaaggagttcgcaatcaaggagagcacatacaccttttccctggaaggatccggaatttctttcgccgatctgttcagactgatcgccttctattgtatctctagagatgtgttacccttcaccttgaaacttccttacgcaatcagcacagccaaaagcgaggcacagctggaggaattggcccagatgggcctgaatttctggtctagtcctgctgacagcaaaccaccaaacctgccccctccccaccggccactttcaagcgacggcgtctgcccggctagtttaaggcaattgtgtctcattaacggtgtacactccatcaaaacaaggacgccttccgagctggagtgtagccagacgaacggtgctctgtgctttatcaatccgcttttcctgaaggttcattcacaagacctgtcgggcgggcttaagagacctagtacaagaacccccaacgccaacggcaccgagcggactaggtctcctcctccacgccctccacccccagccattaactccctgcacacttcccctcgcctggcccgcaccgagacccagacctctatgcctgaaacagtgaatcacaacaaacatggaaacgtagctctgcccgggacaaaaccaacccccatccccccccctcggctaaaaaaacaggcatccttccttgaagccgaggggggcgccaaaaccttgtcaggcggccgacctggggccgggcccgaactggagctcgggacagccgggtctccaggcggcgccccccctgaggcagctcctggtgactgcacacgagctccaccaccttcctctgagagtagaccaccatgtcatggtggccgccaacgtctctccgacatgtctatctcgacatcctctagcgactcccttgagttcgaccgatccatgcccctttttggttatgaggcagacacaaattcgagcttagaggactacgagggcgagtcagatcaggaaactatggcccctcccataaagtcaaagaagaagcgctccagcagcttcgtcctaccaaaactcgttaaatctcaactacagaaggtgtctggcgtgttttcctcattcatgactcccgagaaacgaatggtccggagaatagccgagctgagccgggacaaatgcacctacttcggttgcctcgtgcaggactatgtgtcattcctccaggagaacaaagagtgccatgtctcatcaacagatatgctgcaaacgattagacagttcatgacccaagtcaagaattatttatctcagtccagtgaattagatccccccatcgaatccttgatccccgaggaccagatagacgtggtcctggagaaagcaatgcataagtgcattctgaagccgttgaaaggtcacgtcgaagctatgctgaaagacttccatatggccgatgggtcgtggaaacagctcaaggagaacctgcagctggtgaggcagcggaatcctcaggagctgggcgtgttcgcacctacccccgatttcgtggacgtcgagaagatcaaggtgaagtttatgactatgcagaagatgtattcaccggagaagaaagtaatgctcctgctgagagtgtgtaagctgatttacacggttatggagaataactctggtagaatgtacggggcagacgactttctgccagtgctgacctacgtaatcgctcagtgtgacatgttggaattggatactgagattgaatacatgatggaactgctagatcccagcctattgcacggagagggcggctattaccttactagcgcctatggcgctttgtccctgattaaaaacttccaagaagagcaagcggctcggctcctgtcaagtgagaccagggacactctccggcaatggcataaaaggagaacaacaaacaggactattccctcagtggatgacttccagaactatctccgggttgcttttcaggaggtcaattccggatgtaccggcaaaacacttctggtgagaccttacattacaaccgaggacgtctgtcaaatatgtgctgagaagttcaaggtgggagaccccgaggaatatagtctctttctatttgtggatgagacttggcagcagctcgcagaagatacctatccccagaagatcaaggccgaattacacagccgacctcaaccccatatctttcactttgtatacaagagaatcaaaaacgatccttatggtatcatctttcagaacggagaggaagacctcaccacatcttag

SEQ ID NO: 131778 - DNA, 1389 bp, synthetic construct
  misc_feature 1..1389: note = Description of Artificial Sequence: Synthetic coding sequence
  source 1..1389: mol_type = other DNA
atgacagcttggacgatgggcgctagaggccttgacaaacggggatctttcttcaagctgatcgataccatcgcctcagaaattggggagttgaagcaagagatggtgcgtacagatgtgaacctcgaaaacggactagaacccgccgagacacactctatggtccgccacaaagacggtggctattcagaggaggaggatgtgaaaacgtgtgcgcgggattctggatacgactcgctctcaaaccggctatctatactagaccggctcctccacacacacccaatttggttacagcttagtcttagcgaggaagaagccgcggaagtgttacaggcccaaccaccaggcatattcctcgtacataaaagcactaagatgcagaagaaagtgctgagcctccgcctcccctgtgaattcggggctccccttaaagagttcgccatcaaggagtccacctacaacgtggttctcgaaaaagccatgcacaagtgtatactgaaaccactgaaggggcacgtcgaggccatgcttaaggattttcatatggcagacggatcatggaagcagctgaaggagaatcttcagttggtgcggcaacggaatcctcaggaattgggggttttcgcaccgacgcctgatttcgtcgacgtggaaaaaatcaaggtgaaatttatgaccatgcagaaaatgtacagtcccgaaaaaaaggtgatgctccttctacgagtgtgtaagctgatctacaccgtcatggagaataattccgggaggatgtatggggccgacgattttcttccagtcttgacttatgtaatagcacagtgcgacatgttggaactggatacagaaatcgagtatatgatggagctgttagacccatcccttttacacggcgagggcgggtactatcttacctccgcatacggagctcttagcttaattaagaacttccaagaggagcaagcggcgcgtctgctttcatccgagacaagggacacactgagacagtggcataagagaaggacaacaaacagaacaatcccctccgtggacgacttccagaactacctgcgggtggcgttccaggaagtgaactctggatgcaccggaaaaactctgttggtcaggccctatattactacagaagacgtgtgccagatttgcgccgagaagtttaaggtgggggatccggaagaatactctttgttcctatttgtggatgaaacctggcaacaacttgccgaagacacatacccccagaagataaaagccgaactgcatagtcgaccacagccacacatctttcactttgtgtataagcgcattaagaacgacccgtacgggattatttttcagaacggagaggaggacctgaccacttcgtag

SEQ ID NO: 131779 - DNA, 717 bp, synthetic construct
  misc_feature 1..717: note = Description of Artificial Sequence: Synthetic coding sequence
  source 1..717: mol_type = other DNA
atgtcatccggttattcctcactcgaggaggatgccgaggacttcttcttcaccgctagaaccagtttctttcgccgcgcgccccagggaaaacctaggagtggtcaacaggatgtcgagaaggagaaagagacgcatagttatctgtctaaagaagaaatcaaagagaaagtccacaaatacaacttggcagtgacagataagctgaagatgaccctgaattcaaatgggatctataccgggtttattaaagtgcagatggagctgtgtaaaccaccccagacttctcccaattcaggcaaactgtctccgtcctccaacgggtgcatgaacacgctccacattagcagcactaacactgtgggcgaggtgatcgaggccctcctgaaaaaattcctagtgaccgagtcacctgctaaatttgctctgtacaagcgctgtcatcgtgaagaccaagtttacgcctgcaaactatcagaccgtgaacatcctttatacttgcgcctggttgctggccctcggactgatacactcagttttgtactgcgtgaacacgagattggtgagtgggaagctttttctctgcctgagctgcagaactttctacgtatcctggacaaggaggaagatgagcagcttcagaacctcaaaagaagatatacggcatacagacagaagctcgaggaggcactgagagaagtgtggaagccagactag

SEQ ID NO: 131780 - DNA, 507 bp, synthetic construct
  misc_feature 1..507: note = Description of Artificial Sequence: Synthetic coding sequence
  source 1..507: mol_type = other DNA
atgaccctgaactcaaatggaatctacaccggctttatcaaagtgcagatggagctgtgtaagccgccccaaaccagcccaaattctggcaaattatctccttctagtaatgggtgcatgaacaccctgcacatctcaagcacaaacaccgtgggggaggtaatcgaggctctcctaaagaaattccttgtcactgagagtcccgccaaatttgccctttacaagcgttgtcacagagaggatcaagtttatgcttgcaaactctccgaccgcgaacatcccctgtacttgcgcttagtagccggaccccgtaccgacaccctctctttcgttcttcgggagcacgagataggggagtgggaggcctttagcctcccagagttacagaatttcctcaggatccttgacaaggaagaagatgagcagttgcagaaccttaagcgtcgatacacagcttatagacagaagttggaagaggcgcttcgcgaagtgtggaagccagattag

SEQ ID NO: 131781 - DNA, 717 bp, synthetic construct
  misc_feature 1..717: note = Description of Artificial Sequence: Synthetic coding sequence
  source 1..717: mol_type = other DNA
atgagtagtggctatagctcgctagaggaagacgccgaggactttttctttaccgccaggacctcatttttccgtagggctcctcagggtaaacctaggtccggacagcaggatgtcgagaaagagaaggagacccattcctatctgtctaaggaggaaataaaggagaaagttcacaaatacaacctggccgttaccgataaactcaagatgactttgaacagcaacggcatttacaccggattcattaaagtgcagatggagctgtgcaaacccccacagacttcccccaatagcgggaagctctctccctccagtaacggttgcatgaacacgcttcatatcagctccaccaacacagttggggaagttatcgaggctcttctcaaaaaatttttagtgactgaaagccctgcaaaattcgcgctctacaaaaggtgccatagggaggaccaggtttacgcctgtaagctcagtgatcgcgagcaccccctctacctgcgactcgtcgcgggccccagaaccgatactcttagctttgtcttgagagagcacgaaataggagagtgggaggctttcagcctccctgaactgcagaactttttacggatactcgataaggaggaggacgagcagctgcagaatcttaagcggaggtacactgcctatagacagaaactggaagaagcccttcgtgaagtctggaaaccggattag

SEQ ID NO: 131782 - DNA, 1014 bp, synthetic construct
  misc_feature 1..1014: note = Description of Artificial Sequence: Synthetic coding sequence
  source 1..1014: mol_type = other DNA
atgactatgatggcgcaccagtacccctcatggatctttatcaacgagaaaactttcatcacaagggagcaattaaactctcttctgaaaacgtacaacatcttttatgagaaccagaagaacttacacatcctatacggagaaacagaggatggaaagctgatcgtggaaggaatgctggacattttctggggggtgaaacggcccattcaactaaaaatccaggatgaaaaaccattcagctcattcaccagcatgaagtcctctgatgtgttttctagcaaaggcatgacgcgctggggcgagttcgacgatctatataggatctccgagctcgacaggacgcagatccccatgtccgagaagcggaattcccaggaggattacctgtcctaccacagtaacacactcaaacctcacgcaaaggatgaacctgattctcccgtactgtaccgcaccatgtccgaagccgctttggtgcgcaagcggatgaaacccctgatgatggataggaaggaacgccagaagaaccgcgcgagtattaacggacatttttataatcatgaaacttcaattttcatcccagcttttgagtccgaaaccaaagtgcgggtgaactcgaacatgcgtactgaggaagtgattaaacaactgctgcagaagtttaagatcgagaattcccctcaggactttgctttacacattatattcgccacgggggagcagaggagactgaaaaagacagacatccccctcctgcagcgtctgcttcaaggtccctctgagaaaaatgccaggatattcctcatggacaaagacgctgaggagattagcagcgacgttgcacagtacattaacttccacttttctctgctggaatctatcttacagagacttaatgaggaagaaaaacgcgaaattcagaggattgtgaccaaatttaacaaagaaaaagccattattctaaagtgtctccaaaataaactggtgattaaaactgagacaaccgtgtag

SEQ ID NO: 131783 - DNA, 978 bp, synthetic construct
  misc_feature 1..978: note = Description of Artificial Sequence: Synthetic coding sequence
  source 1..978: mol_type = other DNA
atgttgtgggaggagaccggtgctgcccccgcgcccgcgcgggcatctgacctcccctatcggattcattttctttcttcgggcttaatcctggtaacacgacagctgacagaagacgggaaactgattgtggaggggatgctggatattttttggggcgtgaaaaggcccattcagctgaaaatccaagacgagaaacccttttcaagctttaccagcatgaagtctagtgatgtattttccagtaagggcatgacgcggtggggagagtttgacgatctttatcggatctccgagttggatcgaactcagatccccatgtctgagaagaggaatagtcaagaggactatctatcttaccatagcaataccttgaaacctcatgccaaagacgagcccgattcacctgtgctctacagaaccatgtcagaggcagcgctcgtgcgaaaacgtatgaagccactaatgatggatcggaaggagagacagaaaaatagagcttcaatcaacggccacttctacaatcacgaaacatcaatcttcatcccagccttcgaaagtgagaccaaagtgagggtgaattcaaacatgcgtacagaggaggtgattaaacagctgcttcagaaatttaagatcgagaattccccccaggattttgccctgcatatcatttttgctacaggagagcaaaggcggctgaagaaaacggatattcccctgctgcagcgactacttcagggcccgagcgagaagaacgccaggatctttctgatggataaggacgccgaagaaatatcgtcagacgtggcacagtatatcaactttcatttctccctcctggaatctatccttcagcgactgaatgaggaagaaaaacgagaaattcagagaatcgtgacgaagttcaacaaagagaaggccatcattttgaagtgcctacaaaacaagttagttatcaaaacagagacaaccgtttag

SEQ ID NO: 131784 - DNA, 1110 bp, synthetic construct
  misc_feature 1..1110: note = Description of Artificial Sequence: Synthetic coding sequence
  source 1..1110: mol_type = other DNA
atgctgtgggaggagaccggcgccgctcctgcccctgcacgcgcatctgaccttccatatcgcatttcttccgaccacctgaagaaagaggaaaagatgaccatgatggctcaccagtacccttcctggatttttatcaatgaaaaaactttcataaccagggagcaacttaacagcttgttgaaaacatacaacatcttctacgaaaatcagaagaatcttcatatcttgtacggtgagactgaagacgggaagctaatcgtggagggaatgctcgacatattttggggcgtaaagcgacctattcagttgaagatccaggatgaaaagcctttttcatcatttactagcatgaaatcctctgacgtttttagtagtaaaggaatgacaagatggggagaattcgacgacctctacagaatcagcgagcttgatcggacacaaatacctatgtccgaaaagcggaactcacaggaagactatctatcctatcacagcaatacactgaaacctcacgccaaagacgagcccgactctcctgtgctatacagaacaatgtcggaggccgctttggtgcgcaaacggatgaaaccactgatgatggaccgtaaggagaggcagaaaaaccgcgcaagtatcaatggccatttttataaccacgagaccagtatttttatcccggcattcgaatctgagacaaaagtgcgagtcaatagcaacatgagaacagaggaggtgataaagcagttactccagaagttcaaaattgagaattctccccaagatttcgcattgcacataatctttgcgaccggagaacagcggagactcaagaaaaccgatattcctctgctccagagactgctgcagggcccttctgaaaaaaatgctcgtatatttttaatggacaaagacgctgaagagatctcctctgacgtcgctcagtatatcaattttcacttctccttgttggagagcattctgcagcggctcaatgaggaggagaaacgagagatccaacgaattgtcaccaagttcaacaaagaaaaagcaattatcttaaaatgtcttcagaacaagctggtgataaagacagagactacagtctag

SEQ ID NO: 131785 - DNA, 912 bp, synthetic construct
  misc_feature 1..912: note = Description of Artificial Sequence: Synthetic coding sequence
  source 1..912: mol_type = other DNA
atgacgatgatggctcatcagtaccctagctggattttcattaacgagaagaccttcatcacgcgcgagcagttgaatagcctcctcaaaacctataatatcttttacgagaatcagaagaatcttcacatattgtatggtgaaacagaggacggcaagttaatagtggagggaatgttggacattttttggggcgttaaacggcccatccagctcaagattcaagacgagaagcctttctccagcttcaccagtatgaaaagctccgacgtctttagtagtaagggaatgacaagatggggtgagttcgacgacttatacagaattagtgaactggaccgcacacaaattccaatgtccgagaaacgtaactcgcaggaggactacctttcctaccactcaaatacactgaagccccacgcaaaagacgaacccgactcacctgtgctttaccggaccatgagcgaggctgcactcgtgcgaaaaaggatgaagcccctgatgatggaccgcaaggaacggcagaagaacagggcttctattaatggtcatttttataaccacgagattgagaactccccgcaggacttcgccctgcatatcattttcgcaaccggcgaacagcgcaggttaaagaagaccgacatcccgctgttgcaacgtctcctgcagggcccctcagaaaagaatgccagaatttttctgatggacaaggacgccgaggaaattagctctgatgtcgcccaatatatcaattttcacttctctttgctggaaagcattcttcaaaggctcaacgaagaggaaaagcgtgaaattcaaaggatcgtgacgaagttcaacaaagaaaaggccatcatcctgaagtgcctgcagaataaattagtgattaagaccgagacaacggtttag

SEQ ID NO: 131786 - DNA, 3141 bp, synthetic construct
  misc_feature 1..3141: note = Description of Artificial Sequence: Synthetic coding sequence
  source 1..3141: mol_type = other DNA
atgttgtcccgcacactaagttacaagtatcgcgatctggattcaactttctcctccctcggtgcaagtgatgacccagctgagctttcaactcaactaagcgcaccaggggtgttgaaagtgtttggagatagtgtctgtaccggaacgcactacaagagtgttctggccactggcacttcgagcgcaagagagctggtgaaggaggctctggagcggtacgcccttgacccccgccaggccggccagtacgtgctctgcgacgtcgtagggcaggctggggacgctggtcagaggtggcaagccaggtgcttccgcgtgtttggtgattccgaaaagcccctgctcatccaggaactgtggaagcccagagagggattgtcccggcgattcgagctacgaaagcgcagtgacgtcgaagaactggccgcgaaagaagtcgacacaattacagccggcattaatgcccaggccaggagactccagcgctctcgggccaaaggtacaccaactcccgccctcggagatgcgcgaagttccccaccaccacgcctgcgccgaacagttagtgaaacgtcgctcagccccgtgaatgccctgcccgccgcagctcaagggcctgaggagccgggaccagacgccatgaggtattccctgtatcagtccccgcatctgttactgctgcagggatactcgcagcagcacccaggcgtttgtgcgcagcctggccccgcccatggcgggcctgcggacccatcaaaacccagcatttccttatccgccccagacatacttcccctgcattgtacaattcgtcgacagccgttacccgattctggccaggcagccggcagattagtgttagagcccatacccggggcccacatttcagtgaatttcagcgaggtggggcatcgtaccgtggtgctacatcatggcgacttactctcactgggactctactatctgctcctctttaaggaccccgctcaggcccagcccctccctgctcgggccctggcaaggctccgcgccgtcccacagtcctgccggttgtgcggtgctgctctgggggcccgcggagccgccagtcccacgcaggccgcactgcccagacgtcagcagctgctgcttgagttcgaaccccacctagaagacaccctgttgcagcggattatgacgctgatcgagccagggggtgatgatcataaattaactcccgcttttctgctgtgcctgtgtatccagcattctgctacccattttcagcctggcactttcgggcagctgctgctcaagattgcgagactcatcagagaaacagtgtgggagaagaccaaagaactggccgaaaaacaagcacaattacaggaaccgatttcactggcctcctgcgccatggcagacctggtccctgatctgcagccaatcctgttttggatgtccaatagcattgagctcctgtatttcatccagcaaaagtgccccctgtatatgcagagtatggaggaacagctggacatcaccggctccaaggagtcactgttttcatgcaccctgacagcatccgaggaggctatggcggtgctggaggaagtggtgctgtacgcatttcagcagtgtgtctactatgttagcaaatctctctatatttgcctgccagcactgcttgagtgtccgccatttcagactgagaggagagaaagctggagcagtgcgcctgagttacccgaggaattacggagagtcgtgtccgtctatcaggctgcactggaccttcttcggcaactccaggtgcaccccgaggtcgccagccagatgctggcgtatctgttctttttttctgggactttacttttgaaccagttgctggatcgcggcccctccctgtcctgctttcactggccaagaggcgtgcaggcctgcgcgcgcctccagcagctgctggagtggatgcggtccgctggcttcggcgcagccggcgaacacttctttcagaagctctcatgtaccctgaatctgctggctacaccgagagcgcaactgattcagatgagctggactgcgctacgagcagccttccccgcattgtcacctgcacaactccatcgacttctaactcactatcaactcgccagtgccatgggtccaatgagcacttgggagccgggagcccaggacagcccagaggcctttcgttcggaagatgtgttagagagctacgaaaatccacctcctattgtgctgccatctgacgggttccaggttgacctggaagcgaactgtctcgacgattctatctaccagcatctcctgtacgtgaggcactttctctggggcctgcgctctagagcatcacccgggagccccggccggccgggctccggcgcttcacagcccgtgtgccctgaaggcatgcatcacgttgttttagatggacacctagaggcccccagttgccctctggctccacgggaccccggcccagccgcacgggaagtcgcaccagagaggacactgcccctccggggtgcgccatgggcccaggccccacccggcaggcagccatctcgggggggaagccaggccggcccccctcatacagatagcagttgtctgctgactccccctagcacccctctcggacccgaacctggcgatcctgattggcctgagagcggcggtccgtgcggaaaggcactacctgagagacaacgaaatggcttgtccggtctgcgaggggctgctccagaaggagattcggcagctctggccgaggaaagccctcccgctccttcttcaagatcgtcttcaactgaggatttttgttatgtttttacagtggagcttgagcgaggcccgtcggggctgggtatgggcctgatcgatgggatgcacactcacttgggagcaccaggcttgtatattcagacccttctgcccgggtctccggctgccgctgatggacgcctgtctctaggagataggatattggaagttaatggcagcagcttacttggtctgggctacctgcgggcagtagacctgatcagacacggtggcaaaaaaatgcgcttcctggtcgcgaagagcgacgttgagaccgctaaaaaaatccactttagaacacctccattgtag

SEQ ID NO: 131787 - DNA, 3228 bp, synthetic construct
  misc_feature 1..3228: note = Description of Artificial Sequence: Synthetic coding sequence
  source 1..3228: mol_type = other DNA
atgttttacgggacccactttataatgtcaccccccacaaaatctaaattaaagcgacaaagccaactgctctcttcaatgttatccaggacattgagctataaatatagggacctggactccacattctcctccctcggtgcttccgacgacccggccgaactgagcacacaactgtctgctccaggagtactgaaggtgttcggcgattccgtgtgtactggcacacattacaagagtgtgctcgccaccggtactagttctgccagagagttagtcaaagaagcacttgaaagatatgccctggatcctagacaggctgggcagtatgtcctctgtgatgtggtgggacaggccggggacgcaggccaacggtggcaggcaagatgctttagagtattcggagacagcgaaaaacctcttttgatccaggagctgtggaagccacgtgaaggtctgtctcgcagattcgagctaagaaagagaagtgatgtggaagagcttgctgcaaaggaagtggacactatcaccgctgggatcaatgcccaggcccgcaggctccagagaagccgggccaagggtacccctaccccggccctgggggatgcaagatcgagtccacctcctcgtcttagacgaaccgtgagcgagacatctctgagcccggttaacgctctgccggctgccgcccagggaccagaggagccgggcccggatgcaatgaggtactccctgtaccaatccccacatctgctgttactccagggatattctcagcaacatgattccctcgtgtatgttctcaaccgcgatcggcacactgtgggacagcggacaccaagctcaaaaccgtccatttcccttagcgcccctgacatactcccactccactgtacaatccgacgccagcctctgcctgacagcggccaagccgccggaagacttgtgctggagcccataccaggtgcacacattagcgtaaacttttctgaagtgggacaccggacagtggtcctgcaccatggtgatcttctttcactgggcctctattacctcctgctctttaaggatccagcccaggcccagccactgcctgcccgggcacttgcgaggctgagagcagtgccacagagctgccgcctctgcggagccgcactcggggccagaggcgccgcctcacctacacaagcagctttgccaagacgtcaacagttactgctggaattcgagcctcaccttgaggatactctgctccagagaatcatgaccctgatcgagcctggtggtgatgatcataagctgaccccggcttttctgctgtgcctttgtatacagcatagcgcaacacattttcagcctggaacattcggacaacttcttctgaagatcgccagactaatccgagaaacagtctgggagaagaccaaagagctagcagaaaagcaagcacagctgcaggaaccaatttccctggcatcctgtgccatggcagaccttgtgccggatctgcagcccatcctgttttggatgtctaattccatcgaattgctatacttcatccagcaaaaatgccctctctacatgcaatctatggaggaacaactcgacatcaccggatctaaagaatcgctgttttcatgtacacttactgcaagcgaagaagccatggccgtgcttgaagaagttgtcctctatgcctttcagcaatgcgtgtattatgtcagtaagtccctgtacatttgcctgcccgcacttctcgaatgcccaccatttcaaaccgagcggcgcgagtcatggagttccgcccctgaattgcccgaagagctgagaagagtcgttagtgtctatcaggccgctctcgacctgctcaggcagcttcaggtgcatccagaggttgcatctcagatgctggcctatctattctttttcagcggaacactgttgcttaaccagctgcttgatagaggaccaagcttgtcctgcttccattggccacgaggggtgcaggcttgtgcgagattgcagcagttgctggaatggatgaggtctgccggcttcggcgccgccggcgagcacttctttcaaaaactgtcatgtactctgaacctactggctacaccccgggcacagctgatacagatgagctggactgcactcagggcagcgttcccagcactcagccccgcgcagttgcatagactcttgacacactatcagctagcctccgctatgggtccaatgtcgacttgggagccaggtgcgcaagacagccccgaggcctttagaagcgaggatgtgctcgaaagctacgagaatccccctcccatcgtgttaccctccgacggctttcaggtggaccttgaagccaactgccttgacgatagcatttaccaacacctgctgtatgtgcggcattttctatggggcctgagatccagggcttctcccggtagtccaggcagacccggaagcggcgcaagccagccggtttgcccagagggcatgcaccatgtggtgttggacggacatctcgaggcaccttcttgtccactggccccaagagatccagggcctgccgctagggaggtcgcacccgaacggacactgcctctgcggggggcaccatgggcccaagccccacccggccggcagcccagccgcggtggaagtcaggccggccccccccatactgactcttcctgccttctgacaccaccctcaacaccattaggcccagaaccaggggaccccgactggccagaatcaggtggcccttgtggaaaagccctccccgaacgccagcgcaatgggctgagtggattaaggggcgccgccccagagggcgatagcgcggcgctggccgaagagtctccgcctgccccaagttctaggtcttcttcaacagaagacttttgctatgtgttcacagtcgaacttgaaagaggtccttctggccttggaatgggacttatcgacgggatgcacacccacctgggagccccaggtctctatatccagacactgctcccaggctcaccagcggccgctgatggccggctgagtttaggtgatcgtatcctggaggtcaatggatcctccctattggggctcgggtaccttcgggccgtcgaccttattcgccacggcggcaaaaagatgcggttcctggtagccaaatccgacgtggagacagccaaaaagatccatttccggaccccgccactgtag

SEQ ID NO: 131788 - DNA, 405 bp, synthetic construct
  misc_feature 1..405: note = Description of Artificial Sequence: Synthetic coding sequence
  source 1..405: mol_type = other DNA
atgttttatggaactcattttatcatgtctccaccaacgaagagcaagttaaagcgccaaagtcagcttttgtcctcaatgttaagcagaacattgtcctacaaatacagagacctagattcgaccttctctagtctaggggctagcgacgatcccgcggagctctctacacagttgtccgcccctggagtgctaaaagtctttggggatagcgtttgtaccggcactcactataagagcgtgctggccaccggcacctcctctgcacgagaactggtgaaggaggccctggagcgctatgcacttgacccccgccaagcaggccagtatgtgctgtgcgacgtggtaggacaggcaggagacgccggccagagatggcaggcgagatgttttagggtgttctag

SEQ ID NO: 131789 - DNA, 1629 bp, synthetic construct
  misc_feature 1..1629: note = Description of Artificial Sequence: Synthetic coding sequence
  source 1..1629: mol_type = other DNA
atgttttacggcactcatttcattatgtccccccccacgaaatctaagcttaagagacagtcccagctgctgagcagcatgttgtcccgaaccctgagttacaagtatcgagatctggactcaactttcagctctttaggggcctcagacgatccagctgaactgtcaacccagctgagcgctccaggagttctcaaggtgttcggcgactccgtgtgtactggcacacattacaaaagcgtgctggccactgggacatcgagcgccagggagttggtcaaggaggctctggagaggtatgcactggacccaaggcaggccgggcagtacgtgctgtgtgatgtcgtagggcaggccggagacgcgggacagcggtggcaggcacgatgctttagagttttcggggatagcgagaagcccctcctgatacaggagctctggaagccccgggaaggactatctcggcgatttgaactgcgaaagcggagcgatgtggaagagcttgcagctaaggaagtggataccatcaccgctgggattaatgctcaggccaggaggctgcaacggtcccgggctaaaggtacacccacccccgccctcggagatgctaggtcatctcctccgccaagactgcgaagaacagtaagcgaaacatctttgtccccggtgaacgcgctccctgctgcagcccaggggcccgaagaacccgggcccgatgccatgaggtacagcctgtaccagtctccccatctgctgctcctgcaggggtatagtcaacagcacgattcactggtgtacgtgctgaaccgcgatagacatactgtcggacaacgcaccccatcttctaaaccctctatctctctatctgcacccgacattctacctctccattgtactatcaggcggcagccgctcccagattcagggcaggccgcagggcgcctcgtgctggaacccatccctggggcccacatttctgttaacttcagcgaagtaggccatagaactgtggtcctacaccacggtgatctgctgtcgttggggctttactatcttttgctttttaaagatccagcccaggcacagcctctcccggccagagccttggcccgactccgtgcggtcccacagtcctgtagactctgcggcgccgccctgggcgcccgtggagcagcatctcccacacaggcagccctgcccaggagacaacagctgctgcttgagtttgagccacacttggaggacacattgctacaacggatcatgaccctgatcgaaccaggtggcgacgaccacaaacttaccccagcatttctgctgtgtctctgcatccagcacagtgcaacccatttccagcccgggacattcggacaattgctgctcaagattgctcgacttattcgggaaactgtctgggaaaagaccaaggagttagcggagaaacaggcacaactcttggagggcattgctgttttgctccatgcggatggccagcggggcgggcatggtggagctgggggcgggggtgcagttcgcttgcctgccgtgcgactactttgcctacaagtgcctgtgcatctgccaccaggtaccccaggcgttccagctatccccgacggcgccccctag

SEQ ID NO: 131790 - DNA, 2508 bp, synthetic construct
  misc_feature 1..2508: note = Description of Artificial Sequence: Synthetic coding sequence
  source 1..2508: mol_type = other DNA
atgcgatatagtctgtatcagtcaccccacctgctgctgctgcaagggtacagccagcagcatgacagcctcgtgtatgtgttgaaccgagacaggcacacggtgggacagcggactccctcctccaaaccaagcattagcctgtccgcccccgatatcctgcctcttcattgcacaatcagacggcaaccactgcctgactcaggacaggctgctggcagactggtccttgagcctattcccggtgctcacatctcagtgaatttttcagaggtcgggcacaggactgtggtgctccaccacggcgatttgttatctctgggcctgtactacctgctcctgttcaaggaccccgcccaggcacagccacttcccgcgcgggctctggcccggctgagggccgtgccacagagttgcaggttgtgtggtgccgctttaggagcacggggcgccgctagtccgactcaggccgcgctgccacggcgacaacagttactcttagagttcgaaccacacctcgaagacactctattgcagcgtatcatgaccctgatagaacctggcggggacgaccacaagctaacaccggcattccttctgtgtctctgtatacaacacagtgccacacatttccagccaggaacgtttggacagctactgctgaagatcgctcgtcttattagggagaccgtgtgggagaaaaccaaggagctggcggagaagcaggctcagctccaggagccaatcagcctcgcctcctgtgccatggctgacctggtgccagacctccagcctatcctcttctggatgtcaaactccattgagcttctttattttattcaacagaagtgccctctatatatgcagagtatggaggaacaactggatattactggatctaaggagagtttatttagctgtaccttgactgcttctgaagaagccatggccgtcctggaggaggttgtcctgtacgcctttcagcaatgtgtttactatgtgagcaagtctctgtacatttgccttcctgccttactagagtgccctccctttcagaccgagcgcagggagtcctggtcatcggcacctgagttgcccgaagaactcagacgagttgtgtccgtctaccaggcagccctggatcttctgcggcagctacaagtgcacccagaggtcgcctcccagatgttggcctatttgttctttttttccgggactttactattaaaccaacttctggacagagggccgagtctttcgtgctttcattggcccaggggagtccaggcctgcgcgcgcttgcagcaactcttagaatggatgagaagtgccggatttggggctgccggtgaacacttcttccagaagctgagttgcaccttgaacctgttggcaactccccgagcacaattaatccagatgagctggactgccctgcgggctgcatttcccgcactgtctcctgcccagttgcatcggctgctgacacactaccaactggctagtgccatgggtccgatgagcacatgggagccgggagcccaagacagcccggaggcatttcggtctgaggacgtcctggaatcatacgagaacccgccgccaattgttcttccttcagatggattccaggtggatctggaggcaaactgcttggacgatagtatttatcagcacttgctgtacgtgcggcacttcctctggggactccggtcacgagcttccccaggatctcctggacggccggggagcggagcctctcaacccgtttgtccggaaggaatgcatcacgttgtgctcgatgggcatctagaggcacctagttgccctttagcaccccgagatccaggccccgccgcccgagaggttgcacccgagaggaccctccccctcaggggggctccgtgggctcaggccccccctggtcggcagccgtcaaggggaggaagccaggcagggccaccccataccgacagttcttgcttgctcacaccccccagcaccccgctagggcctgaaccaggagacccagactggcccgaatctggcggaccatgcggcaaagcgttgccagagcgtcagagaaacggattgtcggggctgcgcggcgcggcccccgaaggagactcggcagccctagccgaggagagccccccagcccctagttcacgatcttcttccacggaagatttttgttatgtctttaccgtggaacttgaaagaggcccctctggtctgggaatgggccttattgatggcatgcatactcacttgggcgcaccaggcctgtatatccagacccttctgccgggttcgcccgccgccgccgatgggagactctcattaggagatagaattctcgaggtgaacggttcatctctgttgggactcggatacctgagagccgtggatctcatccggcatggaggtaaaaaaatgcggtttctcgtggcgaaatctgacgtggagacggctaaaaagatccattttcggaccccacctctgtag

SEQ ID NO: 131791 - DNA, 2085 bp, synthetic construct
  misc_feature 1..2085: note = Description of Artificial Sequence: Synthetic coding sequence
  source 1..2085: mol_type = other DNA
atgtgctccactggaacaggcactcgctgggccagcggcccaccaccggcctcaccagcctcagctagtcagcctccaacctcctgcctctatacagctcccagcgccggtaacaggtcacgaacggccgcgcggcctcgaggcgggtggttagaacctatacctggggctcacatttccgtcaacttttccgaagtgggacataggacggttgttctgcaccatggagatctcttgtcccttggcctctactaccttctcctgttcaaggaccccgctcaggcccagccactgcccgcccgtgcattggcccggctccgcgcagtgccacagtcttgcagactatgcggggccgctttaggcgcacgtggtgccgcatcccctactcaggccgctctgccgcggcggcagcagctcttattagagttcgaaccccacctcgaagacaccctccttcagcggatcatgacgctcatcgagccaggcggggatgaccataagttgactcccgcctttctcctgtgtctgtgtatccagcatagtgccacccattttcagcccggtacctttgggcagcttcttttgaaaatcgcccgattgattagggagactgtctgggagaagaccaaggaactggctgagaagcaggcacaacttcaagagcctatctcacttgcctcttgcgcaatggctgacctggttccagacctccagcctattctgttctggatgtctaattcaatcgagctcctttacttcattcagcagaagtgtcctctctacatgcagtccatggaggaacagctggatatcacggggagcaaagaaagcctgttcagctgcacactgacagcttccgaggaagccatggccgtactagaagaggttgtgctgtacgcgttccagcagtgcgtctactacgtgtctaagagcctctatatttgcctccctgcactgctggaatgcccgcccttccagactgaacggcgggagagctggtcgagtgcccccgaactgccagaggaactgcggcgtgtagtatctgtataccaggctgccttggacctgctgcggcagctccaggttcacccggaggtggcctcccagatgttggcctacctgttctttttttctggtactctcctgcttaatcagctgctggatcgcggtccctcactctcttgttttcactggcccagaggagtgcaagcttgcgctcgactccaacagctgctggaatggatgcgatcagctggttttggtgccgccggggagcattttttccagaaactttcatgcaccttaaatcttttagccacaccccgcgctcagcttatccagatgtcatggacagccctgagggcggccttccctgccctgtcacctgcgcagctgcacagactgctgacccactatcagttggctagcgccatggggcccatgtccacttgggagccgggcgctcaggactcgcctgaggccttcaggtctgaagatgttctggaaagctatgagaacccaccacctatagtcctgcccagtgacggatttcaggtagacctcgaggctaattgcttagacgactccatctaccaacacctcctgtatgtgagacacttcctatggggtctcagaagtcgggcctcccccggcagcccaggccggccgggctccggcgcaagccagcctgtctgtcccgagggcatgcatcatgtggtactggatggtcacttggaagccccgtcctgccctttagctcccagggatcccgggccggccgcgcgcgaggtcgctcccgagcggactctaccgttacgaggggctccatgggcacaggctccgccagggagacagccaccagggctctatatccagacacttttgccgggatctcctgccgctgccgacgggcgactgtccttgggggaccggatcctggaggtcaacggtagctcgctgttaggattaggctatctgcgagcggtggacctgatccgccatggcggaaaaaaaatgagattcctcgtggctaagtccgatgtggaaactgcaaagaaaattcattttcgtactccacctctgtag

SEQ ID NO: 131792 - DNA, 369 bp, synthetic construct
  misc_feature 1..369: note = Description of Artificial Sequence: Synthetic coding sequence
  source 1..369: mol_type = other DNA
atgaagttggccgccatgatcaagaaaatgtgtccaagcgattccgaactcagcattccggccaagaattgttaccgtatggtgatcttaggtagcagcaaagtgggaaaaactgctattgtgtccaggttcttgaccggcaggtttgaggacgcatacacacctacaatcgaggacttccatcgaaaattctattcgatccgcggagaggtgtaccagttggatatactggatacctctggcaaccacccatttccggctatgagacgtctgtctatcctgacagatccccgccaccaagtactgccacaggagcagaatcagggagagaggggacgggcacctggccaccttcgacagcaggggtag

SEQ ID NO: 131793 - DNA, 2394 bp, synthetic construct
  misc_feature 1..2394: note = Description of Artificial Sequence: Synthetic coding sequence
  source 1..2394: mol_type = other DNA
atggggacactgggaaaggctagggaggccccgcggaagcctagtcacggatgccgagccgcctcgaaagccaggctggaggccaagcccgccaatagccccttcccatcccacccctcactagctcatatcacccaattccgaatgatggtttcactgggtcatctcgcaaagggcgcaagcttggatgatctcattgacagctgtattcaatccttcgacgctgatgggaatctttgtcgcagcaatcagcttttgcaggtgatgctaaccatgcatcggatcgtgatttcgtccgccgagctactccagaaggtgatcaccttgtacaaggatgccctagctaagaattcccccggcctctgtttaaagatctgctacttcgtgcgatactggattactgaattctgggtaatgtttaagatggacgcctccctgaccgatacaatggaggagtttcaagagcttgtcaaggctaagggcgaggagctgcactgccgtttgattgacaccacacagataaatgcccgcgactggtctcgcaaattgacccagcgcataaagagcaacacgtcaaagaaaaggaaggtgtctctactattcgaccatctggaacccgaggagctatcagagcacctgacctatcttgagtttaaatcgtttcggcgcataagtttcagtgattaccagaattacttggtaaactcttgcgtgaaggagaaccccaccatggagcggtcgattgctctttgtaatgggatctcacagtgggttcagttgatggtactgagtcgccccacgccccagcttagggctgaagtcttcattaaatttatacaggtggcgcagaaactgcatcagttgcagaacttcaatactttaatggctgtgatcggaggattatgtcattcctcaatcagtcgtctgaaggaaacaagtagccacgtcccacacgagatcaataaagtcttgggcgagatgaccgagctactgtcttcttcacgaaactacgacaactacaggagggcatacggagaatgcacggacttcaagatacctatcttgggtgttcatctgaaggacctgatttccctttacgaagctatgcccgattatctcgaagacggcaaggtgaatgtgcacaaacttctggccctatacaaccacatttccgagctagttcaattacaggaggtagccccccctctggaggcaaacaaggacctggtgcacttactgacccttagcctggacctttactatactgaggacgagatctacgagttgtcctacgcacgagagccgagaaatcacagagccccacctcttaccccaagcaaaccccccgtggtggtggactgggcctccggagtgagccccaagcccgatcccaagactatctccaagcacgtccagaggatggtcgacagcgtttttaagaattacgaccacgaccaagacgggtacatttctcaggaggaattcgagaaaatcgccgctagtttccccttttccttttgcgtcatggataaggacagagaaggcctcatctctagagacgaaatcactgcatactttatgcgggcatcatcgatttatagcaaactcggcctcggtttcccgcataatttccaggaaactacataccttaaaccgaccttttgcgacaactgcgctggattcctctggggggtgatcaaacagggatataggtgcaaagactgcggaatgaattgccacaagcagtgtaaggatctcgtcgtgtttgagtgtaagaaacgggccaagaacccagttgcccccaccgagaataatacatccgtgggcccagtttccaatctttgttccctaggagctaaggatttactccacgcgcctgaggaagggcctttcaccttccccaatggagaagccgtcgagcatggagaggagagtaaggacaggaccattatgctcatgggcgtgagctcccagaaaatctcactaaggctcaagcgcgcggttgcacacaaggccacacaaaccgagagccagccttggatcggaagcgagggacccagtggccctttcgttcttagctcgcccaggaagacggcgcaagatactctgtatgtccttccaagcccaacctccccatgcccaagcccagttttggtccgcaaacgcgcctttgtgaaatgggagaacaaagactctctgatcaagtcaaaggaggagctacgccatctccggctgccgacataccaggagctggagcaggagattaacacactcaaagcagacaacgatgcgttaaagatccagcttaagtacgcccagaagaagatagagtctctgcagctggagaagagcaaccatgttctcgcacaaatggagcagggagattgttcatag

SEQ ID NO: 131794 - DNA, 1794 bp, synthetic construct
  misc_feature 1..1794: note = Description of Artificial Sequence: Synthetic coding sequence
  source 1..1794: mol_type = other DNA
atgggcacactgggcaaagccagggaggcccctagaaagccaagccatggttgccgagccgcctccaaggcccgtctggaggcgaagccggcaaattctccttttccgtcccatcccagcctcgcacacattactcagttccgaatgatggtcagtctcggacacctggctaaaggagccagcctggacgacctcatagacagctgtattcaatcctttgatgctgatggcaacctgtgtcgttccaaccaactgttacaggttatgctcactatgcaccgcatagtgatcagctcagccgagctgttgcagaaagttattactctataccccgatgcattagccaaaaacagtcctggtctatgcctgaagatttgctactttgtgagatactggataacggaattttgggtgatgttcaaaatggatgcgtccctgacagacacaatggaggagtttcaggaactcgtcaaagcgaaaggtgaggaactgcactgtcgcctcattgacaccactcagattaatgccagagattggagtagaaaactcacacagagaataaaaagcaatactagtaaaaaaagaaaggtgtccctcctctttgatcacctcgaacctgaagagctgagcgaacacctcacatacctggagtttaaatccttcaggaggatttcattttctgactaccagaactacctggttaatagttgcgtgaaggagaatcccactatggagcgctcaattgcactctgcaatgggataagccagtgggtgcagctgatggttctgagtcgacccacaccccagctccgtgctgaagtttttatcaaattcattcaagtggctcagaagttgcatcagttgcagaatttcaacaccttgatggcagttatcggcggcctgtgccactctagcatttccaggctcaaagagacttccagccatgttccccacgagatcaacaaggtgctcggagagatgactgagctcctgagttcatcacgaaattatgacaactaccggagagcttatggcgagtgcactgattttaaaatcccaatactcggcgtccacctcaaggatctgattagcctgtatgaagccatgcctgactatttggaagatggcaaagtcaatgttcacaaactcctggctttgtacaaccacatctccgaactggttcagttgcaggaggtggcccccccacttgaggccaacaaagacctcgtgcacctgctgactctttcattggacctgtactacaccgaggacgaaatatacgagctctcctacgcaagagaaccccgcaatcacagggctcctagtgtgtttaaaaattacgaccacgatcaagacggatatatttcccaggaggaattcgaaaaaattgccgcaagcttcccattctccttctgtgtgatggacaaagatagggaaggcttgatcagcagagacgagatcaccgcctactttatgcgcgcatcatctatttacagtaagctgggacttggcttcccccacaacttccaggagactacttacctgaagcccacgttctgtgacaactgtgcaggatttctgtggggcgtcattaagcagggttaccggtgtaaagactgcggaatgaattgtcataaacagtgcaaggacctggttgtgtttgaatgtaagaagagagcaaagaatccggtagcccccactgaaaataatacatccgtggggcccgtgtctaacctgtgctcccttggcgccaaagatctattgcatggaaacaaatattctgaatcacgctag

SEQ ID NO: 131795 - DNA, 1641 bp, synthetic construct
  misc_feature 1..1641: note = Description of Artificial Sequence: Synthetic coding sequence
  source 1..1641: mol_type = other DNA
atggggacattgggcaaagcacgagaggctcctcgcaagccatctcacgggtgtagggctgccagtaaggcccggctggaggcaaagccggctaattctccatttccgagccacccaagcttggcgcacattacacagttcaggatgatggtttcattaggccacctggcgaaaggggcatctctggacgacttgattgacagctgtatacagtccttcgacgcagatggaaacctctgtcggagtaatcaactcctccaagtgatgctgaccatgcatcgcattgtaataagctctgctgaacttctccagaaagtcataactctgtacccagacgcgctggcaaaaaatagcccggggctgtgcctcaagatctgctacttcgtgcggtactggatcaccgagttttgggtcatgttcaagatggatgcaagtctgactgacactatggaggaattccaggaactcgtgaaagccaagggagaagaactgcattgtcgcctaatcgatactacacagatcaacgctcgcgattggtcacggaaactgactcagaggattaagagcaacactagtaaaaagaggaaagtttcactcttgtttgaccatctggagccagaagagctgtcagagcacctgacctaccttgagtttaagagctttcgccgtatctccttttcagactaccagaattaccttgtgaactcctgcgtgaaggaaaaccccacgatggagagatccatcgccttgtgcaacggcatatctcagtgggtacagctcatggttttatcccgcccaacgccacagttgagagccgaagtgtttattaagtttatccaagtggcccagaagctccaccaactgcaaaattttaataccctgatggccgtcatcggcggtctgtgccactccagtataagtaggcttaaggagacgtctagtcacgttccccacgagattaacaaggttttaggggaaatgacagagttactgtccagctccagaaattatgataactatcggagagcctatggggaatgtacagacttcaaaattcctattctgggagttcatctgaaagatctgatttctttatacgaggcaatgccagattacctggaggatggtaaggtgaatgtgcacaagctgctagctctgtataaccatattagcgaactggtgcaactccaggaggtggcgccgccactagaagctaacaaagacctggtgcacttgctgacattgtctctggacctgtattatacggaggatgagatatatgagctgtcatatgcgagggaaccaagaaatcacagagcacctagcgtttttaagaattatgatcacgaccaggacggctacatctcacaggaagaattcgagaaaatcgcggcatcattccctttctctttttgtgtcatggataaagaccgagagggcttgatctcaagggacgaaattacggcttacttcatgcgggcttcttccatctacagcaagctagggctgggtttcccacataactttcaggagacaacgtatctcaaaccaacgttttgtgacaattgtgctggattcctgtggggcgtgatcaagcaagggtacaggtgcaagggaaataagtattcagagtcgcggtag

SEQ ID NO: 131796 - DNA, 2289 bp, synthetic construct
  misc_feature 1..2289: note = Description of Artificial Sequence: Synthetic coding sequence
  source 1..2289: mol_type = other DNA
atgggcacgttaggcaaagctcgggaagctcccagaaaacccagtcatgggtgccgcgccgcaagcaaggcccggcttgaggccaaaccagctaatagcccttttccatctcaccctagtttagcccatatcacgcaattccgtatgatggtgtctctgggtcacctggcaaagggggcctctctcgacgacctgatagattcctgtattcagtccttcgacgccgacggtaacctgtgccgaagtaatcaattactacaggtgatgcttacgatgcatagaattgtgataagctccgctgagctgctccagaaggttattacgctatacaaggatgcactggccaagaactcaccaggtctgtgcctgaagatttgctactttgtgcgttactggattaccgagttctgggtaatgtttaagatggacgcctctttaaccgacactatggaggagttccaggaactggtgaaagccaagggagaggagctgcattgccgattgatagacacaacacagattaatgcccgcgattggtcccgcaagctgacccaacgaatcaaatctaacacctccaaaaagcgcaaagtctctctcctcttcgatcatttggaacccgaagagctgtcggagcatctgacctatctggaatttaaatccttccgtagaatctccttctccgactaccagaactaccttgtcaactcttgtgtcaaggaaaaccccactatggaacgatcgatcgctctctgtaatggtattagccagtgggtccagttgatggttctttcccggcccactccccagttaagagccgaagtgtttatcaaattcattcaagtggcccagaaactgcatcaattgcagaatttcaataccttgatggcagttatcgggggcctgtgccactcaagtatttccagattaaaggagacctcctcacacgtaccccatgaaattaacaaggtgctgggagaaatgacggagctgttatcctcatcccggaattacgacaattatcggcgggcatacggcgagtgtacagactttaaaattccaatcttaggtgtgcatttgaaggacctaatctccctgtacgaggctatgccagattatcttgaggatggtaaggtcaatgtccataaactgctggcattgtataaccatatttcagagctggtacagctgcaggaagtggctcccccattggaagctaataaggatcttgtgcacctactgacactgtcccttgacctgtactatacggaagacgagatttatgagctttcttacgcgagagaaccaaggaatcacagggcaccgtccgtcttcaagaactacgatcacgatcaggatggttatatctctcaggaggagtttgagaagatcgcggcctctttcccattcagcttctgcgtgatggacaaagacagggaaggtcttatttcccgggatgagatcaccgcctactttatgcgtgccagttctatctacagcaaactgggacttggattcccccataatttccaggagactacatacttgaagccaacattctgcgacaattgcgctgggtttctgtggggcgtgataaagcagggatatcggtgcaaggattgtgggatgaattgccataaacagtgcaaggatctagtggtgttcgagtgcaagaagagagcaaaaaatcccgttgcccccacggagaacaacacttctgtgggccccgtgtccaatctttgtagtttaggagccaaggacttactgcacgccccagaagagggacccttcacatttccaaatggtgaagccgttgaacacggcgaggagtctaaggaccggaccattatgctgatgggggtctcaagccaaaagatttctctcaggttgaaacgagcagtagcacacaaagcaacccagactgaaagccagccttggatcggatccgagggcccttctggcccgttcgttctgagcagccccagaaagactgcccaggacacgctttacgtgcttcccagcccaacatccccatgtccttcccccgtgctagtgcggaaacgtgcatttgtcaaatgggagaacaaagacagtcttataaaatctaaggaagaactccgacacctgcggttgccaacctaccaggaattggaacaggagatcaacacacttaaggcagacaacgatgccctaaaaattcaactcaaatacgcgcagaagaagatcgagtcacttcagctggaaaaatccaatcatgttctggcccagatggagcagggggactgctcgtag

SEQ ID NO: 131797 - DNA, 2250 bp, synthetic construct
  misc_feature 1..2250: note = Description of Artificial Sequence: Synthetic coding sequence
  source 1..2250: mol_type = other DNA
atgatggtgtcgctcggtcacctggccaagggcgccagcctggatgatctgattgattcctgtatccagagctttgacgcagacggtaatctgtgccggagtaatcagctcttgcaagtaatgctgactatgcaccggatcgtcatctcatctgcggagcttctccagaaggttattactctttataaagacgcactcgcaaagaattctccaggattgtgcctcaaaatctgttattttgtgagatattggatcaccgagttttgggtgatgttcaagatggatgcgagtctcaccgacacgatggaggaatttcaggagctcgtgaaggcaaaaggggaggaactacattgccgcctgatcgatacgactcagattaatgccagagactggtctagaaagctcacacaacgcattaaatctaacactagtaagaagcggaaggtctctctcctctttgatcatctggagccagaagaactctctgagcacctcacctaccttgaatttaaatcgttcagaagaataagcttcagcgactatcagaactatctcgtcaatagctgtgtgaaggagaatccaaccatggagcgcagcatcgctctttgtaatggaatcagccagtgggtgcagctgatggtcctgagcaggcccacccctcagctaagggccgaagtgttcataaaattcatccaagtcgctcagaaattgcatcagttacagaatttcaatactttgatggcggtgatcgggggtctatgccactcaagcatttcaaggctcaaagaaaccagcagccatgtgcctcatgaaattaataaggtattgggtgagatgacggagctgctgagctcctctcgaaactacgataactaccgacgcgcctatggagagtgtactgacttcaagatacccatcctgggcgtccatctcaaggatcttatttcactctatgaggcaatgcccgattacctagaagacggtaaagtcaacgtacacaaactgctcgccctctataatcacatatctgaactggttcagctgcaggaggtggcaccaccgcttgaggccaacaaggatttggtccatctgctcacgctgagcctggatctgtattacacggaggatgaaatctacgaactgtcgtacgcgcgcgaaccaaggaatcaccgagccccacctctaacccctagcaagcctccagtcgtggtggactgggcttctggggtgtccccaaagcctgaccccaagacgatcagcaagcacgtgcagagaatggtcgatagcgtgttcaaaaactatgaccacgaccaggacggctacatctcccaagaagagtttgaaaagatagccgcttccttccccttttccttttgcgtcatggataaggacagggaaggcctgatctctagggatgaaatcaccgcgtatttcatgagagcttccagcatctatagtaagctaggtctcggatttccacacaactttcaagaaaccacctacttgaagcctaccttctgtgacaactgtgccggtttcctctggggagtgatcaaacagggatatagatgcaaagactgcgggatgaattgccacaaacagtgtaaagaccttgtggttttcgagtgcaagaagcgcgccaagaatccggttgcgccaactgaaaacaacacgtcagtgggtccggtttccaacttatgctccttaggcgcaaaagatctgcttcacgcccccgaggaaggcccctttacttttccaaatggggaggcagtcgagcacggtgaggagagcaaagatagaacgattatgctgatgggcgtttcaagccagaaaatctccctacggctgaagcgcgcagttgcccataaggccactcagacagaaagtcaaccatggatcggctcagagggcccttcaggaccattcgtcctgtccagtccgaggaaaacagcgcaagacaccctgtatgttttgccgtcacccacctccccctgtcccagcccagtcctcgtgcgaaagagagcgttcgttaaatgggagaataaagatagccttataaagtcaaaggaggaattaaggcacctgagacttcccacatatcaggagctggagcaggagattaatacgctgaaagccgataacgacgccctgaagatccagctcaaatatgcccaaaagaagattgaaagcctccagttagagaaatccaaccatgtccttgctcaaatggaacagggtgactgcagttag

SEQ ID NO: 131798 - DNA, 1446 bp, synthetic construct
  misc_feature 1..1446: note = Description of Artificial Sequence: Synthetic coding sequence
  source 1..1446: mol_type = other DNA
atgggaaccctgggcaaggcccgggaggctccccgcaagccgtcacatgggtgccgcgctgcatccaaagcccgcctggaggccaagcccgccaacagtccatttcctagccatccaagcttagcccatataactcagttccggatgatggtgtctcttggtcacctggccaagggtgctagtctggacgatctgattgattcctgcatccagagctttgacgcggacgggaatttgtgcagaagcaaccagctcctccaggtgatgctgacgatgcaccgaatcgtaataagctctgctgagcttctacaaaaggtgatcactctatatcccgatgccttggcaaaaaactcaccgggactatgcctgaaaatttgttacttcgtcaggtactggattaccgaattttgggtcatgttcaagatggacgcttccttgaccgataccatggaagaatttcaggagctcgtcaaggccaaaggggaagagctgcactgcaggttgatcgacacaactcaaataaacgctagggactggagccgcaaacttacccaacggataaagtctaatacctctaagaaacgaaaggtgtcactgctttttgaccatttagaacccgaagagctctctgagcatcttacatatctcgagttcaaaagcttcagaaggatctcatttagcgattatcagaattatctggtgaattcatgtgttaaagagaatccaaccatggaacgatccattgcattgtgcaacggtatttctcagtgggtgcagttgatggtgctatcccgcccaactccacagctgcgagctgaggtctttatcaagttcattcaagttgcacagaagctccatcagcttcagaactttaatacgctaatggctgtgatcggcggactgtgccacagctctatcagcaggctgaaggagacctcctcccatgtgccacacgagatcaacaaagtgttaggggagatgaccgaactgctgagcagcagccgtaattatgacaattatcgacgcgcttatggtgagtgtactgattttaaaatccccatcctcggagtgcatctgaaggacctaatctctttatacgaggcgatgcctgactatctggaggatggaaaagttaacgtccacaaactgctcgctctttacaatcacataagcgaacttgttcagctccaggaagtcgccccccccctagaggccaacaaagacttagtccacctcctgaccttgtcgttagacctctattacacagaagacgagatctacgaactgtcctacgccagggaaccccggaaccatcgggccccttccgtgtttaaaaattatgatcacgatcaggacggctacattagccaggaggagttcgaaaagattgccgcatcttttccctttagcttctgcgtcatggacaaggaccggtctggcgcttag

SEQ ID NO: 131799 - DNA, 1641 bp, synthetic construct
  misc_feature 1..1641: note = Description of Artificial Sequence: Synthetic coding sequence
  source 1..1641: mol_type = other DNA
atgggcactctcgggaaagcaagggaagccccaaggaaaccaagtcacggatgtcgtgctgcatccaaggcacgtctcgaggccaaacccgccaatagccccttccccagccatcccagcctggctcacataacacagtttcggatgatggtaagtctgggccacctcgcgaaaggagcgtccctggatgacctgatagatagctgcattcagtcctttgatgctgacggtaacctctgtcgttccaaccagctactccaggtgatgttaactatgcatcgaatcgtcatttctagcgccgagctgttgcagaaggtcatcacgctgtataaggacgctctggccaaaaatagcccaggactctgcttgaaaatttgttacttcgtcaggtactggatcacagaattttgggtaatgtttaaaatggacgccagtctaaccgataccatggaggaatttcaggaactcgtgaaagccaaaggcgaggagctacactgcaggctgattgacactacccagataaatgctcgggactggtcgcgtaagctcacccagcgcatcaaaagtaatacaagtaaaaaacggaaggtgtcattactctttgaccacttggaaccagaggaattatctgagcatttgacgtacctcgaattcaagagcttccggcgtatcagcttttccgattatcaaaactatctggtgaatagttgcgtgaaagagaatcccactatggaacgctctatcgccttatgtaacggaatctcccagtgggtacaactgatggtgctgagccgcccaactccacagctgcgagccgaggtgtttatcaaattcatacaagtggcacagaagctccaccaactgcagaattttaacacccttatggcagtcattggtggcctgtgccatagctccatcagccggttgaaagagacatcatcccacgtgcctcatgagatcaacaaggtactcggagagatgactgaactgctctcttcatccaggaactatgataattataggagagcttacggcgagtgtactgacttcaaaatccccatccttggagtgcacctcaaggacctaattagcctgtatgaggctatgcccgattaccttgaagacggcaaggtgaacgtgcataagctgctggccctttacaatcacatctcagagctggttcaactacaagaggtagccccccccctcgaggccaacaaggatctggttcatctccttactctcagtttggatctatactacaccgaagatgagatttacgagctgtcttatgcaagagaacctcgcaatcaccgtgctcccagtgtgttcaaaaactacgatcatgatcaggatggctacatttcgcaggaagaattcgagaaaatcgcggcttccttcccattcagtttctgcgtgatggataaagatagagagggtctgatttcccgtgacgagattactgcgtattttatgagagctagttccatatatagtaaactgggcctgggtttcccacataattttcaggagactacctacctgaaacccactttctgtgacaattgtgccggcttcctgtggggagttatcaaacaagggtatcgatgtaagggcaataaatattctgaaagcagatag

SEQ ID NO: 131800 - DNA, 1794 bp, synthetic construct
  misc_feature 1..1794: note = Description of Artificial Sequence: Synthetic coding sequence
  source 1..1794: mol_type = other DNA
atgggaactctggggaaggctcgggaggctccgagaaagccatcgcacggctgcagggctgcctctaaggctaggctcgaggcgaagccagcaaactcaccatttccatcgcatcccagccttgcgcacattacccagtttcgcatgatggtctccctggggcatcttgccaaaggggcatccctggacgatctgatcgactcgtgcatacaatctttcgacgctgatggcaatctttgcagaagcaatcagttgctgcaggtaatgctgaccatgcaccgcattgtgattagctcagcagaactgctccaaaaggtaatcaccctctacaaagacgccctggccaaaaacagtcccggactctgtctcaagatttgttattttgtcagatattggatcaccgagttttgggtgatgttcaaaatggacgcttccctgactgatacaatggaggaatttcaggagttggtgaaggctaaaggtgaggagctgcattgcaggctcatcgatacgacccaaattaatgcccgcgactggtctcgcaaattgactcagcgcatcaaaagcaacaccagtaaaaaacgtaaggtaagtcttctatttgaccatctggaacccgaggagctttctgagcatttgacctaccttgagtttaaaagcttcaggcgtataagcttctcagactatcagaattatctggtaaattcatgtgtcaaggaaaatcctaccatggagcgttcaattgcattgtgcaacggcattagtcagtgggtgcagctcatggtcctgtcccggccaacacctcaactacgtgcagaggtgttcattaaattcatccaggtcgcgcaaaagctccaccagctgcagaactttaataccttaatggccgtaatcggcggcctctgtcactctagcattagcagattgaaggagacatccagccatgtaccccacgagatcaataaagtgctgggggaaatgacagagctcctgtcatctagtagaaattatgataattatcggcgcgcctatggcgagtgtaccgatttcaaaattcccatcttaggcgttcatcttaaagatctgatcagcctctatgaggccatgcctgattatctggaggacggcaaggtgaatgtgcacaaacttcttgcgctgtacaaccatatttccgaattggtccaattacaggaagtagctcctccactcgaagccaacaaggatctagtccatctgcttacactgagtttggatctgtactacaccgaggacgagatttatgaactgtcctatgcccgcgaaccgagaaatcatagggcaccatcggtcttcaaaaactatgaccatgaccaagatggctatataagccaggaggagttcgagaaaatcgccgcaagttttcccttttcgttctgcgttatggacaaggacagagaaggattaatttccagagacgagattacggcttacttcatgcgggcgtcatctatttattctaaactaggactgggcttccctcacaacttccaggaaactacataccttaagccgactttctgcgataattgcgctggattcttgtggggagtcatcaagcagggctaccgctgtaaagactgtggaatgaactgtcacaagcagtgtaaggacctggtggtatttgagtgcaaaaaaagggctaagaaccctgttgctccaaccgagaacaatacctccgtgggccctgtcagcaacctgtgcagcctgggggctaaagatttactccatggtaacaagtacagtgaaagccggtag

SEQ ID NO: 131801 - DNA, 1830 bp, synthetic construct
  misc_feature 1..1830: note = Description of Artificial Sequence: Synthetic coding sequence
  source 1..1830: mol_type = other DNA
atggccggcactctcgacctggacaaaggctgtactgtggaggagttgttgcgaggctgtatcgaggccttcgatgactcagggaaagtacgggacccccagctcgtccgtatgttcctgatgatgcatccctggtatataccaagcagtcaactggcagccaagctcctccatatttatcagcagagcaggaaggacaatagtaactccctacaggtaaagacctgccacctggtgaggtactggattagtgcttttcccgccgagttcgacctaaacccggaactcgccgaacaaattaaggagctgaaggccttgcttgatcaggagggaaaccgtcggcactctagcctgatcgatatcgacagcgtgcctacctacaaatggaaaaggcaagtcacccagaggaatcctgtgggccagaaaaagagaaaaatgtccttgctattcgaccatctagaacctatggagctagccgagcacctgacttacctggaatataggtctttctgcaagatactctttcaggattaccactccttcgtgacgcacggttgtactgtggataacccggtgttagaacgcttcatatctctgtttaattcagtgtctcaatgggtacagttgatgatcttaagtaagccgaccgcgccccagcgcgcactggtaattactcactttgtgcatgtggcggaaaagttgctacagcttcagaactttaacactctgatggccgtggttgggggcttaagccactcgagcattagccgcctgaaggaaacacacagccacgtgagccccgagactattaagttatgggagggtctcaccgagcttgttactgccaccggcaactacggcaattaccggcgtaggctggctgcatgcgtcgggttccggtttccaatcttgggcgtacacctcaaggatctggtggcgctgcaactggctctgcccgattggctagacccagcccgtacaagactgaacggggctaaaatgaagcagctgttcagcatcctggaagagctggcaatggtcacgtcgctgagacccccagtgcaggcaaatcctgatttattatccctgctaaccgtgagtttggatcagtatcagaccgaagatgagttgtatcagctaagccttcagcgagagccaagaagcaagagctcccccacgtcccctacaagctgtactcccccacctagacccccagtactggaggagtggaccagcgccgctaagcccaagctggatcaagccctcgtggttgagcatatagaaaaaatggtagagagtgtttttagaaatttcgacgtggatggggacggacacatttcgcaggaggagtttcagatcatccgggggaacttcccatacctgtcagcattcggcgatcttgatcaaaatcaagacggctgtatctcgcgcgaagagatggtttcctactttttgagatcatccagtgtgctgggaggtagaatgggattcgtgcacaattttcaggagtcaaacagcctgagacctgttgcatgtcgacactgtaaggcgctgatcctgggcatttacaagcagggcctcaagtgtagagcctgcggagtgaattgccataaacagtgcaaggataggctcagcgttgagtgccgcaggcgcgcacaaagcgtctcattggaaggctcagcaccgagcccttccccaatgcactcccatcaccacagggcctttagtttctcattgccccgccctgggcggaggggatcacgtcctcctgagattcgcgaggaagaagttcagacagtggaagacggagtgttcgacattcacctgtag

SEQ ID NO: 131802 - DNA, 1833 bp, synthetic construct
  misc_feature 1..1833: note = Description of Artificial Sequence: Synthetic coding sequence
  source 1..1833: mol_type = other DNA
atggccggcactctcgacctggataaaggctgtactgttgaagaacttttgcggggctgcattgaggctttcgatgatagcggaaaagtgagggatccccaactcgtgcgtatgttcctaatgatgcatccttggtacatccccagcagtcagctggcagctaagctactgcacatttatcaacagtcccgcaaggataacagcaattcccttcaagtgaaaacatgccatctggtgcgctattggatctccgccttcccagccgaattcgatctgaatcccgaactggccgagcaaataaaagagcttaaggccttgctagaccaggaggggaaccgccggcactcgtctctgattgatattgatagtgtccccacctacaagtggaagcgacaagtgacccagaggaatccggtcggacagaaaaaaagaaagatgtcgctgttgtttgatcacctcgaaccaatggaactcgccgaacatctgacatacctggagtaccggtccttttgtaaaatcttatttcaagactatcactcctttgttacgcacggctgtacagtggacaaccctgtcctggagcgcttcatttcactgttcaatagcgtttctcaatgggtgcagctgatgattctcagcaaaccaacagcaccccagcgtgccctcgtgatcactcatttcgtgcacgttgccgagaagttgcttcagcttcaaaactttaacaccctgatggcagtcgtaggcggcctgtcccactcctccatcagcaggctcaaggaaacccatagtcatgtgtctcccgaaaccattaaactctgggaggggcttacagagcttgttacagcaaccggcaactatggaaactatcggcgccgactcgcagcctgtgttgggtttcgctttcccatactgggtgtgcatctgaaggatcttgtggccttgcaacttgcacttccagattggctggaccccgcaagaacccggctgaatggcgccaagatgaagcaactgttctccatcctggaagaactcgctatggtgacgtctctgagacctcccgtccaggccaatccagacctgctctccctcctaactgtgagcctcgatcaataccagaccgaagatgagctctatcagctgtctcttcagcgggaacctcggtctaagagctctccaacatcgccgaccagctgcaccccaccccccaggccccccgtgctggaagaatggacatcggctgcaaaaccaaagctggaccaagccctggtggtcgaacatatcgaaaaaatggtggaatccgtatttcggaattttgacgtggatggggacgggcatatttcccaggaagagtttcagattatcaggggcaatttcccctatttaagcgcttttggggacctggatcagaatcaagacggctgcatatcccgagaggagatggtctcttacttcctccggtcttcgtctgtccttggagggagaatgggctttgtccacaactttcaggagtccaattcactcagacctgttgcttgcaggcactgcaaggctctcatcctcggcatatacaaacagggactgaagtgtcgtgcttgcggagttaactgccataagcagtgcaaagaccggctgtcagtcgagtgtaggcgcagagcccagtctgtgagtttggaggggagcgcccccagtccttctcccatgcactcacaccatcacagagcttttagtttttccttgccacgtccgggtcgacgcgggagtcgcccacccgcagaaatacgggaagaggaggtgcagacagtcgaagatggtgtgttcgatattcacctctag

SEQ ID NO: 131803 - DNA, 1830 bp, synthetic construct
  misc_feature 1..1830: note = Description of Artificial Sequence: Synthetic coding sequence
  source 1..1830: mol_type = other DNA
atggccggtactctggaccttgataagggatgtaccgtggaggagctgctgcgaggatgtattgaggcatttgacgactccgggaaggttcgcgacccacagttagtccgcatgtttctgatgatgcacccatggtatatccctagtagtcagttagccgcgaaactgctccatatatatcaacagagccgaaaagacaattccaactccttgcaagttaaaacatgtcatctggtgaggtactggatttcagcttttccagccgagtttgacctgaaccctgagctcgcagagcaaatcaaggaattaaaggctctcctggaccaggaggggaacaggcggcatagttctcttattgatatcgacagtgtacccacttacaaatggaagcggcaggtgacacaacgcaatcccgtcggacagaaaaaaagaaagatgtcgctgcttttcgatcatttggagccaatggagctcgctgaacatttaacctacctcgaataccgctctttttgcaaaattctgtttcaagactatcattcctttgtgacacacggatgcaccgtggacaatcccgtactggagcgctttatctcgttattcaatagtgtgtcccagtgggtccagctgatgattctcagcaaaccaacagctccccagagagccctcgtaatcactcattttgttcacgttgcggaaaagctcctgcagctgcagaattttaacactctgatggctgtcgtggggggattaagccattctagcatatcgcgtctgaaggagacccactcccacgtgagtcccgaaaccatcaaactctgggagggactgaccgaattggtgacagctactggcaactatggaaattaccgaagacgcctagcggcatgcgtgggctttcgctttccgattctgggggttcacctcaaggacttggttgctctgcagcttgcactccccgattggttagatcccgccaggactagactcaacggcgcgaagatgaaacaactgttctccattctggaggagttagctatggtcacaagccttagacctccagtccaggcgaaccccgacttattaagcttgctcaccgtctcgctggaccagtatcagacggaggatgagctgtaccagctctccctccagagggaaccccggagcaagagttctcctacatcacctacctcctgcacccccccacccaggccacccgtgctggaggaatggacatctgcagcaaaacctaagctcgatcaggccctggttgtggagcacattgaaaaaatggtcgagtccgtgtttcgaaattttgacgtcgatggggacggtcacatctcgcaggaagaattccagatcattcggggaaattttccctatctctcggcctttggggatctagatcagaatcaggatggatgtatcagccgggaggaaatggtaagctacttcctgcgctcatcctccgtgcttggcggtcgcatggggttcgtccacaatttccaggagtctaactcacttcgacctgtggcgtgtagacattgcaaggccctgatcctggggatctacaagcaaggcctcaagtgtagagcttgtggtgtcaattgtcataaacagtgcaaagataggctgtccgttgaatgccgaagacgggcacagtccgtttctctggagggttctgcgcctagcccaagccctatgcattctcatcaccaccgggcgtttagcttctcccttcctagacccgggcggagaggcagcaggcctcccgaaatccgagaggaggaggtccagacagtggaagatggagtgttcgacatccatctctag

SEQ ID NO: 131804 - DNA, 1830 bp, synthetic construct
  misc_feature 1..1830: note = Description of Artificial Sequence: Synthetic coding sequence
  source 1..1830: mol_type = other DNA
atggctggcacgctggacctggataagggttgcaccgtggaggagctcctgagagggtgcattgaagcgtttgatgacagcggaaaggtgagggatcctcagttggtgcgcatgtttctgatgatgcacccctggtacataccatcctcacaacttgctgctaagttgctccatatttatcagcagtcccggaaggataattccaactctcttcaggttaagacctgtcacctggttcgatattggatatccgccttccctgcggaatttgacttgaatcccgagttagctgaacagatcaaggagctgaaagcccttctggaccaggaggggaacagacggcactcgtctcttattgacattgactccgtcccaacttataaatggaaacgtcaggtgacccagaggaaccctgtgggccagaagaaaaggaagatgtccctactatttgatcacctggaacctatggaactggcagaacaccttacctatctggagtataggagcttctgcaaaatactgtttcaggactatcactcattcgtcacacatggctgcaccgtggacaacccagtgctggagcgctttatcagcctgttcaactctgttagtcaatgggtgcagctgatgatcctttctaaacctactgcacctcagagagctcttgtgataactcacttcgtgcatgtggccgaaaagctgcttcagctgcagaattttaacaccctcatggcagtcgtgggaggactctcacattctagcatttcaaggctgaaggaaacgcactcccacgtaagccccgagacgattaagctgtgggaggggctgactgaactggtcaccgctaccggaaattacggaaactatcgtcgccgccttgccgcctgcgtgggtttccgttttccaattctaggggtgcaccttaaagatctggtcgccctgcagcttgcactgcccgactggctggatccagctcgaactcggttgaatggggcaaagatgaaacagctcttctctatacttgaggagctcgccatggtgacatcgctgcgaccgcccgtgcaagccaaccccgatctgctaagcctgctaaccgtgtccctagaccagtaccagacagaagacgagctgtatcaactaagtctacagagagaaccccgcagcaaatctagccctacaagccccacctcctgcacccctccccccagacccccggtgctggaagagtggacttcagccgccaagcccaaactggaccaggccctcgtggtggaacacatcgaaaaaatggtggaatccgtctttagaaacttcgacgtggatggtgatggccacatcagccaagaagagtttcagattatccgcggcaacttcccttacctgagcgcttttggagatttagaccagaatcaggatgggtgcatcagtcgcgaggaaatggtgagctatttcctcagaagttctagcgttctgggaggacgtatgggcttcgtccacaacttccaggaaagtaacagcctgcgacccgtggcatgccgtcattgcaaagccctcattctgggcatctataaacagggccttaaatgccgcgcctgcggagttaactgccataagcagtgtaaagatcgcctgtccgtcgagtgccggaggcgagcccagtccgtgagtctggagggcagtgccccatcacccagccctatgcactcacaccatcatcgtgctttctccttttcactaccccgtccaggaaggcgggggagccgccctccagagattcgggaagaagaggtgcagaccgtagaggacggcgtgtttgatatccacctgtag

SEQ ID NO: 131805 - DNA, 432 bp, synthetic construct
  misc_feature 1..432: note = Description of Artificial Sequence: Synthetic coding sequence
  source 1..432: mol_type = other DNA
atggctgggaccttggacctcgataagggatgtacagtggaagaactcctgagaggctgtattgaggcattcgatgactcggggaaggttagagatcctcagctggtgcggatgttcctcatgatgcacccctggtacattccgtcaagccaactcgccgccaaacttctgcatatctaccaacagtctaggaaggataactcaaacagtctccaggttaaaacatgtcatctggtgcgctactggattagcgcctttcccgccgagtttgacctgaacccagaactagcagaacagattaaggaactcaaagcgctgcttgatcaggaggggaacaggcgccactcaagcctaatcgacattgacagcgtgtgcgtaggcgagcacagaggccttggcggccatagcgtctcttacacgatctgcgcctag

SEQ ID NO: 131806 - DNA, 1731 bp, synthetic construct
  misc_feature 1..1731: note = Description of Artificial Sequence: Synthetic coding sequence
  source 1..1731: mol_type = other DNA
atgaaccgcaaggattcaaaaagaaagagccaccaggaatgtaccggcaagatagggggtcgcgggcgaccaagacaggttcgcaggcataagacctgtccgtcacctagggagatatctaaagttatggctagcatgaatctgggcttactctctgagggcggatgtagcgaagacgagctgctggaaaaatgtatccagtcttttgattcagccgggtctctgtgccacgaagaccacatgctcaacatggtcctcgctatgcattcttgggtgcttccatcggctgacctggccgcgaggctgctcacttcctaccagaaagcaacaggcgacacccaggagcttagacggcttcaaatatgccacctcgtgagatactggctgatgcggcacccagaagtcatgcaccaggaccctcagttagaggaggtgatcgggcgcttttgggcaacggttgctcgcgaaggtaacagtgcgcagcgcaggctgggcgattcatctgatctccttagtcccggggggccaggaccacccctacccatgtctagccccggcttggggaagaagcggaaagtctccctgctttttgatcacttggagaccggcgagttagcacagcacctaacgtatctggaattccgatcctttcaggccatcaccgcacttttggaactaacagaattgttggcttcacataacaactatgcacgttaccggcgcacgtgggcaggatgtgccggtttcagattaccagtgttgggcgtgcacttaaaagacctggtcagcctgcacgaggcacagccagatcgcttgcctgatgggcgcctccacctccctaagctgaataacctctacctacgtcttcaggaactggttgcccttcagggccagcaccccccatgctccgcaaacgaggacctattgcacctgctgactctgtctttggacctattctataccgaggacgagatttatgaactgtcctatgctcgcgagccccggtgcccaaagagtcttccaccctccccatttaatgcccctctggtcgtagaatgggcccccggtgtgacccctaagccagacagggttacactggggcgccatgtcgaacaactcgtggagtcagtgtttaagaactacgatccggaaggcaggggcacaataagccaagaggatttcgaacgtctgagcggaaattttccatttgcctgccatggcttacacccgccgccacgacagggtcggggctccttcagtcgcgaggaacttaccggctacttgctcagggcctccgcaatttgctccaagctcggcctggcatttttacatactttccacgaggtcacatttaggaaacctacattttgcgatagttgtagtggatttctgtggggggtcacaaagcaaggctatagatgcagagaatgcggactgtgctgtcacaagcattgccgggaccaagtgaaggtggaatgtaaaaaacgtccaggggccaaaggcgatgctggccccccaggagctcccgtgccctccacccccgcaccccatgctagttgcggtagtgaggagaaccactcatatacacttagtcttgaaccagaaacaggctgccaacttcgccatgcctggacacaaacagaatctccccacccctcttgggagacagacaccgttccctgcccagtcatggatccgccaagcaccgcgagcagcaaacttgacagctag

SEQ ID NO: 131807 - DNA, 1854 bp, synthetic construct
  misc_feature 1..1854: note = Description of Artificial Sequence: Synthetic coding sequence
  source 1..1854: mol_type = other DNA
atgaatcgcaaggacagcaaacggaagtcccaccaggaatgtacaggcaagatcggtggccgcggccggccccggcaggtgcggagacataaaacatgcccgtcaccccgcgaaatctccaaggttatggcatcaatgaatctggggctgttatctgagggaggctgttctgaggatgaactcctcgaaaaatgcatccagtcctttgatagcgccggaagtctttgccacgaggatcatatgctgaatatggtgctcgccatgcactcatgggtactgccctctgctgatctcgcagcacgccttctcactagctatcagaaagcgacaggggatacacaggagctcagacgtctccagatctgccatcttgtgaggtactggctgatgcggcaccccgaggttatgcatcaggaccctcagttggaagaggtgatcggacgcttttgggccacagtggcacgggaaggcaactcagcccagcgtaggctgggggacagttctgatctcctcagtcctggcggtcccggccccccactcccgatgtcatctcctggacttggcaagaagaggaaggtatctttgctcttcgaccatctggaaactggtgagttggctcagcacctcacttaccttgagtttcgatctttccaggccattacccctcaggatctccgctcctatgttctgcagggatctgtaagagggtgtccggccctggagggatctgtgggattgtcaaatagcgtatccagatgggtgcaagtcatggtgctatcaaggccaggacccctgcagcgcgcgcaggtcttggacaagtttatccacgttgcacagcgtcttcaccaactgcagaattttaatacccttatggcagtgactggaggactgtgtcactccgcgataagtcgcctgaaggactcccacgctcacctttcccccgattcaactaaagctcttcttgagctcaccgagctcttggcctcccataataattatgcacgttatcgacgcacttgggctggctgcgccggctttcgccttcccgttctgggggttcacctgaaggacctggtctccttacacgaggcacagcctgaccgcctgcccgatggaaggcttcatctgcctaagctgaataacctatatttaaggctgcaggagctcgtggccctgcaggggcaacacccgccctgttctgccaacgaggacctgctgcacctgctgacactgtccctggatctcttctataccgaagatgaaatttacgagctctcctatgcacgcgaaccccgatgtcctaagtccctgcccccaagcccttttaacgcaccattggtggtggagtgggccccgggagtaacccccaagccagatagagtgaccctaggtaggcatgtggaacagctggtggaaagtgtctttaagaactatgaccccgaagggagaggcaccatatcacaagaggacttcgaacgcttatctggaaattttccattcgcctgccacggcttgcacccacctcccaggcaggggagaggttctttctctcgtgaagaactgactggctatttgctccgagctagcgccatttgctctaagctgggcctggcatttttacacacttttcatgaagtgacttttcggaaacctacattttgcgacagctgtagcggatttctgtggggcgtcaccaagcaggggtatagatgtaggggagagtggggcgtgtctgagtgggagggctccctaggaccccaggcaggaagaatggatgacacagaccgtaccccagctgccgcctttccgcagtctgccggatgtgtggcaacaaataccgccgagactaggtag

SEQ ID NO: 131808 - DNA, 1455 bp, synthetic construct
  misc_feature 1..1455: note = Description of Artificial Sequence: Synthetic coding sequence
  source 1..1455: mol_type = other DNA
atgaaccgaaaagatagcaaacggaagtctcatcaggagtgtactggtaagatcggcggtcgcgggcgtccccggcaggtgcgacggcataaaacttgtccaagcccccgtgagatctccaaagtgatggcgagtatgaacttaggactcctgtctgaagggggctgttctgaggatgagctgctcgagaaatgcatacagtccttcgacagcgctgggtctctttgtcacgaggaccacatgctgaacatggtcctggcaatgcactcttgggttttaccgagtgctgacttagccgctcgcctacttaccagttaccaaaaagcaacaggggatacccaagagttgagaaggcttcagatctgtcacctagtcaggtactggttgatgaggcacccagaagtcatgcatcaagatccacaactggaagaagtgattggcaggttctgggcgacagtcgcccgcgaggggaacagtgcccagcgtagactgggcgattcttctgatctcctgtcccctggtgggccagggccccccctacccatgagctctcctgggctgggtaaaaaacgcaaggtctcattgctgtttgaccacctagaaacaggggaactcgctcagcacctcacttatttagaatttcgctctttccaggccatcactctaagtctggacctgttttatacagaagacgaaatctacgaattatcttacgcccgagaaccaagatgtccaaagtctttgcctccgtcaccatttaatgcaccgctggtcgtggagtgggctcctggagtgacaccaaaaccagatcgagttacgctggggcggcatgttgaacagctagtggagagtgtctttaagaactacgatcccgagggcaggggcaccatctcccaggaagactttgagcgcctgtctggcaactttccctttgcctgccacgggcttcatccccccccaaggcaaggtaggggctccttctctcgggaggaattaaccggatatctacttcgtgcatccgccatatgctccaaactgggactggcattcctccacaccttccacgaggttacctttcggaaacctacattctgtgatagctgcagtgggttcttgtggggtgtcacaaaacagggctaccgctgcagggagtgtggcctttgctgccataaacactgtcgggatcaagtgaaggttgagtgcaagaaacgcccaggtgcaaagggggatgccgggccacctggcgctcctgttccctcaactcctgcccctcacgcctcatgcggcagcgaggaaaaccactcttacacgctttccctcgagcctgaaacgggatgtcagctccggcacgcctggacgcagaccgagagtccccatccttcttgggagacagacactgtgccttgccctgtaatggatccacccagtacagccagctcaaagctcgatagctag

SEQ ID NO: 131809 - DNA, 1746 bp, synthetic construct
  misc_feature 1..1746: note = Description of Artificial Sequence: Synthetic coding sequence
  source 1..1746: mol_type = other DNA
atgaacaggaaagattcaaaacggaagagccaccaagaatgtactggtaagataggaggacgcgggaggccacggcaggtgaggcgtcataagacgtgcccctctcctagggagatttccaaagtaatggcatcaatgaacctcggtttgctatcagaggggggatgttctgaagacgagctgttagagaaatgtatccaaagttttgatagtgctggctccctctgtcacgaggatcacatgctcaatatggttctggcgatgcatagctgggtcttaccctctgcagacttagctgctaggctccttaccagctaccagaaagctacaggcgacacacaggaactcaggcggctgcagatttgccaccttgttcgatactggctgatgaggcatcctgaagttatgcaccaggatccccaactggaagaggtcatcggccgtttctgggcgacagtggccagagaggggaactctgcccagcgacgcctgggggattcatcagatttattatcccccggcggcccaggcccaccactccccatgtccagtccaggcctggggaagaaaaggaaagtttctctgctgtttgaccacctagagacaggggagctggcacagcacttgacatacctcgaattccggtctttccaggccatcaccccacaggatttacgcagttacgtactccagggaagcgttaggggctgccccgccctcgaaggctctgtgggattgtctaattcggtcagccgctgggtgcaggtaatggtgctgtcaagacctggtccactgcagcgggcccaggtgttggataaatttatccacgtggcccaacgcctgcatcagctacagaacttcaataccctgatggcagtgaccggaggactctgccacagtgctatctcacggctgaaagatagtcacgcccacctctctcctgacagcacgaaactgagtctcgacctgttttatacagaggatgagatttacgagctgagctatgctcgcgagcctcggtgccctaagagccttcctcccagcccgttcaacgccccattggtcgtggaatgggcgccaggagttacccctaagccagatcgtgtgacacttgggcggcatgtcgagcagttggtggaaagcgtgttcaagaattatgaccctgagggtcggggaaccattagtcaggaggactttgaaagattgtcgggcaatttcccatttgcctgccacggcttacatcccccacctagacagggcagaggctcattttccagggaggaacttaccgggtacctcttacgcgccagcgcaatttgctccaagttgggcttagccttccttcacacctttcacgaggttactttccgcaagcctacattctgtgactcttgttccggcttcttgtggggcgttacaaagcaaggctaccggtgtcgggaatgtgggctctgctgccataagcactgtagagaccaggtcaaagttgaatgtaaaaaaagacccggcgcgaagggggacgccggaccacctggagcacccgtgccaagtacaccggcccctcatgcctcatgtggcagtgaagagaatcatagttacacactcagcttagaaccagagacgggctgccaattaaggcatgcttggacccaaactgaatctccccacccaagctgggaaaccgatacagtcccctgccccgtaatggacccgcccagtactgcctcctctaagcttgattcctag

SEQ ID NO: 131810 - DNA, 2022 bp, synthetic construct
  misc_feature 1..2022: note = Description of Artificial Sequence: Synthetic coding sequence
  source 1..2022: mol_type = other DNA
atgaataggaaggacagtaagaggaagtctcaccaggagtgcaccgggaaaataggtggaagggggagacccaggcaggtgcgcagacacaaaacatgtcctagtccacgcgagatatccaaggtgatggcgtccatgaacctgggccttctcagcgagggcgggtgctccgaagatgagcttttggaaaaatgcatccaaagctttgattccgccggttctctatgtcacgaagatcacatgttaaatatggtgctggctatgcactcatgggtgctcccgtccgccgaccttgccgcccgcttgctgacttcgtaccagaaagccaccggcgacacacaggagttgcggcggctgcagatttgccacctggttaggtactggctcatgaggcatcctgaggttatgcaccaagacccacagttggaagaagtgatcggtcgcttttgggccactgttgcacgggaaggcaattccgctcagagaagacttggcgattcttcagatctgttgtctcccggcggaccagggccacctctacctatgtcaagccctggattaggaaaaaagagaaaggtctcactgctttttgatcatctcgaaacaggcgagctagcacagcatctgacttatctcgaattcaggtcgtttcaggctatcaccccacaggatttacgtagttatgttctgcaaggttcggtgagagggtgtcccgcccttgaagggtccgtggggctgagcaattctgtgagccgctgggtacaggtgatggtgctctctcggccaggcccccttcagcgcgctcaggtgttggataaattcattcacgtcgctcaacgtctccatcagctccagaattttaacactctcatggctgtgacaggagggctatgtcatagcgccatatcccgccttaaggattcccatgcccacttgtctcccgacagtaccaaggccctcctcgaactaaccgagctgctcgcctcgcacaacaattacgcacggtatagaaggacttgggccggctgcgctggcttcagactgcccgtgttaggcgtccatctaaaggacctcgtttcactccacgaggctcagcctgatcggctgccagacggaagactgcatttgcccaaactgaacaatctctacctgaggctgcaggaactggttgcactgcaagggcagcatccgccctgcagcgccaacgaggacctgctccaccttctaacattgtccctggacctgttctacaccgaagacgagatctatgagctcagttacgcccgtgagccaaggtgccccaagtctttgccaccgtctcctttcaatgcccctttggttgtggagtgggccccaggtgtgacccccaagccggatcgggtcaccctcggcagacacgttgaacagctggtggaatccgtcttcaagaactacgatcctgaagggagggggaccatttctcaggaagactttgagagattatccggtaacttcccatttgcctgccacggcctgcaccccccacctcggcaaggccgtgggagcttctcgcgcgaagagcttactggttatctactgcgcgccagtgcaatctgcagcaaattggggctcgctttcctgcatacattccacgaggtgacctttagaaagcccactttctgcgactcgtgctccggattcctgtggggcgtcaccaaacagggatatcgctgtcgcgagtgcggactctgctgccataagcactgtcgggatcaggtgaaagttgagtgcaagaagcgacctggtgcaaagggggatgcggggccccctggagccccggtgcctagcactcccgccccacacgcttcctgcggcagcgaagaaaaccatagctatactcttagtctggaaccggagaccgggtgccaactgaggcatgcgtggacacaaacagaatccccacacccctcctgggagaccgacactgttccctgtcctgttatggacccgcccagcacggcaagcagcaaattggactcctag

SEQ ID NO: 131811 - DNA, 1980 bp, synthetic construct
  misc_feature 1..1980: note = Description of Artificial Sequence: Synthetic coding sequence
  source 1..1980: mol_type = other DNA
atgaacaggaaggacagcaagcgtaaatcccaccaggaatgcaccggaaaaatcgggggacggggacggcctagacaagtgagaagacacaagacatgcccctctccacgggagatttcgaaagttatggcatcaatgaacctcggcttgctctccgagggaggctgtagcgaagacgagttactggagaaatgtattcagagtttcgattccgccggatccctgtgccatgaagaccacatgctaaacatggtgctggctatgcattcttgggtacttccttctgcagatttagccgctcgcctgctcacctcttatcagaaagcaaccggggatactcaggaattgaggcgcttacagatctgtcatttggtgcgctattggctgatgcggcacccagaagtcatgcaccaggatccacagctggaagaggtgatcggacggttttgggccacagtcgcgagagaaggtaatagtgctcagcggcggttgggcgactcttccgacctgcctggactcggaaaaaagcgtaaggtgtctttactttttgatcacctcgagaccggtgagctggcgcagcacctaacctatctggagtttcgcagctttcaggctatcacacctcaggatctacggtcgtatgtactgcagggttctgtacggggttgtcccgcactggaaggtagcgtgggtctttccaactctgtgagtcgctgggtgcaggtcatggttctcagtcggcccggccccctccagcgggcacaagtgctggataagtttatccatgtggcccagcgcctccaccaactacagaattttaacacattgatggccgtcactggcggactgtgtcatagcgctatcagtcggctgaaagactcccatgctcaccttagccctgatagtactaaggcccttcttgagctgactgaactattggccagccataacaattacgcccgctaccgaagaacttgggcgggttgtgctggatttcggttgccagtgctgggcgtgcatctgaaagacctcgtgtctttacatgaagctcagcctgatcggcttcccgacggcaggctccatctgcccaagctcaacaatctctatttgcgcttgcaggaactggtagctttgcagggccaacatccgccctgtagcgctaatgaggatctcctacatctgttgacactgtcactggacctcttctacaccgaggacgagatctatgaacttagctacgctcgggagcccagatgcccaaagtctctgcccccttctccattcaacgctcctttagtggtggaatgggcgcccggggtcacacccaaacctgacagagtgacgttgggcaggcacgtggaacagcttgtggagtctgtatttaagaattacgatcctgaggggagggggacgatctctcaagaggatttcgagagactgagtgggaatttccccttcgcttgccatggccttcaccctccccccagacaaggccgtggttcttttagtagggaggagctgacaggctatcttttgcgggcctccgcaatctgctccaagcttggtttggccttcttgcatacattccacgaagtaacatttaggaagcctaccttttgtgatagttgctccggatttctgtggggggtgaccaagcagggctaccgttgcagggagtgtggactctgttgccacaaacactgccgagatcaagtaaaggtcgagtgcaagaaacgcccaggtgctaaaggcgacgctgggccacccggggcaccagtccccagcacacctgctcctcatgcttcttgcggctcagaagaaaatcactcctacaccctttcgttggagccagaaacagggtgtcagcttagacacgcctggacgcagacggagtccccacacccgtcatgggagacagacacagtcccttgccctgtgatggacccaccgtctacagcctcgtcaaaattggatagttag

SEQ ID NO: 131812 - DNA, 1815 bp, synthetic construct
  misc_feature 1..1815: note = Description of Artificial Sequence: Synthetic coding sequence
  source 1..1815: mol_type = other DNA
atgaatcgcaaggattccaagagaaagtcccaccaggaatgcactgggaagatcgggggccgagggagaccaagacaggtgaggaggcataaaacctgcccaagtccccgggaaattagcaaggtgatggcttctatgaatctggggctgctgtctgaaggcggctgttccgaggacgaactactggagaagtgtattcagtctttcgatagcgccgggtccttgtgccatgaagaccatatgttaaatatggtactggcaatgcactcctgggtcctccccagtgccgacctggcagctcggctgctcacgtcatatcagaaagcaacaggggatacccaggagctgcgacgactccagatctgccacttggtgagatactggctcatgaggcacccagaagtcatgcatcaggaccctcaacttgaagaagtgatcggccgattttgggccactgtcgcccgtgaggggaatagcgcacagcgaaggctgggcgattcctcagatctgctgtccccaggtggccctgggccgccactgcccatgtcaagccctggcctgggtaaaaagaggaaggtctcgctcctgttcgatcacctggagacgggagagctggcccagcatttgacttatctggagttccggagctttcaagcgataacaccccaagacctgagaagttatgtgctccagggttcggttagaggttgtcccgcattagagggttcagtaggcctgtctaacagcgtgtctcggtgggtgcaggtcatggtgttgagcagaccgggtccactccagagagcacaggtgctggacaagtttatccacgtggcccagcggcttcatcagctgcagaactttaatactctcatggccgttacaggagggctgtgccattcggccattagcagactgaaagattcccatgctcatttatcacccgattccacaaaagaactcgtcgcattgcagggccagcacccaccatgttcagcgaacgaggacctgctgcatctgctaacacttagtttggatctgttttatacggaagatgagatctacgaactctcctatgcaagagaaccacgatgcccaaaatctttgcctccttccccttttaacgctcctctggtggtcgaatgggctcccggggtgaccccgaaacccgaccgggtgacgctcggtagacatgtcgagcaactcgtcgaaagcgtttttaaaaattatgaccccgaaggccgggggaccatatcccaggaagacttcgagagacttagtggcaattttccattcgcctgccacggactgcaccctcctcctcgtcaaggccggggaagcttctcaagagaagaactaactggctatctgctccgtgccagcgcaatatgcagtaaattagggctcgccttcctgcatacattccacgaggtgacgttcaggaaaccaaccttctgtgactcatgctccgggtttctctggggggtgacaaagcaaggataccgctgtcgggaatgcggcctctgctgccacaaacattgcagagaccaggtcaaagttgagtgcaaaaaaagacccggagccaaaggagatgctggtccacctggcgcacccgttccatctacccctgccccccacgcctcctgcggaagcgaagaaaaccactcatacaccctttccctcgaacccgaaactggctgtcagctgcggcatgcatggacccagacagagagcccacatccttcttgggaaacagacaccgtcccctgccccgtgatggatccccccagcaccgccagtagcaaactcgactcctag

SEQ ID NO: 131813 - DNA, 1857 bp, synthetic construct
  misc_feature 1..1857: note = Description of Artificial Sequence: Synthetic coding sequence
  source 1..1857: mol_type = other DNA
atgaagaaagacgtcagaatactgctggtgggagagccccgagtgggaaaaactagccttataatgagcctagtgtccgaggagttcccagaagaggtgccccctcgcgccgaggaaattacaattcctgccgacgttaccccagaacgggtgcccacccacatcgtggactatagtgaggcagagcagagtgatgagcaattacaccaggaaatttcccaggccaacgtaatatgcattgtctatgctgtaaataataaacattctatagacaaggtgacttctagatggatacctcttattaatgaaaggacagacaaggacagcagacttccgctgatcctggtagggaataagagtgacttagtcgaatattcttcaatggaaaccatacttccaattatgaaccagtacactgagattgagacttgtgtggaatgttctgctaagaacttaaagaacatctcggaactgttttactacgctcaaaaggcagtgctccaccctacaggccctctttattgtcccgaggagaaggagatgaagcccgcatgtatcaaagccctaacacgaatcttcaaaatttccgaccaggacaatgacggcaccttgaacgacgcggaacttaactttttccagagaatctgttttaataccccgctggcccctcaagcattggaggacgttaagaacgtggtgaggaaacatatctctgacggtgtggctgacagcggtctaactctgaaggggttcctgttcctgcatacactgtttatccaacgaggacgacacgaaacaacatggacggtgttacgacggttcggatacgatgatgatttggatctgacccccgagtatttattcccccttttgaaaatcccgcccgactgtacgactgaacttaaccaccacgcttatctgttcctacagagtacatttgacaaacatgacctcgatagagattgcgccttatcccccgacgaattgaaagatctctttaaggtctttccgtatattccttggggaccggacgtgaacaacacagtgtgcacaaacgagagggggtggattacctatcaagggtttctctcacagtggacacttaccacctatctggatgtgcagcgttgtctggagtaccttggctacctaggctactctatccttacagaacaggagagccaagccagtgctgtgactgtgacccgcgacaaaaaaattgacctccagaagaagcaaacccaaaggaatgttttccgatgtaatgtgattggtgtgaagaactgtggtaagagtggcgtgctgcaggctctccttggccgcaacctgatgcggcaaaagaagattagggaggatcacaagtcttattacgccatcaacaccgtgtacgtttacgggcaggaaaaatacttattattgcatgatatttctgagagcgaatttcttacagaagccgagatcatttgtgatgtagtgtgtctggtctatgacgtttccaacccaaaaagctttgaatactgtgctagaatcttcaaacagcattttatggactcgaggattccgtgtttaatcgtagctgcaaaatccgatttgcatgaagtgaaacaggagtacagcatatcccccaccgacttctgcagaaagcataagatgccacccccccaggccttcacctgtaacaccgcggacgccccctccaaggacatcttcgtaaagctcacgacaatggcaatgtatccacatgttacccaggccgatctgaagtcttccacattctggttaagagcctctttcggtgctactgtatttgctgtactaggctttgccatgtacaaagcgcttctcaagcagagatag

SEQ ID NO: 131814 - DNA, 1980 bp, synthetic construct
  misc_feature 1..1980: note = Description of Artificial Sequence: Synthetic coding sequence
  source 1..1980: mol_type = other DNA
atgaaaaaagacgttcgaatacttctcgtgggcgagcctcgggttggaaagactagcttgatcatgagcctggtatccgaggagttcccagaagaagtgccgccccgcgcagaagaaatcacaatccccgcagatgtaacccctgagcgggttccgactcacattgtggattacagcgaggcagagcagtccgatgagcaactgcaccaggagatttcacaggccaatgtcatttgtatagtctatgctgtcaacaataaacattctatagataaggtcacatcacgttggattcctcttataaatgaaaggacggacaaggatagccggcttcctctaattctggtgggcaacaagtcagacctggtagaatattccagcatggaaacaatcttaccgatcatgaaccagtacaccgaaatcgagacgtgtgtggaatgctctgccaaaaacttaaaaaatatctcagagttgttctactacgcgcagaaggccgttctgcatccaacgggtcctctttactgtcctgaggaaaaagagatgaaaccagcttgtattaaggctctgaccagaatcttcaaaatctctgaccaggacaatgatggtaccttgaacgatgcagagcttaatttttttcagcgcatttgttttaacacacccttggcccctcaggccctagaggatgtcaagaatgtggtgcgtaagcacatatctgatggcgtggccgatagtgggctcaccctgaagggtttcctgttcctacataccctcttcattcaacgtggacggcatgagactacttggactgtgctgcggcggtttgggtatgacgacgacctcgacttaacgccggaatatttgtttcccctgctgaaaatcccacccgattgcacaaccgaactgaatcaccacgcctatctatttctgcaaagcaccttcgacaaacatgacttggaccgggattgtgccctttcccctgacgagctgaaggacctgttcaaagtgtttccatacatcccctggggccctgacgtgaataacactgtatgtactaatgagaggggctggataacttaccagggttttctgtctcagtggactctcaccacgtatctcgacgttcagagatgtttggagtacctagggtacctgggatatagcatactaacagaacaggaatcgcaggcttccgccgtaactgtgacgcgcgataaaaagatcgatctgcaaaaaaagcaaacccaacgcaacgtgttcagatgtaatgtgatcggcgtgaaaaattgtgggaagagtggggttttacaggcgctgctcggtagaaatctgatgcgccagaagaaaatcagggaggaccacaagtcctattacgccattaataccgtctatgtgtatggtcaggaaaagtatttactcctacacgacatttcggaatcagagttcctcaccgaggccgagatcatctgcgacgttgtctgcttagtgtacgacgttagcaacccaaagagcttcgaatactgtgcccgcatcttcaagcagcactttatggattccagaattccgtgccttattgtggctgctaaatcggacctgcatgaagtaaagcaggagtactctatatcccccaccgacttttgtcgcaagcacaagatgccccctcctcaggcttttacctgcaacaccgctgacgccccttcaaaggacatcttcgtgaagcttaccactatggcgatgtaccctcatgcacgactcaggtgcatgtgcacatgtaaccgctgtacattttgcatttgtcagaactttctaaatagcgacttactccagtccgtcaagaacaagatcttcaccgccgtactgaatagacacgtgacccaggctgatctgaaaagttcaacattctggctgagggcctcctttggtgcaactgtcttcgccgttttggggtttgccatgtacaaggctttattgaagcaacgatag

SEQ ID NO: 131815 - DNA, 2076 bp, synthetic construct
  misc_feature 1..2076: note = Description of Artificial Sequence: Synthetic coding sequence
  source 1..2076: mol_type = other DNA
atgaagaaagatgtccgtatcctgctggtcggggaaccacgagtggggaagacttcactcatcatgtctctcgtgtccgaggagttccccgaagaagtcccacctcgtgccgaggagattacgatccccgccgatgtgacaccagagcgcgttccgacccatatcgttgactattctgaggcagagcagtccgatgagcaactgcatcaggagatcagccaggccaatgtgatttgcatcgtctatgcagtgaacaacaagcacagtattgataaagttacttctcgatggattcctcttatcaacgaaagaacagacaaagactcccgacttccactgatactcgttggtaacaaaagtgatctggtggagtattcaagtatggaaaccatcctgcccatcatgaaccagtatacagaaatcgagacttgcgtggaatgctcagcgaagaacctaaagaatattagcgagctcttctactacgcgcagaaggctgtcctccatccaactggtccattatattgcccagaggaaaaagaaatgaagcctgcttgtatcaaggccctgacccggatcttcaagattagtgatcaggataacgacggtacgctgaatgacgccgagctgaacttcttccaacgtatttgctttaacactccactggctccccaggcgctggaagatgtgaagaatgtggtaagaaagcacatttctgatggagtggctgactcaggacttacgctgaaaggttttctctttttacacaccctgtttatacagcgcggacgacatgagacgacctggacggtactcagacgattcggttatgacgatgatctggacctgacacctgagtacctcttcccgctgctcaagatcccccctgattgcacaactgagctgaaccatcacgcttacctgtttctgcagtcgacgtttgacaagcacgacctggaccgggattgtgccttgtctcccgacgagctgaaggacctgttcaaagtctttccctacattccgtggggccccgacgttaataatacagtgtgtaccaacgagagaggttggattacctatcaaggcttcctgagccagtggacgctgacgacatatctggatgtgcagaggtgcctcgaatacctggggtacctcggatacagtatccttacagaacaagagtcccaagccagcgccgttacggtaacacgtgacaagaaaatcgatctgcagaagaagcagacccaacggaacgtctttcgttgtaacgtgattggcgtcaagaactgtgggaagagcggggtcttgcaggctctactgggcagaaacctcatgagacagaagaaaattcgggaggaccataagagttactacgcaatcaatacggtttacgtctatggccaggagaagtatctgctgctccatgatattagcgagagtgagttcctgacagaggcggaaatcatttgtgacgtggtttgccttgtgtatgacgtgagcaatccgaaatctttcgaatattgtgcacgaatttttaagcaacactttatggactctagaattccatgtctcatagtggccgcgaagtcggacttacatgaggtcaagcaggagtattcaatatcacctacagatttctgtagaaaacacaagatgccgcccccacaggcgtttacctgtaatacagctgatgcgccatctaaggatatcttcgtcaagctcaccaccatggccatgtacccagaagatcattaccgagaccgactttcgcgggatatgggacacaccgatagaattgagaaccttcggaaaatctgggtcttcttaaagaccgcgtttcatgccaggttgcgctgcatgtgtacatgtaataggtgtacattctgcatctgtcagaattttttgaactcagatttgctccagagcgtgaaaaataagatttttaccgccgtcctaaaccgccatgtaacacaggccgacctgaaatctagcacgttttggctgagagccagttttggagctactgtgtttgcggtactcgggtttgcaatgtataaagcgctcctgaagcagcggtag

SEQ ID NO: 131816 - DNA, 1953 bp, synthetic construct
  misc_feature 1..1953: note = Description of Artificial Sequence: Synthetic coding sequence
  source 1..1953: mol_type = other DNA
atgaagaaggacgtgcggattttattagtgggggagccccgcgttggaaaaacatcactcataatgtccctcgtgtccgaggagttccccgaggaagtccctccccgggcagaggagattacaatcccggcggacgtgactccggagagagtacctacacacattgttgattacagcgaggctgaacagagtgacgaacagcttcaccaagaaatttcacaggcaaatgtcatttgcattgtgtacgccgtgaataacaagcattccattgacaaggttactagccgttggatcccactcatcaacgaacgtactgacaaagacagccggcttcctttgatactggtcggaaataaaagcgacctggtagagtatagctccatggaaaccatcctgccaattatgaaccagtatactgaaatcgaaacttgcgtggagtgctccgcaaagaatttgaaaaacatatccgaacttttttactatgcccagaaggccgtgctccacccaacagggcctttgtactgtccagaagagaaagagatgaaacctgcatgcattaaagccctcacccggatcttcaagatcagcgaccaggacaatgacggtaccttgaacgacgccgagcttaatttttttcagagaatttgtttcaatacgcccctggccccccaggccctcgaagacgtcaagaatgtggtgaggaaacacattagtgatggcgtggctgattctgggctgactctcaagggttttctttttctgcacactctgtttattcaaaggggccgtcatgagacgacatggacggtgctcagacgatttggatacgacgatgacttggacctgactccggaatacctctttcccttgctcaaaattcctcctgactgtactaccgagctcaaccatcacgcatatctatttttgcagtccaccttcgacaagcatgacctcgatcgagactgcgcgctgagccctgacgaattgaaggacttgttcaaggttttcccatacattccctgggggcccgatgtcaacaacacggtatgtacgaacgagagaggatggatcacataccagggtttcttatcacagtggacactgactacctacttggacgttcaacggtgtcttgaatacctggggtacctgggctatagtattctcaccgagcaggaatctcaagcaagcgccgtcacggttacacgggacaagaagatcgatctgcagaagaagcagacgcaacgcaatgtctttaggtgtaatgtgattggtgtgaaaaactgtggcaaaagcggcgtgcttcaggccctgctcggtaggaatctaatgcgacagaagaagattcgagaggatcacaagtcatactatgccatcaatacggtgtatgtgtacgggcaggagaagtacctcctattgcacgacatttccgaatcggaattcctgactgaggctgaaatcatatgcgacgtcgtctgcctggtctatgacgtatctaaccctaaatcttttgaatactgtgctagaattttcaagcaacactttatggactctcgaatcccatgtctgatcgttgctgctaaaagcgatctgcacgaggtgaagcaggaatactccattagcccgacagacttctgcagaaaacacaaaatgccgcctcctcaggcttttacttgtaacaccgcagatgctccgtcaaaagacatcttcgtgaagttgacaacgatggctatgtaccccgaagatcactaccgggacaggctctccagagacatgggccatacagataggattgaaaatctgcggaagatctgggtctttctcaagactgcacttcacgttacccaggccgatctcaagtcctctacattttggctgcgagctagtttcggtgctaccgtgttcgctgtgcttgggttcgccatgtataaagcactcctgaagcagagatag

SEQ ID NO: 131817 - DNA, 744 bp, synthetic construct
  misc_feature 1..744: note = Description of Artificial Sequence: Synthetic coding sequence
  source 1..744: mol_type = other DNA
atgaaaaaggacgtgaggatcctgctggttggagaaccgagagtgggcaagacctccctcataatgtctctggtgtcagaggaattccccgaggaggtgcctccaagggccgaagaaattaccatccctgctgacgtaacgcccgagagggtgccaacacatatcgtcgactattctgaggctgaacagtccgacgaacagctgcatcaggaaattagtcaagccaatgtgatttgcatcgtgtacgcggtgaacaataaacattctatcgataaggtcacatcgcgatggatacctctaattaacgagcggacagataaggactcacggctgcccctcatactagtgggtaataagtccgacctcgtagagtattctagcatggagacgattctgcccatcatgaatcagtacacggagatcgaaacatgtgtggaatgtagcgcaaagaacctaaagaatatctcagagcttttctattatgcccagaaggctgtcctgcacccaacaggtccgctgtactgccccgaggagaaagaaatgaagccggcctgcattaaggctcttacccgcattttcaaaatttcagaccaagataatgacggtaccctcaatgatgcagagctcaacttcttccaacggatttgtttcaacacgcctttggccccacgcttcggttttgagcaggttctggtgctgctgttcctccagttctgggcccttttatgcacgaaacattactag

SEQ ID NO: 131818 - DNA, 1857 bp, synthetic construct
  misc_feature 1..1857: note = Description of Artificial Sequence: Synthetic coding sequence
  source 1..1857: mol_type = other DNA
atgcgccgggatgtacggattctgctcctcggtgaagcacaagtcgggaagacctctcttattctcagcttagtcggcgaagagtttcccgaagaggtgcccccgcgcgcggaagaaattaccatccctgcagatgtaactcctgagaaggtaccaacgcacatcgtcgactattcagaagcagaacagacagacgaagaactccgtgaggagatccataaggccaacgtcgtctgcgtcgtttatgacgtgtccgaggaggctaccatcgagaagattcgcactaagtggattcccctggtcaatggcggaaccactcagggcccgagggtgccgatcatcctagtaggaaacaagagcgacctgcgctccgggtctagcatggaagctgtcttgcctattatgagtcagtttcccgagattgaaacttgcgtggaatgctctgccaagaacctgcggaacatctcggaactcttctattacgcacaaaaggccgtgcttcaccccacggctcctctgtatgatcccgaagcgaaacagctcagacccgcctgcgcgcaggccttaacccggatcttccgactctctgaccaagacctggatcaggctttgtccgatgaggaactcaacgccttccagaaatcctgctttggccacccactggccccacaggcattggaggatgtgaagaccgtggtgtgccggaatgtggcaggcggcgtgcgtgaagatcgcctgacactcgacggattcctgttcctaaataccttattcattcagcgcggtcgccatgagactacctggactattctgcgcagattcggttactcagatgcactggaactgactgccgattaccttagccccttaattcatgtcccaccaggttgctctaccgaactgaaccacctgggttaccaatttgtgcaacgcgtgttcgagaagcacgatcaggaccgggatggagccctttctcccgtggagttgcagagcctctttagtgttttcccagccgccccttggggccccgagctcccaaggactgtccgcacagaagccggtcggctgcccctacacgggtacctctgtcaatggacactggtgacatacctggacgtacgctcttgtctagggcacctcggatatttgggatacccaaccctgtgcgaacaggaccaggcccatgcaatcaccgtgactagggagaagagactggaccaggagaaagggcaaactcagcgaagcgtgctgctgtgtaaagttgtaggagcccggggcgtggggaagtccgcttttctccaagcatttctgggaagagggctgggccatcaggatacgcgcgagcagccccctggttatgctatcgatacagtgcaggtgaatgggcaggaaaagtacctgatactgtgtgaagtcggtaccgacggcttattagcgaccagtcttgatgccacttgtgacgtggcgtgcctgatgttcgatggcagcgacccaaaatctttcgcacactgcgcgtccgtttacaagcatcattatatggacggtcagacaccctgtctgtttgtgtcaagcaaggcagatctaccagaaggtgtggctgtctctggcccatccccagccgaattctgtaggaaacatcgattgcctgcgcctgtgcccttctcctgcgccggccctgctgaaccttccaccaccatctttacgcagttagccaccatggccgcttttccccacctggtacacgccgaactccatccctctagtttttggttgcgcggactgcttggtgttgtgggagccgccgtggccgcagttttatccttttccttgtaccgagtgcttgtaaaatctcaatag

SEQ ID NO: 131819 - DNA, 777 bp, synthetic construct
  misc_feature 1..777: note = Description of Artificial Sequence: Synthetic coding sequence
  source 1..777: mol_type = other DNA
atgcctccacagcagggcgacccggcttttcccgacaggtgtgaggctccaccggtcccaccccgtcgtgagaggggcgggcgagggggcagaggtcctggagagcccggtggcagaggaagagcaggaggggccgagggaaggggtgtgaagtgcgttttagttggcgacggcgctgtcggaaagacatctctggttgtgtcgtatacaacgaatggctatcccaccgagtacattcccactgcctttgacaatttctctgccgtggtttccgtcgatggaaggcccgtgcgtctccagctgtgtgacacagcagggcaggatgagttcgacaaactgcggccgctctgttacaccaatactgacattttcttgctgtgtttctccgtggtcagccctagcagcttccagaacgtttccgagaagtgggtacccgagattaggtgtcactgtccaaaggctccaattatcctcgttggaactcaaagcgatttgcgcgaagatgtgaaggtgttgattgaactggacaagtgcaaggaaaaacccgtgcctgaggaagccgcgaagctgtgcgctgaggaaataaaggccgcttcctatatcgaatgtagcgcacttacccagaaaaacttgaaagaagtttttgacgccgccatcgtcgctgggattcagtattcggacacacagcaacagcctaagaaaagcaaatctaggacgcctgacaagatgaaaaacctctccaagagctggtggaagaagtactgttgtttcgtttag

SEQ ID NO: 131820 - DNA, 1527 bp, synthetic construct
  misc_feature 1..1527: note = Description of Artificial Sequence: Synthetic coding sequence
  source 1..1527: mol_type = other DNA
atggatcacttaggagcctcgctttggccccaggtcggctccctgtgccttttacttgctggggccgcatgggcaccccctccgaatctacctgaccccaaattcgagtccaaagccgcgctgctggcagcccgaggccctgaggagcttctgtgcttcaccgagagattagaggatctcgtgtgtttttgggaagaagccgcaagtgccggggtgggtccgggtaattatagtttttcctatcagttggaggacgaaccctggaagctgtgcaggctgcatcaggcccccacggcgcgaggcgctgtgcggttttggtgcagcctgcctacagctgacacctcgagcttcgtccccctcgagctccgtgtaacggctgcctccggggcaccccgttatcatcgtgtcatacacatcaacgaagtggtattgctcgacgcacccgttgggctagtagctaggcttgccgatgaatctggacatgttgtactcaggtggctgcctccaccagaaaccccaatgacgtcccacattagatacgaagtggacgtcagcgcagggaacggcgcgggttccgtgcagcgcgtggaaatactagagggaagaacagagtgtgtcctttctaatctgagaggacggacccggtacacttttgccgtgcgcgcgagaatggctgagccctcatttggaggattctggtccgcctggtccgagccagtttcactgctgactccaagtgacctggatccattgatcctcaccctcagcctgattttagtcgtaatactggtgttgctcaccgtgttggctctgctgtcacaccggagggcattgaaacagaagatctggccgggcatccccagcccggaaagtgaattcgaggggctctttaccacccacaaaggaaactttcagctgtggttgtaccaaaacgatggatgcttgtggtggtcaccatgtaccccattcactgaagaccctcctgcctcgctcgaggtcttatccgagcgctgctgggggactatgcaggcggtggagccaggaactgacgatgaaggccctctgctcgaaccagtgggaagtgaacacgcccaagacacttaccttgtgttggacaagtggctactccccaggaatccgccgagcgaagaccttcctggaccaggcggcagcgtagatattgtggccatggatgaaggttctgaagcatcgagttgctcaagcgccctggcctcaaaaccatccccagaaggcgcctcagcagcctctttcgaatacactatcctggatccctctagccagctgcttcggccctggaccctgtgtccagagctgccacccacgcccccgcatctgaaatatctgtatctcgtagtaagtgacagcgggatctctactgactacagcagcggcgattctcaaggcgcgcagggcgggcttagtgatggaccctattccaatccttacgaaaatagcctgatcccagcggccgagccgcttccaccttcctatgtagcttgcagctag

SEQ ID NO: 131821 - DNA, 2550 bp, synthetic construct
  misc_feature 1..2550: note = Description of Artificial Sequence: Synthetic coding sequence
  source 1..2550: mol_type = other DNA
atggcagctgcggcccccgctgccgctgctgcctcttcagaagcgccggccgctagtgctactgcggaacccgaggccggggaccaggactccagagaggttcgcgttctgcaatccctgagaggaaagatctgtgaggccaaaaatctcctgccttacctgggccctcataagatgcgcgattgtttctgcacgattaacttagatcaggaggaggtctatagaacacaggtcgtggaaaaatcactgagcccttttttctccgaagagttttacttcgaaataccacgtacctttcagtacctctctttttacgtgtatgacaaaaatgttctccagagggatttaagaattggaaaagtggccatcaagaaggaagacctgtgtaaccactctggcaaagagacctggttctcattgcaacccgtggattccaattccgaagtccagggtaaggtgcatcttgaattaaagctgaacgagctgatcactgaaaatggcaccgtgtgtcagcagctcgtggtgcatatcaaagcatgccacggcctccccctcataaatggccagtcctgtgacccctacgctacagtgtccctcgtaggcccatcacgtaatgatcaaaaaaagacaaaggtcaagaaaaaaacttctaacccacagtttaacgagattttttactttgaggtcactcgcagctcttcctacacccggaagtcacaatttcaggtggaggaagaagatatagagaagttggaaatccgcatcgatttgtggaataacggaaacttggtgcaggatgtgttcctgggtgagataaaggtccccgtcaatgtgttgaggacggatagtagccaccaggcctggtaccttctgcagccccgtgataatggaaataaaagcagcaaaacggatgacctgggcagcctgcgcctcaatatctgctatactgaggactacgttctcccttccgagtactacgggccgctgaaaaccttactgctgaagtcgccggacgtgcagcccatttctgcatccgcggcctatatcttaagcgaaatttgccgcgataaaaacgatgcagtgctgcccctggtccggctgctgctccatcacgacaaactcgtcccattcgcgacggctgtggctgagttggacctgaaggacacccaggatgccaacacaattttccggggcaacagcttagcgacaagatgcctcgatgagatgatgaagattgtgggtggacattatctcaaggtgacccttaaacccatcctcgacgagatttgcgattcatccaagagctgtgaaatcgatccgattaaactgaaagagggggataatgttgaaaataacaaggaaaatctgcgttactatgtagacaaactctttaacaccatcgtgaaatccagcatgagctgcccaaccgtaatgtgcgatatattctacagcctgcggcaaatggccacccagcgattcccgaatgacccacacgtccagtactcagcggtcagtagcttcgtcttcctgagattctttgcagtcgctgttgttagccctcatacttttcatttgcggccgcaccatcccgatgctcagacaatccgaaccctgactctgatcagtaagacaatccagactctgggttcctggggctcattgtctaagtccaagagctccttcaaagaaaccttcatgtgtgagttcttcaaaatgttccaggaagaagggtacatcatcgctgtgaaaaagttcttggacgagatttcttccacagagaccaaagagtcatccggtacatccgagcctgtgcatcttaaggagggcgaaatgtacaagcgggcccagggccgtacacgaattgggaaaaagaactttaaaaagcgatggttctgcttgaccagcagagaattaacataccataaacagcctggcaaggacgcgatttacacaattcctgtcaaaaatatcctggcggtggaaaaactggaggaatcaagcttcaataagaaaaacatgttccaggtgattcataccgaaaagccactgtatgtgcaggcgaacaactgtgttgaggctaatgaatggatcgacgtcctttgtagagtcagtaggtgtaatcagaataggctctctttttaccatccctccgtatacttgaatggaaactggctctgttgtcaggagacgggtgagaatactcttggatgcaagccttgtaccgccggcgtacccgccgacatacaaatcgacatcgatgaggaccgagaaactgagaggatctactccttgtttaccctgagcctgctaaagctccagaaaatggaggaagcatgtggcacgatcgcagtctatcaaggaccccaaaaggagcctgacgactattctaactttgtgatagaagactctgtaaccacattcaaaacaatccagcagattaaatcgatcatcgagaagttggatgagccccatgagaaatacaggaaaaaaaggtcttcaagtgcgaaatatggatccaaggaaaacccgatcgttgggaaggcttcctag

SEQ ID NO: 131822 - DNA, 834 bp, synthetic construct
  misc_feature 1..834: note = Description of Artificial Sequence: Synthetic coding sequence
  source 1..834: mol_type = other DNA
atgatgaaaattgttggaggccactatttgaaggtgactctgaagcccattctggacgagatctgtgactcctctaagtcctgcgaaatcgatccaataaagttgaaggagggcgacaacgttgaaaacaataaggagaacctcaggtactacgtagataagctgttcaacaccattgtgaaatcgagcatgtcttgccccacggttatgtgtgatatcttctattcgcttcgccagatggctactcagaggtttcccaatgatccgcacgtccaatacagcgctgttagtagttttgtgtttctccgctttttcgcagtcgccgtcgtgtcacctcacaccttccaccttaggcctcaccacccggatgctcagactattcgcacactcactttgatctccaaaacgatacaaacactagggtcttgggggtctttgtcaaagagcaagtccagcttcaaggagactttcatgtgcgaattcttcaagatgttccaggaggaaggctacataatcgcggtgaagaaattcctggatgagatttcgagcactgaaacgaaggaaagtagtgggactagtgagccggtgcacctcaaggaaggcgagatgtataagcgagcacaaggaagaaccaggatcggaaagaagaatttcaagaagaggtggttctgtctgacctcccgtgaactgacgtatcacaagcagccaggcagctgcgtgtatgccctgctgtggggtttcagctggttctcagtgaaagtgtcgttgcccctcatcgtgacactggtcaatccctttagcaacataaccgtggtttacggcttttcgcactag

SEQ ID NO: 131823 - DNA, 2553 bp, synthetic construct
  misc_feature 1..2553: note = Description of Artificial Sequence: Synthetic coding sequence
  source 1..2553: mol_type = other DNA
atggccgcagcggcccctgccgcagcagctgctagcagtgaggcacccgctgccagtgctactgctgaacctgaagccggtgaccaggacagtcgggaggtccgagtgctgcagagtctgcggggaaaaatctgcgaggcaaagaatctgcttccttatctcgggccgcataagatgagagattgtttctgtaccatcaatctggaccaggaggaagtgtacaggacacaggttgtcgagaagagcctgtcccccttcttctcagaggaattctacttcgaaatcccgcgcacatttcagtacctgagcttttacgtctatgataagaatgtgcttcagcgtgatctgcgcataggaaaggtggccatcaaaaaagaggatctctgtaaccactctggtaaagaaacctggttttctctccagcctgttgacagtaatagtgaggttcagggaaaagtgcacctggaactgaagctcaacgagctcatcacagagaacggtacggtttgccaacaactcgtggtccacattaaggcatgtcacggattacccttgattaatggccagtcttgtgacccctacgctactgtttcactggtgggcccttcccggaacgaccaaaaaaagactaaagttaagaagaagacctccaacccgcagtttaatgagattttttatttcgaagtcactcgatcatccagctacaccaggaagtcccaatttcaggtggaagaagaagatattgaaaagctggaaattaggattgatctttggaacaacggcaatttggtgcaggatgtctttcttggagaaattaaggtccccgtcaatgttctccgcacggactctagtcaccaggcctggtacttgctgcaacctagggacaatggaaataaatcatctaagacagatgaccttgggtccttgagattaaatatttgttatacagaagactacgtgttgccttcagagtactatggcccattgaagacccttctgctcaagagccccgacgttcaaccgatctctgccagcgccgcttacattctgagcgagatttgcagagacaagaacgacgctgtccttcccctggtgcgactgctgctgcaccacgacaaattggtcccttttgccactgctgtagcagaactggacttgaaggacacccaggacgcaaacaccatttttagggggaactccctcgccacccggtgcttagacgagatgatgaagatcgtggggggccactacttaaaggtaactctaaaacccatcttggacgagatatgcgactcttctaagtcatgcgaaattgaccccatcaaactgaaggagggggataatgttgagaataacaaggagaacctccgatactatgtagacaagctcttcaacactatagttaagagcagtatgagttgccctaccgttatgtgcgacattttctacagcttgcgccagatggccacgcaaaggtttcccaatgacccccacgtgcagtacagcgccgtgtcctcgttcgtctttttgcggtttttcgcagtcgcagtggtgtcccctcatacttttcatctcaggccccatcatccagacgcacagaccatccgaacattaaccctgatctccaaaaccatccaaacactaggttcttggggaagccttagtaaatccaagtccagtttcaaggaaacatttatgtgcgaattctttaagatgtttcaggaagagggctacatcatcgccgtgaaaaaattcctagacgaaatttcttcaaccgagaccaaagaaagtagtgggacctccgaacccgttcacctgaaagaaggggaaatgtacaaaagagcccaggggagaacaagaatcgggaaaaagaactttaagaagaggtggttttgtctgacctctagggaactaacctatcataaacagcccggatccaaggacgccatttacaccataccagtgaagaacattctggcggtcgagaagctggaggaaagtagcttcaataagaaaaatatgtttcaggtcatccacaccgaaaagcctctctatgtccaggctaacaattgtgtcgaggctaatgaatggatcgatgtactgtgcagggtgagccgatgtaaccagaatcgactcagtttctaccacccatccgtttatctgaatggcaactggctgtgctgccaggagacaggagagaacactctggggtgtaaaccctgtaccgcgggcgtacccgctgacatccagatcgacattgatgaggaccgggagacagaaaggatctatagcttgtttacgctttccctgttgaagctccagaagatggaagaggcgtgcggtacgatcgccgtctatcagggaccgcagaaagaacccgacgactatagcaacttcgtcattgaagactctgttacgacgtttaagaccatacagcaaataaagtcaattatcgagaagctggacgaaccccatgaaaagtacagaaaaaagaggagttccagtgccaaatacgggtctaaagagaatccaattgttggcaaggcttcttag

SEQ ID NO: 131824 - DNA, 2505 bp, synthetic construct
  misc_feature 1..2505: note = Description of Artificial Sequence: Synthetic coding sequence
  source 1..2505: mol_type = other DNA
atggctgtcgaggatgagggcttgagagtgtttcagtcggttaagattaagattggtgaagccaagaacctgccatcgtatccaggacccagcaagatgcgagactgttactgtacagtcaaccttgaccaagaggaggtgttcaggactaagatcgtggagaagagtctgtgcccgttttacggcgaggacttttactgcgaaatcccacgatcattccgccacctgtctttctacattttcgatcgtgatgtctttcgccgcgactctattattggcaaggtcgccattcagaaggaagatttgcagaagtaccacaatagggacacgtggtttcagctgcagcacgtcgacgcagactcagaggtccaggggaaggtccacctggaactgaggctgagcgaggtaatcaccgataccggggtcgtgtgccataagttagcaacgcgcattgtcgaatgccagggacttcccatcgtcaacggacaatgtgatccttacgccactgtcactctggccggaccctttcgcagtgaagccaaaaaaaccaaggtcaagcggaaaaccaataatccacagtttgatgaagtcttctactttgaggtaacacggccatgctcctacagcaagaaaagccactttgatttcgaggaggaggacgtggataaactagaaatcagggtagacctctggaacgcctccaatctgaagtttggagatgaattcctgggcgagttacgcatcccactaaaggtgctccggcagtcctcatcctacgaggcctggtattttcttcagccacgcgataatggaagtaagtcccttaaacccgatgacttggggtctctgagactgaatgtggtgtacaccgaagatcacgtgtttagctccgattattatagccctctgagagatttactgttaaaatctgccgacgttgagccagtcagcgctagcgcggcacatatcctcggtgaggtctgccgagagaaacaagaggcagctgtaccactggtacgcctctttctgcactatggcagagtggtgccttttatcagtgcgatcgcctccgcagaggtgaagaggacgcaggatcccaacaccatcttccgtggcaacagcttagcttccaaatgcattgacgagactatgaaactggctggcatgcactacctgcacgtaaccctcaaaccagccatcgaggagatctgtcagagccataaaccatgcgagatcgaccccgtgaagcttaaagatggggagaacctggaaaacaacatggaaaatctccggcagtacgtggatcgggtttttcacgcgatcaccgaaagcggagtttcttgcccaacagttatgtgcgatatttttttctctctgcgcgaggccgccgccaagcgatttcaggatgatccagacgtccggtacactgctgtgagcagcttcatctttttgcgctttttcgcgcccgcgattttgtcccccaatctgtttcaattgactccgcaccataccgacccccagacctccagaaccctgacgctaatcagtaagaccgtgcaaaccctaggtagcctatcgaaaagcaaatcagcctccttcaaggagtcttatatggctacattctacgagttttttaacgagcagaaatacgccgatgcagtgaagaatttcctggatttaatcagctcaagtgggagacgtgacccaaaatccgttgagcagccaattgtgctgaaggaggggttcatgattaagagagcgcagggcaggaagaggttcggtatgaaaaactttaagaagcgatggttccgtctgaccaatcacgaatttacttaccacaagtctaagggagatcaaccactgtactccatccctattgaaaatatcctggcagtggaaaaactcgaagaggagagctttaaaatgaaaaacatgttccaggttattcagccggaaagggctctgtatatacaagcgaacaactgtgtcgaagccaaagactggattgatattctgacaaaggtttcgcagtgcaatcaaaaacgcctcacagtgtatcatccttcggcatatctgtctggccactggctgtgctgcagggcaccttcggactccgccccagggtgctccccttgcacagggggactgcccgcaaacatccagttagatatcgatggcgaccgggagaccgagcgcatttattcactgttcaatctctacatgtccaaattggagaagatgcaggaggcctgcggctctaaatccgtgtacgacggcccggaacaggaggagtactcgacctttgtgattgatgatccccaggagacatacaaaaccctgaaacaggtcatagcaggtgttggcgcgcttgagcaggaacatgctcagtataagcgcgacaaattcaaaaagacaaagtacggctcccaagaacatcctatcggcgataagagcttccaaaattatattcgccagcagagtgagacatccacgcattcaatctag

SEQ ID NO: 131825 - DNA, 2409 bp, synthetic construct
  misc_feature 1..2409: note = Description of Artificial Sequence: Synthetic coding sequence
  source 1..2409: mol_type = other DNA
atgcgggactgctattgcacagttaatctggaccaggaggaggtgttccggacaaaaatagtggagaagagtttgtgccccttctatggcgaagacttttactgtgagatcccaaggtcattccgccacttgagcttttacatctttgatagggacgtcttccgccgcgacagcattattggcaaggtggcaatacagaaagaagacctccaaaaatatcataatcgggacacttggttccagctacaacacgttgacgcagacagcgaggtacaaggcaaagtccacctggagcttaggctatctgaagttatcactgacactggcgttgtgtgtcataagttagctacccgcatcgtggaatgtcaaggcctgcccattgtcaatggtcagtgcgatccttatgcgaccgtgacactggccggtccttttaggtcagaagccaaaaaaactaaagtgaagcgcaaaaccaacaacccccagttcgacgaagtgttctactttgaggtgactaggccttgttcgtattctaaaaagtcccattttgattttgaagaggaggatgttgacaaactggaaatcagggtggacttgtggaatgcaagcaaccttaaattcggggacgagtttctgggagagttaaggattccactcaaggtccttaggcagtcttcatcttatgaggcttggtacttcttgcagccgcgggataacgggtcaaagtctttgaaacctgatgacctgggctcactgaggctgaatgtcgtgtacacagaggaccacgtgttcagcagtgattattacagccccctccgggatctgcttctaaaaagtgccgatgtggaaccggtctccgctagtgcagcacacatattgggcgaggtctgtcgcgaaaagcaggaagccgccgtgccattggtcagactatttttgcactacggaagagtggtcccattcatctctgcaatcgctagtgccgaagtgaaacgcacgcaggaccccaacactatctttcgaggaaattccctggcttcaaagtgcatcgacgagactatgaagctggcgggaatgcactacttgcatgtaactctgaagcctgccatcgaagagatctgccagagccacaagccttgcgagattgatcctgtcaaactgaaggacggcgaaaatcttgagaataatatggagaacctgaggcagtacgtggacagggtatttcatgccatcactgagtcgggtgtcagctgccccactgtgatgtgtgacattttctttagtctccgagaagcggcagccaagcgattccaggatgaccccgacgtgcgatacactgccgtgtccagctttatttttcttaggttttttgccccagccattctctcacccaatcttttccagcttaccccccatcatacagacccccagacttccaggacactcacactcatctctaaaaccgtgcagactctgggctctttgtcaaagagtaaatcagcctcctttaaggaaagctacatggctaccttctacgagttcttcaatgaacagaaatacgccgacgcagtgaagaacttcctggacctgatcagttcttccggaaggcgggaccccaagtctgtcgaacaaccgatcgttctaaaagaggggttcatgattaagagggcacagggtagaaagcggtttggcatgaagaactttaaaaaacggtggtttcgcctgacgaaccacgagttcacctaccacaaaagtaaaggcgatcaacccctgtattccatccctattgagaacattctcgcggtcgagaagctcgaagaagaatcattcaagatgaagaacatgttccaggtaatccagcctgaaagggccctctatatccaggcaaacaattgcgttgaggcgaaagattggatcgacatacttacgaaggtttcccaatgtaaccaaaaacgactgactgtctatcacccttccgcatacctgagcgggcactggctatgttgcagggctccttccgacagtgcaccaggctgcagcccgtgtacaggcgggttgcctgctaacatccagctggatatcgatggggaccgcgaaactgagagaatatactcactgtttaatctctacatgtcgaagcttgaaaagatgcaggaggcttgcggcagcaagagtgtgtatgacggacccgagcaggaggaatattccacgttcgtgattgacgatccacaagagacgtacaaaactctgaaacaggtgattgcaggggtgggggcactcgagcaagagcatgcacagtacaaacgcgacaaattcaaaaaaactaagtacggttcccaggagcaccctatcggcgataagagcttccagaactatattaggcagcagtcagagacctcgactcatagcatatag

SEQ ID NO: 131826 - DNA, 399 bp, synthetic construct
  misc_feature 1..399: note = Description of Artificial Sequence: Synthetic coding sequence
  source 1..399: mol_type = other DNA
atggctgtcgaggacgagggactgagagtgttccagtctgtgaagatcaagatcggagaggcaaagaatttgccctcataccccgggccctcaaaaatgcgcgactgctattgtacagtaaatctggatcaagaggaagtgttccgcacaaagatcgttgaaaagtcgctgtgcccattttacggggaggatttctactgcgagataccgaggtcatttcgccatctgagcttctacatctttgatagggatgtgttcagaagagactcgattattgggcagtcagccccaggcgcagcagcagagagagggcaccaccggcactggggcagacttccgcaggcccggcatacgcaccgacgggtcccagggcccccgcacagggagtgggcgatgtag

SEQ ID NO: 131827 - DNA, 2412 bp, synthetic construct
  misc_feature 1..2412: note = Description of Artificial Sequence: Synthetic coding sequence
  source 1..2412: mol_type = other DNA
atggccaagcggagtagtctctatataagaatcgtcgaaggaaaaaatctgcccgctaaggacatcactgggagctccgacccttattgcatcgttaaggtggataacgaacccattatcaggacagccactgtgtggaaaacattatgcccattttggggcgaggagtaccaggttcacttgccccctaccttccacgctgtagctttctacgttatggacgaggacgccctgtcgcgcgacgacgtgatcggaaaggtgtgcttgacgcgggacacgatcgcctcccatcccaagggcttctcggggtgggcacatctgacagaggtagaccccgacgaggaggtacagggtgaaatacacttgcgtctggaagtgtggccgggagctcgtgcatgtcggctcagatgctctgttctggaagcaagagaccttgcaccaaaggatcgcaacggaacctctgacccctttgtgcgggtgaggtataaaggccggactcgggaaacgtcaattgtcaagaaatcatgctacccgcgctggaatgagacctttgagtttgaacttcaggagggtgcgatggaggctctgtgcgtcgaagcatgggattgggacctggtgtctcgcaacgatttccttggaaaagtggtgattgacgtccaacggctccgggtggttcagcaggaggaaggctggtttaggctgcagccagaccagtctaaatctagacgccatgatgaaggcaatttaggctccttgcagctggaggtgagactgcgtgatgagacagtgctccccagctcttactatcagcccttagtccatctgctgtgtcacgaggtgaaattggggatgcaaggacctgggcagctgatcccattaattgaggaaacaaccagcacagagtgcaggcaagacgtggctaccaacctactcaaactcttcttggggcagggcctggccaaggatttccttgatttgttattccagcttgagctgtctaggactagtgaaactaatactcttttcaggtccaattctctggcttcaaagtccatggagtcatttctgaaggtggctgggatgcagtatctgcatggcgtccttggccctatcattaataaggtgttcgaggagaagaagtatgtggaactcgatccctcaaaagtggaggtgaaagacgtgggctgctcaggactgcacaggccccagaccgaggcggaggttttagagcagtccgcccagaccctgagagcacatctcggggcactgctctccgccctgtctaggagcgtcagagcatgtcccgccgttgtacgggccacgttcagacagctcttccgtcgcgtcagggaacgtttccccggtgctcagcacgagaatgtgccatttatcgcggtcacttccttcctctgtttacgttttttttctccggcaatcatgtcgccaaaactgttccacttacgtgagcgccacgcagatgccagaacctcacggacactgctgcttctggcgaaggctgtgcagaacgtgggcaacatggatactccagcctcccgtgcaaaagaagcttggatggaaccactgcagcccaccgtcagacagggtgtggcccagctaaaggacttcatcactaaactggtggatatcgaagaaaaagatgaactcgacctgcagagaaccctcagtctccaagcccctccagtcaaggaagggcccctgttcatacatcggactaaggggaaggggccacttatgagctcttcatttaagaaactgtacttttccttgaccactgaggcactcagctttgcgaaaacaccctctagtaagaaatccgctctgatcaagttggcaaacattagggcggctgaaaaggtggaggaaaagagcttcgggggatctcacgtgatgcaggtcatttacacagacgacgccgggcgtccacaaactgcctacctccagtgtaagtgtgtcaacgagttgaaccagtggctgtctgctctgaggaaagtatccataaataataccgggctgttaggatcctaccatcccggtgtctttcgtggagacaagtggtcttgctgccatcaaaaagagaaaactgggcagggctgtgacaaaaccagatcccgggtaaccctgcaggagtggaacgaccctttagatcacgacctggaggcccagcttatctacagacacttacttggcgtggaagccatgctgtgggaaagacacagggaactatccggaggcgctgaagcaggcaccgtgcctacaagcccaggcaaggtgccagaggattcactggctcgcttgctgagggtcttgcaggatttgagagaagcgcactcatctagcccagctgggtcaccccccagcgaaccgaactgcttgctggaactgcaaacttag

SEQ ID NO: 131828 - DNA, 2274 bp, synthetic construct
  misc_feature 1..2274: note = Description of Artificial Sequence: Synthetic coding sequence
  source 1..2274: mol_type = other DNA
atggccaaaaggtcctccctgtatatacggatcgtggaagggaagaacttacccgctaaggatattacgggcagctccgacccctattgcatcgtcaaggtagacaatgagcctatcattagaacggcaacggtgtggaagactctatgcccgttctggggagaggagtaccaggtacacctgcctccgaccttccacgctgtggctttttatgtgatggatgaagacgcactgagccgagatgatgtcattgggaaggtgtgcttgacaagagataccatcgctagccacccgaaaggcttcagcggatgggctcaccttacagaggtcgatcccgacgaagaagtgcagggggagattcacttgcgactagaggtctggcctggagcaagagcttgcaggttgcgttgctctgtgcttgaggctcgcgaccttgcacccaaggacaggaatgggacctccgacccattcgttcgcgtgagatacaagggcaggacccgggaaacgtctattgtcaaaaagtcctgttaccctaggtggaacgaaacgtttgagttcgaactgcaagagggtgcaatggaagcgctatgcgtggaggcctgggactgggatctggtcagccggaatgatttcctgggcaaagtggtcatcgacgtccagcgacttcgagttgtgcagcaggaggaaggctggttccggctgcagccagaccaaagcaagagccgcaggcacgacgagggaaacctggggagcttgcagctcgaggtcaggctacgagatgaaacagtgttgccatccagctactaccaacccttggtccaccttctctgtcacgaagtgaaacttgggatgcaagggcccggccagttaatcccattgatagaagagacgacatccaccgagtgtagacaggacgtggctactaatttactcaagctctttctgggacagggactggcaaaggattttctggacctgctgttccagctggagctctcccgaaccagcgagaccaatactctatttcggtcaaactcacttgcctccaagagtatggaatcctttctaaaggtggccgggatgcagtatctccatggggttctcggacccatcataaacaaagtgtttgaagaaaaaaagtatgtcgagttggacccctctaaggtggaggttaaggatgttgggtgctcaggcttgcatagaccccagactgaagctgaagtgttggaacaatcagctcaaaccctccgcgctcacctcggggcgctgttaagcgctctgtcaagaagcgtgagagcctgtccggccgtcgtgcgtgcaactttccgacagctgttccgcagagtgagagagcgctttccaggcgcacagcacgaaaatgtgccttttatcgctgtgacttcttttctgtgccttcgtttcttttccccagctattatgtccccaaaattgtttcacttgcgggagcgccacgctgacgctcgaacaagccgtactctgctcctcctggctaaggccgttcagaacgtgggcaacatggacactcctgcaagtcgcgctaaagaggcttggatggaacccctgcagcccaccgttcggcagggcgtggcccaattaaaggacttcataactaagctcgtagatattgaggaaaaggacgagctcgacctccagcgaaccttatcgctgcaggctcccccagttaaagaaggccctctgttcatccacaggactaagggaaagggacccctcatgagcagctctttcaaaaagctctatttcagtctgacaaccgaggccctttcattcgcaaaaactccatccagcaaatgcgtgaatgaactaaaccagtggctgtccgccctccggaaggtgagcattaacaacaccgggcttctaggaagctatcacccaggagtattccggggcgacaaatggagttgttgccaccaaaaggagaagactgggcagggttgcgataagactcgatcgcgcgtgactctgcaggagtggaacgatcccctggatcatgacttggaagctcaactcatctatcgtcaccttctgggagtcgaggctatgctgtgggagcggcatcgggaactctctggcggagctgaggcagggacagtacctacgagtccgggcaaagtaccagaagatagcttagctcgcttacttcgggtccttcaggatctgcgagaagctcacagcagtagccccgccggaagcccaccttcagaaccaaactgcttgctagagctgcagacctag

SEQ ID NO: 131829 - DNA, 2196 bp, synthetic construct
  misc_feature 1..2196: note = Description of Artificial Sequence: Synthetic coding sequence
  source 1..2196: mol_type = other DNA
atggacgaggatgccctttcgcgcgatgatgtaatcggcaaagtctgtctgactcgcgataccattgcctcccaccccaagggcttcagcggctgggcacatctcacagaagttgaccctgatgaggaagtgcagggagagatccatctccgattagaagtgtggccaggagctcgggcctgcaggctaagatgctctgttctggaggcccgagacctcgccccaaaggaccggaacggtaccagtgacccattcgtcagggtacgttacaagggacgaacgcgcgagacctctattgttaagaagtcctgttacccacgctggaatgagacattcgagtttgaactgcaggagggtgccatggaggcgctctgcgtggaagcctgggactgggaccttgtatcccgcaatgacttcttaggcaaggtggtaattgacgtacagcgcctcagggtagtccagcaggaggaaggttggttcagactccagccagatcagtctaagtcacgcagacacgatgaaggtaacctaggctctttacagctggaggtccggctgcgcgatgaaaccgtgctcccctcctcttactatcagccattggtgcatctgctctgtcatgaggtgaagttaggcatgcaaggtccgggccagctaatcccattgattgaggagacgacttctaccgaatgtaggcaggacgtggcgaccaacctactcaaactttttttaggtcagggtctcgcaaaagacttcctggatctcctcttccagctcgaactgtcacggactagtgagactaacaccttgttccggagcaactctctggcctctaaaagcatggagtccttcctgaaagttgctggaatgcagtatctgcatggtgtgcttggccccattatcaataaggttttcgaagaaaagaaatatgttgagttagacccatcaaaggtggaggtgaaagacgtcggctgctctgggctgcaccgccctcaaacagaagcggaagtgctagaacagagtgcccagaccctgcgcgcccacctcggagccttactatctgctctgagccgcagcgtgagggcctgtcccgcagttgtgcgagccactttccggcagctgtttcggagagtgcgtgagagattccctggagcacagcatgaaaatgtgcctttcatcgcggtcacttccttcctttgcctgcgctttttcagccccgccatcatgtccccgaagctgttccatctgcgggaacgtcacgccgatgctcggacgtcacggacactgttattgctggctaaagctgtgcagaacgttggcaatatggatacgcctgcctctcgagcgaaggaggcctggatggagccgttacagcccactgtgagacagggagtggctcaactcaaggacttcattactaagctggtagatatcgaagagaaggacgaactggatctgcaaagaactttgagcctccaggcaccgccagtcaaggagggtcctttgttcattcaccgaactaaaggcaaggggcccttaatgtcttcatctttcaaaaagctgtacttttcccttactacagaagccctcagcttcgctaaaacaccatccagcaagaagagcgccttgattaaactggctaacatacgcgctgcagagaaggtggaagagaagtctttcggcggtagccacgttatgcaggtcatatacacggatgacgccggtagacctcagaccgcctacttacagtgtaagtgtgtcaatgaactgaaccagtggctttccgcattgcgcaaggtgtcgatcaataataccggactcctgggcagttatcacccaggcgtgttccgcggcgacaaatggagttgttgtcatcagaaggagaagactgggcaaggttgtgacaaaacacgcagtcgtgtgaccctgcaggagtggaatgacccccttgatcacgacctggaagcccaacttatttacagacacttgctgggcgttgaagccatgttatgggaaagacatagggaactaagtggcggcgcggaagcgggcactgtacctaccagccccgggaaggtgcctgaggactctctggcccgactgctacgagttctacaagatttaagagaggcgcatagtagcagtcccgccggaagcccacccagtgagcccaattgtttgctggagctccagacttag

SEQ ID NO: 131830 - DNA, 2415 bp, synthetic construct
  misc_feature 1..2415: note = Description of Artificial Sequence: Synthetic coding sequence
  source 1..2415: mol_type = other DNA
atggccaagagctcatctcttaatgtgagagtcgtggagggaagagcactccccgctaaagatgtgtctgggagcagtgatccatactgcttggtaaaagtcgatgatgaagtggtggctcggaccgcaaccgtatggcggtcccttggacccttttggggtgaagagtatacagtacacttgcccctggatttccatcagttagccttctatgtcctagacgaagatacagtcgggcacgatgatattatcggaaaaatcagtctcagcagggaggcaatcaccgcggacccacggggtatcgattcttggatcaacctatccagggtagaccccgatgccgaagtccagggcgagatatgcctgtccgtgcagatgctcgaggatggccaaggtcggtgcttaaggtgtcatgtacttcaggcccgggatcttgctccacgcgacattagtgggacttcagacccatttgcaagagttttctggggatcccagtcgctggagacttctaccatcaagaaaactcggttcccccattgggatgaggtgctcgagcttcgtgaaatgcccggggcacccagtcccctgcgggttgagctgtgggattgggatatggtgggaaagaacgatttcctgggaatggtcgaattcagccctaagaccttgcagcaaaaaccaccaaaaggctggtttcgcttgttgcccttccctcgggccgaagaggactccggcgggaacctgggagccctgagggtgaaggttaggctgattgaggatcgagtgctaccatcacaatgttaccaacccttaatggagcttctgatggaaagcgtgcaagggcctgccgaggaggataccgccagtcctctggctttgcttgaggagttaactctaggcgactgtcggcaggacctggcaactaagctcgtgaagctgttcctcgggcgcgggctggccggtcggtttcttgactacctcaccagacgcgaagtggccagaacaatggacccaaacaccctgttcaggtctaactccttagcaagcaagagcatggaacaatttatgaaactcgttggtatgccgtacctgcacgaggttctaaagcctgtgatttctagggtctttgaggagaagaagtacatggaactggacccctgtaaaatggacttaggccggacacgccgaatttccttcaaaggagccttatccgaagaacagatgcgcgaaacttccctgggcctcctcacggggtaccttggccccattgtagacgctatagtaggttcagtaggaaggtgtccccccgctatgaggctggcctttaagcaattgcacaggcgcgtggaggagcgctttccacaagcggaacatcaggatgtgaaatatttggcgatatctggttttctgttcttgaggttcttcgccccagcgatcttgacccccaagctttttgacctacgcgatcagcacgccgaccctcaaaccagtcgatcacttctgctcctcgcaaaagctgtgcagagcattggcaatctggggcagcaactcggccaggggaaagagctctggatggccccactccaccctttcctgctccagtgcgtgtctagggtgagagacttcctcgataggctagtggatgttgatggggacgaggccggtgtgcctgccagagccttgttcccaccctccgccattgtccgagagggatatcttctcaagcgcaaagaagagccagcaggtctggccactcggtttgcctttaagaagaggtacgtgtggctgtcaggagagaccttaagcttcagtaagagtcccgagtggcagatgtgccactctatcccggtgtctcatatccgggcagtggaacgggtggacgaaggagcctttcagctgccgcacgttatgcaggttgtcacacaggatggcacaggtgctctacacacaacctatcttcagtgtaaaaatgtaaacgagctgaaccagtggttgagcgctctgagaaaggccagtgctccaaacccaaacaaactcgcagcctgtcaccccggtgcttttcggagcgcacgctggacttgttgcctccaggcagaacggtctgctgccggttgttctaggacacatagtgcagtcacactgggagactggagtgatcccctggaccctgacgcggaagcccagacggtttaccgtcagctcctcctcggacgtgatcaactccgactcaagttgctggaagattctaatatggacactacgctcgaggccgatacaggtgcatgccccgaggtcctggcccggcaaagagccgcgaccgctcgcttgctggaagtcctcgccgacctggaccgcgctcacgaggagtttcagcagcaggagagaggtaaggcagccctgggaccactcggaccatag

SEQ ID NO: 131831 - DNA, 2331 bp, synthetic construct
  misc_feature 1..2331: note = Description of Artificial Sequence: Synthetic coding sequence
  source 1..2331: mol_type = other DNA
atggctaagagcagtagcctgaatgtgagagttgtggagggaagagcgcttcctgccaaggatgtcagtggatcttccgatccctactgtttagtcaaagtggatgatgaggtggtcgctaggaccgcaacagtctggcggtccctgggtcctttttggggggaggaatatacagtgcatctaccactggacttccatcaactcgccttttatgttctggacgaggatactgtggggcacgacgacattatcggcaagatttccctgagccgggaagccatcacggctgatccgagaggcatcgactcttggattaacctgagtagggtggatcctgatgctgaggtccaaggagaaatttgtctgagtgtgcagatgctagaggacgggcaagggaggtgtttgagatgccacgtcctgcaggctagggatctggctccaagagacatttcggggacaagtgacccctttgcaagggtattctggggctcccagtctttggagacttccacaattaaaaagacgaggttcccacactgggacgaggtcctcgaacttcgagagatgcccggggctcccagcccactcagagtggagttgtgggactgggatatggtcgggaagaatgacttcctgggcatggttgagttttcaccaaaaaccctacagcagaaaccccccaaagggtggttcagactcttaccatttcccagggccgaagaagatagtggcggcaacctgggagctttgcgggtgaaagtccgtctcattgaggatcgagtcctcccttcccagtgctaccagccactgatggaactcctgatggagtccgtacaaggacctgcagaggaggacaccgccagtcctctggcccttctggaggaactgaccctgggcgattgccgccaagatctggctactaagttggtcaagctgttcctcggccggggcctcgcagggcggttcctggattatctgaccaggcgggaagtcgctcgcactatggaccccaatacactcttccgctctaatagcctggcctctaaatccatggagcaattcatgaagttagtcggaatgccctaccttcatgaagtcctgaaaccagtgatcagcagagtgttcgaagagaagaaatacatggagcttgatccctgcaaaatggacctcggacgaacccgtcgcatttccttcaagggtgctctgagcgaagaacagatgagggagacttcacttggcctgctgacaggatatttggggcccatcgtggacgccatagtgggctctgtgggacggtgtccccccgccatgcgcctcgcttttaaacagctgcataggagagtcgaagaacggtttccacaggctgaacatcaggatgtgaaatatttggcaattagtggcttcttgttccttcggttttttgcccccgccatccttacccctaaacttttcgatttacgtgatcaacacgccgatcctcaaacaagcagatcactcctcctgctagcgaaagccgttcagagcatagggaacctgggccagcaactgggccaggggaaggagctgtggatggctcctctgcatcctttccttctgcaatgtgtcagccgagtgcgagatttcttggatcggctggtagacgtcgatggcgacgaggctggcgtcccagcgagagccttattcccaccttcggccatcgtcagagagggttacctgctcaagaggaaggaagagccagctggtctcgctacccgttttgcttttaagaagcgatacgtgtggctgtcgggcgaaacactgtcgttctccaaatcccccgagtggcaggtcgtgacccaggatggaactggcgcactacacactacttatctgcagtgtaagaatgtgaatgagttgaaccaatggctctccgccttacgtaaagccagtgccccaaaccctaacaagctggcagcttgtcatcctggggccttccgctcagcgagatggacttgttgcctgcaagctgagaggtccgctgccggctgttcgaggacccattccgctgtgacactgggcgattggtctgacccactcgatccggacgccgaagcccagacagtgtatcgtcagctgctcctgggaagggaccagttacgactgaagctgcttgaagacagcaacatggataccacactagaggccgatacaggggcatgccccgaggtcttagcgagacagagggccgctaccgcaaggttactcgaggtgctcgccgacctcgatcgagcacatgaagagttccaacagcaagaaaggggaaaagcagcccttggccccctaggcccatag

SEQ ID NO: 131832 - DNA, 2421 bp, synthetic construct
  misc_feature 1..2421: note = Description of Artificial Sequence: Synthetic coding sequence
  source 1..2421: mol_type = other DNA
atggccaaatcatctagcctgaacgtgcgggtcgtcgagggccgagcactgcctgcaaaagacgtgtctggctcttcagatccttactgcctggtgaaggtcgatgatgaggtggtggcaaggaccgccactgtgtggcggagcctcggcccattctggggtgaggagtacactgtgcacctccctctggactttcatcaactagccttctacgtactggacgaggacactgtcggccatgatgacataattggaaagatcagtttatcacgggaggctattaccgccgacccccggggaatcgacagttggatcaacctgagtagagtggaccccgacgccgaggtccagggcgaaatctgtctatctgttcagatgttagaggacggacaggggcgttgcctgcgatgtcacgtactgcaggcgagagaccttgcgccccgggacatctctggcacctccgatccctttgctagggttttttgggggagccagagcctggaaacatctacaatcaagaagacaagattcccgcactgggatgaagtcctggaattacgcgagatgccaggcgcccctagcccccttcgcgtggaattgtgggattgggatatggttggtaaaaacgactttctgggcatggtggaattttcccctaagactctccagcagaagccccccaaagggtggttccggctccttccattcccaagggccgaggaagatagcggagggaacctgggggccctccgggtcaaggtgaggctgatcgaagacagagtcctgccaagtcagtgttatcaacccttaatggagttgcttatggagagcgtccagggacccgccgaagaggacaccgcatctcccctggctctcttggaggaattgacactgggcgattgtaggcaagacctcgctacgaagctcgtgaaactctttcttggtcgtggactagctggaagattcctcgactacttaactaggagggaggtagctagaacaatggatccaaatacactctttcgttctaactctttggcgtctaagtcaatggagcagttcatgaaactggttggcatgccatatctccacgaggtgttgaaaccagtgataagtcgtgtgttcgaagagaaaaaatacatggagttggacccctgtaaaatggacttgggccgaacacggaggataagcttcaagggagccttaagcgaggagcaaatgcgagagacgtcgctaggactcctgaccggatatctcggtccaatcgtggacgccatagtgggctccgttggacgttgtcctcctgcaatgcggctggcgttcaagcagcttcacaggagggtcgaggagcgctttccccaagctgaacatcagcaggatgtgaagtatttagcgattagcggattcttattcctgcgattttttgccccggccatcctgacgcctaaactgttcgatttgagagatcagcatgccgacccacagaccagtcgcagtcttttactactggccaaagctgtccagagcattggaaatctaggccaacagctgggtcagggcaaggagctatggatggcaccactacatccctttctcctccagtgtgtgagcagagtaagagactttctggataggctggttgacgtcgacggtgatgaggaagctggggtacccgctcgggctcttttccccccctcagccatagtgcgcgaaggatatctgcttaaacgcaaggaagaacccgcagggctggccacgaggtttgctttcaagaaacgatacgtatggctcagcggagagaccttatctttctctaagtccccagaatggcagatgtgccactcgatcccggtctcccatattcgtgccgttgaaagagtggacgaaggcgcttttcagctgcctcatgtcatgcaggtggtgacacaggacgggacaggcgcgctgcatacaacttacctgcagtgtaaaaacgtcaacgagctgaaccagtggctgtctgcccttaggaaggcgtctgctccgaatcccaataaactggccgcgtgccaccctggggcttttcggagcgctcgctggacatgttgtttgcaggctgagcgcagtgccgcaggttgtagtcggacccattccgccgtaaccctaggggactggagtgaccccctcgacccagacgccgaggctcagactgtgtaccggcaactccttctgggcagggaccagctgcgcctaaagctcctggaggattccaatatggacacgactttggaggctgacactggcgcctgccctgaagtgctcgctcggcagcgcgcggctacagctaggctcctggaggtcctagcagatctggatcgggctcacgaagaatttcagcagcaagaacgagggaaggccgctcttggtccattgggcccgtag

SEQ ID NO: 131833 - DNA, 3714 bp, synthetic construct
  misc_feature 1..3714: note = Description of Artificial Sequence: Synthetic coding sequence
  source 1..3714: mol_type = other DNA
atgcaaaaatctgtcaggtacaatgaaggtcacgctctatacctcgcattcctggctagaaaagaaggaacgaagcgaggtttcctgtcaaaaaagacagctgaggcgtccaggtggcacgagaaatggtttgcactttaccagaacgtcttattctattttgaaggagaacagtcatgtagaccggccggaatgtacctactggagggttgcagttgtgagcggactcccgctccaccaagggcaggagcgggccagggaggggtaagagatgcacttgataaacagtattatttcacggttcttttcgggcacgagggtcagaagccactcgagctccggtgcgaggaagaacaggatggcaaggaatggatggaggcgattcaccaagcatcttatgcagatattcttatcgagagagaagtactgatgcagaagtatatccacctggttcagattgtggagacagagaagattgcggcgaatcagcttcgtcatcaactggaggatcaagacacggagatcgagcgcctaaaatccgagatcatcgccctaaacaaaactaaggagagaatgcgaccttatcagtcaaaccaggaggacgaggacccggatatcaagaagatcaagaaggtacagagttttatgcgcgggtggctgtgcagaaggaaatggaagactattgtgcaagactatatctgttctcctcatgcagagtctatgcgaaagagaaaccaaatcgtctttacaatggtggaagccgagtcagagtacgtgcatcaactctatatactggtgaacggctttctgcggccactgagaatggcggcgtcctctaagaaacctccaatatcacatgatgatgtctcgtccatctttctgaattcagagaccatcatgtttctgcacgaaatcttccaccagggccttaaggcacggatagctaactggccgacactgattttagcggatttattcgacattttgctgcctatgctcaacatttaccaggagttcgtacgcaaccatcaatactccctgcaggttctggccaattgtaagcaaaatcgggattttgataagttgctgaagcaatatgaggccaatcccgcgtgtgaaggtagaatgctcgaaacctttttaacttatccaatgttccaaatcccaagatacatcatcacgctccacgagttgctagcccacaccccgcacgaacacgtggaacgcaaatcactcgaattcgcgaaatccaaactcgaagaactgtctcgggtgatgcatgatgaagttagtgatacagagaacatccggaagaatcttgctattgaaagaatgatcgtcgagggttgtgatattctgctcgatacttcccagactttcattcgccagggaagcttgatccaggtgcccagtgttgaacggggcaaactatccaaggtgcgcttgggcagtttgagcctgaaaaaagagggagaaagacagtgcttcctcttcactaagcatttcttaatttgtacacggtcaagcggtggtaagttgcatctccttaaaaccggcggtgtgcttagtctgattgactgcaccctgattgaagagcctgatgcctcagatgacgactcgaagggcagcggacaggtcttcggtcatcttgacttcaagatcgtggttgaacctcccgacgccgccgcattcactgtcgtcttgctggctccaagtcgacaggagaaagccgcctggatgtctgacatctctcagtgtgttgataacattcggtgtaatggtctgatgaccatcgtgtttgaggagaacagtaaagtcactgttccacacatgatcaagtcagatgctaggctacataaggacgacacagacatttgcttctccaagacactcaacagttgcaaggttccacagatccgctacgcctcggtagaacggctgctcgaacgccttacagacttgaggtttcttagcatcgatttcttaaatacattcctccacacatatcgcatctttaccaccgcagccgtggtgctggggaaattgtctgacatctacaaacgacctttcaccagtattcccgtccgttctcttgaactgttttttgcgacatcacagaataacagaggcgaacacctggtggacggtaagtccccaagactctgtagaaaattcagttctccgccacctctggcagtgagccggacttccagccccgtgagagcccgaaaactatctctgacctcgcctctgaattcaaagatcggcgccttagatctcacgacctccagtagccccacaaccacaacgcagtctccagctgcgtccccaccaccccacactgggcagatcccgctggacttgtctaggggcttgtccagccctgaacaaagccctggaactgttgaagagaatgtcgataacccccgggtcgacctgtgcaataagttgaaacgctctattcaaaaggcagtcttagaatcagcacccgcagaccgcgccggcgttgagtctagtcctgctgcagacaccactgagttgagcccgtgtagatcccccagcaccccaaggcaccttcgataccgacagccagggggccagacagcagacaatgctcactgttccgtcagtccggcatcggcgtttgccatagctactgctgccgccggccatggaagcccccccggctttaacaatacagaacgaacatgtgacaaagagttcatcatccggcggactgcaacaaatagagtactgaacgtcctgaggcattgggtttccaagcatgcccaggattttgaactgaacaatgaactgaagatgaacgtgttaaacctgttagaggaggtgctgagagacccagacttgctgcctcaggagcgcaaggcagccgcaaatatacttcgcgcgctatcgcaggatgaccaagacgatattcacttgaagttggaggacatcatccagatgaccgactgtatgaaggccgagtgctttgaatccctcagtgcgatggaactcgctgaacagattaccctccttgaccacgttattttccgatccattccatacgaggagttcctgggacaaggctggatgaaacttgataagaacgaacgcaccccatacatcatgaaaacaagccagcacttcaacgacatgtccaacctcgtggcctctcaaatcatgaactatgccgacgtttcctccagagccaacgcgatcgagaaatgggtggccgtggctgatatttgtcggtgtctccacaactataatggagtgctggaaatcacttccgctctcaatagatcagctatctatcgcctgaagaagacctgggcgaaggtgagcaaacaaacaaaagcccttatggacaagctgcaaaagactgtgtcatctgagggacgctttaagaacctacgggaaacactgaaaaattgcaacccacccgccgtgccatatctgggcatgtatctgacagatcttgccttcatcgaagagggaacccccaatttcacagaagaaggtctggtcaactttagcaaaatgcgaatgatttcccacataatccgggagattcggcagttccaacaaacatcctaccgaatcgaccaccagcccaaggtcgctcagtacttactggataaagatctgataatcgacgaggatacactgtacgaacttagcctgaagatcgagcccaggctgcccgcctag

SEQ ID NO: 131834 - DNA, 4431 bp, synthetic construct
  misc_feature 1..4431: note = Description of Artificial Sequence: Synthetic coding sequence
  source 1..4431: mol_type = other DNA
atgacgtcaagcagtcctgcaggtctcgaaggctcagacctgtccagcataaacaccatgatgtccgctgttatgtccgtggggaaagtcacggagaatggcgggtcccctcaaggtattaaaagcccttcaaaacctccggggccgaaccgaattggcagaaggaaccaggaaaccaaagaagagaagagtagttacaactgtcctttgtgcgagaaaatctgcacaactcagcaccagctgaccatgcatattagacagcacaatacagacactgggggagcggaccattcctgtagcatatgcggaaagagcttgagcagcgcctctagcctggaccgacatatgctcgtacactccggagagaggccttataagtgtaccgtatgcgggcagtccttcaccacaaatggtaatatgcacaggcacatgaaaatccacgagaaggatccaaactctgcaacagctacagcacctccatcgccactgaaacggcggagactgagttcaaagcggaaactttcccatgacgcggaaagtgagcgggaagatcccgccccggctaaaaagatggtggaagatggccagtctggcgatcttgagaaaaaagctgacgaagtgtttcactgccccgtttgctttaaagaattcgtttgtaaatacggattagaaacacacatggagacacactcggacaatccactgcgatgtgatatctgctgcgtgacttttcgtacacatcggggtttattgagacacaacgccctcgtgcacaaacagttaccgcgggacgctatgggtcggcctttcattcagaacaatcctagcatccccgccggctttcatgatctggggtttacagattttagctgcagaaagtttccacggataagtcaggcctggtgcgaaacaaatttaagacggtgtatttctgaacagcaccgctttgtctgtgatacgtgcgacaaagcttttcctatgctctgtagtctcgcacttcacaagcagacccacgtggcggccgaccaaggtcaggaaaagccacaggccacacccctgccaggtgatgccctcgatcagaaaggattcctggcactcctgggcctccagcacaccaaggatgtcaggccagcccccgccgaggaacctctcccggacgacaaccaggcaatacaactgcaaacgctgaagtgtcagctcccccaggatccaggatgcacaaacctgctgtctctgagcccattcgaagcagcatccctgggcggtagcttgaccgtgttgccggctacaaaagatagtattaagcacttgtcactgcagcccttccagaagggttttattattcagcctgatagttctatcgtagtgaagcccatttctggagaatccgccatagagcttgctgatatccagcagatcctcaaaatggctgcctctgcccctccccagatcagcctgcctcccttctccaaggcccccgccgcgcctctacaggccatcttcaagcatatgcctcccttgaagcccaaaccccttgtcacgcctcgaacagtggtagctactagcacacctcccccgcttatcaacgctcagcaagctagtcctggatgcatctccccctcccttccccccccgcctctgaaattgctcaagggcagtgttgaagctgccagcaatgcacatctgctccagtctaaatcaggtacgcaaccccacgctgcgacccggctatcccttcagcagccaagagctgagctccccgggcagcccgaaatgaagacacagctggaacaggattcaatcatcgaggccctgctgccattgtctatggaagccaagatcaagcaggaaatcaccgagggagaattaaaagccttcatgactgctccgggtggcaaaaagactccggcgatgagaaaagtgctgtacccctgccgattttgcaaccaggtctttgctttttctggggtgctacgtgcacacgttcgcagtcatctggggatttcaccttaccagtgcaacatctgtgattacatcgctgcagacaaagctgccctgattcgtcatctgaggacacattcgggtgagaggccttacatctgcaaaatttgtcactacccttttactgttaaagctaactgcgagcgccatttacgcaaaaagcatctgaaagcaaccagaaaagacattgaaaagaatatcgaatatgtttcctcctctgctgccgagcttgttgacgcattctgtgctccagacacagtctgtcggttatgcggggaggatctcaagcattaccgggccctcagaatccatatgcggacacactgtggacgaggcctgggcggcggtcataaaggccgaaagcctttcgaatgcaaggagtgtagcgcagccttcgccgctaagagaaactgtattcaccatattctgaaacagcatcttcatgtgcccgagcaggatatcgagagttacgtgctggcagcagatgggctaggcccagccgaggcacccgccgccgaggcttcgggacgtggtgaagattccggatgtgctgccctgggggattgcaagcctctaaccgcctttcttgagccacagaatggcttcctccaccgggggcctacccaaccacctccaccgcatgtgagcattaagctggagccagcctcttcctttgccgtggatttcaacgaacctttggacttctcacagaagggtctcgccctggtgcaagtgaaacaggagaatatctcttttctaagccctagcagtctcgttccgtacgactgttccatggagcccattgatctgtcgattccaaaaaatttcagaaagggcgacaaggaccttgctaccccttctgaggcgaaaaaacccgaggaagaagctggctcatcggagcaacccagcccctgtcctgcccctggcccatctttacctgttaccttggggcctagtgggattctcgagtctcccatggccccagcccccgctgccacccccgaaccaccagcccaacctctacagggtccggtccaactagctgttcccatctactcctcggcactggtttctagtccgccgttggtcggctcatctgctcttttaagtggaacagcccttctgaggccattgcggcccaagccccctttactcctgcccaaaccccctgtcaccgaggagctgccgcctctggcctccatagcccaaatcatttcctcagtttcctctgctcccacattgcttaagacaaaggtagcggatccaggaccagccagcactgggagtaatactactgcatctgacagcttaggcggatctgttccaaaggcagcaactacagctacaccagccgctacaaccagcccaaaggaatcctccgaaccacccgccccagcttcaagcccggaagctgcatcaccaaccgagcagggtcccgctggcaccagcaaaaagcgcggcagaaaacgcgggatgcgctctaggcctcgggcaaatagcggaggagtggaccttgactcctctggggagtttgcctcaatagaaaagatgttggctactacagatactaataagttcagccccttcctacagaccgctgaggacaacacccaggacgaagtggctggagctccggctgatcaccatggtccttccgatgaagaacaaggatccccacccgaggacaagctgttgagggcaaagcgcaactcctacactaactgtctccagaaaattacttgtccccactgccctagggttttcccatgggcctctagcttacaacgccacatgctgacacacaccggacagaaacctttcccatgccagaaatgtgatgctttcttttctacgaagtcaaattgcgagagacatcagcttcgaaagcacggagttacaacctgcagcctgaggaggaatggacttattccgcagtcaaaggagagcgacgtgggctcccatgattctacgggagaaaggccttataagtgtcagacatgcgagcgtacctttaccctcaagcattcactagtcagacatcagcgaatccaccaaaaggcacggcatgccaagcaccacggcaaggattcagacaaggaggagagaggcgaggaagactcagagaatgagtccacacactccggaaacaatgccgtcagcgagaacgaggccgagctggctccaaacgcctccaaccacatggctgtgactaggtctcgaaaggaagggctggcctctgccaccaaagattgtagccatagagaggagaaggtgacagctgggtggccctctgaacccggacagggagatttgaaccctgaatctcctgcagcattaggtcaggacctgctggaaccgcggtccaaacggcctgcgcatccgatcctcgctacagccgatggcgcgtctcagttggtgggtatggagtag

SEQ ID NO: 131835 - DNA, 5064 bp, synthetic construct
  misc_feature 1..5064: note = Description of Artificial Sequence: Synthetic coding sequence
  source 1..5064: mol_type = other DNA
atgacaagttcctcccctgcagggcttgagggatctgatttgagctctataaacaccatgatgtccgcagtgatgagtgtaggtaaagtcactgagaatgggggatcgccacagggaattaagagtccttcaaaaccgcctgggcctaatcggattggccgacgcaatcaggaaactaaggaggaaaagagctcttataactgtcccttgtgcgagaagatatgcactacgcaacaccagctgactatgcacataaggcaacacaacacggatacaggcggcgccgaccactcctgctccatctgtggcaagtcactttctagcgcatccagcctggaccgccatatgttggtgcactccggggagaggccctacaagtgcaccgtatgtgggcaaagttttaccactaacgggaacatgcatcgtcacatgaagattcacgagaaagatcccaattcagccaccgccacagccccaccgagccccttgaaaagaagacgcctgtcttccaagcgtaaattgagtcacgatgctgagagcgagcgcgaagaccccgcccccgcaaaaaagatggttgaggatggccaatccggcgatctagagaaaaaagccgacgaagtcttccattgcccagtgtgtttcaaagaattcgtgtgcaagtatggtcttgagacccacatggaaacccatagtgataatccgctgcgctgcgacatttgctgcgtcacttttagaactcataggggcctgctgaggcacaacgccctcgtgcataaacagctgcccagagacgctatgggacgaccatttatccagaacaaccctagtatccccgctgggtttcacgatcttggatttacagactttagttgccgcaaatttcccaggatctcccaagcctggtgtgagacaaatctgcgtagatgtattagtgagcagcaccgcttcgtgtgcgacacctgtgataaagcctttccaatgttgtgttccttggcccttcacaagcaaacccatgtggcagccgaccaaggccaggaaaagcctcaggcgactcccctcccgggtgacgcactcgatcagaaggggtttttggcactcctggggctccagcatacgaaagacgtgcggcctgcaccagctgaggaacccttgcccgacgataatcaggccattcaactgcagaccctgaagtgccagcttccccaggaccctggatgcacaaaccttctttctctgagcccattcgaggcagccagtctggggggctcactgactgtcctgcccgccacaaaggactcgattaaacacctgtcactgcagccattccagaagggattcattatacagcctgactcaagcatcgtagttaaacccatcagcggagaatcggccatcgagctggccgacatccagcagatcctgaaaatggcggcatcagcacctccacaaatttcattgcctcctttctccaaggcacctgccgcccctctgcaggctatatttaagcatatgccacccctgaagcccaaaccactcgtcacgcctcgcacagtggtagctactagcacccccccccctctgattaatgcacagcaggcaagcccgggctgcatctccccatcactgcctcccccacctctcaagcttctgaaaggctctgtggaggccgcatccaacgcccacctgctgcagagtaaatcgggcactcagccccacgctgcaacacgactgtcgttacagcagcctcgagcggagcttcccggtcagcccgaaatgaagacgcagttggaacaggattctatcatcgaggctctgctccctctatctatggaagccaagatcaaacaggagattaccgagggagagctgaaagcgttcatgaccgcccccggaggaaaaaaaacccctgccatgagaaaagtgctatatccatgccgcttctgcaatcaagttttcgcgtttagtggggtgctcagagcccacgtcagatcacacctgggcatctctccctaccagtgtaacatctgtgactacattgcggcggacaaagctgccttgattagacacttgagaacgcactccggtgagcgcccgtacatatgtaagatctgccattacccatttacagtgaaggccaattgtgagcgccatcttcgcaaaaaacatctcaaggcaacacgcaaagatattgagaagaatatagaatatgtgagcagctctgctgccgagttggtcgacgcattttgcgcccctgacaccgtgtgtagactgtgtggcgaggacctgaagcactatcgggccctgcgcatccacatgcgaactcactgcggccgcggcctcggaggagggcacaaagggcgcaagcctttcgagtgtaaagagtgttcagcggcctttgcggctaagaggaactgcatccatcacattctgaagcaacacctgcacgtaccagaacaggacatcgaaagctatgtgttggccgctgatgggcttggaccggcggaggcacctgccgctgaggcaagcggtcgcggagaggacagtggttgcgccgcactcggggactgtaagcccctaactgcatttcttgaaccccaaaatggctttttgcaccggggcccaacccagccccctcctcctcacgtctcgattaagctggagcccgcatccagtttcgctgtcgactttaatgaacctctggacttcagccagaaaggcctggccctagtgcaagttaaacaggagaacatctctttcttatctcctagcagccttgtgccctacgactgttcaatggagccgatcgacttatccatcccaaagaacttcaggaaaggtgataaagatctcgctaccccttccgaagccaagaagccagaagaggaagctgggtcctcagaacagccaagcccttgcccagcgcccggccctagcctgcccgtcactttgggcccttctggcatcttagaatcccctatggcgcccgcccctgctgccacccccgaaccccccgcccagcccctccaaggcccggtacagctggcagtgcccatttatagttccgccctcgtaagttcccctcctttggtgggatcgtctgccttgctgtccggaacggccttgcttagaccactcagaccgaagcctcctctcctcctcccaaaaccccccgtaacagaagaactgccgcccctagcctccattgcccagataattagttccgtatcctcagctcccaccctgctgaagaccaaggtggccgatccagggcctgcgtcaaccgggagcaacaccacggctagtgactccctgggtggcagcgttcccaaggctgccacaaccgccacgccagctgcaaccactagcccaaaggaaagctccgagcctcccgcgccggcttccagccccgaagccgcgtcgccgactgaacagggccccgcaggcactagcaaaaagcggggcagaaaaagagggatgcgatcaagacccagggccaactccggcggagtcgatctggactcaagcggcgaattcgccagtatcgagaagatgctcgcgacaactgacaccaataagttttctcctttcctgcagaccgctgaagataatactcaggatgaagtggccggcgctcccgcggaccatcatgggccttccgatgaagaacaaggctcaccccctgaggataagttacttagggctaaacggaattcctacactaactgtcttcaaaagatcacctgtcctcactgtcccagggtgttcccctgggcatcctcgctgcagaggcatatgctgacgcacactgattcacagtcagatgccgagaccgccgctgctgcaggagaggtgctcgacctcacatcccgcgaccgcgagcagccctccgaaggtgccaccgagttgagacaggtcgctggggatgcgcccgtcgagcaagccaccgccgaaactgccagcccagtccaccgggaagagcacggcaggggcgagagccatgagcccgaggaagaacatggcaccgaagagagcacaggtgatgctgacggcgcagaggaggacgcttccagcaaccagtccctcgacctagacttcgcaacaaaactgatggacttcaaattggcagaaggagacggcgaggcgggtgccggaggagcagcctcacaggagcagaagctagcctgtgatacatgcggcaaatcatttaaattcctggggacgctcagccggcatagaaaggctcacggaaggcaagaaccgaaagatgaaaaaggggatggcgcctccacagctgaagagggccctcagccagccccggagcaagaagaaaaacccccagagactccagctgaggtggtcgagtccgcaccaggagcaggtgaggcacccgccgagaagctggccgaggagaccgagggccctagcgacggggagtccgctgccgaaaagagaagctctgaaaaatctgatgacgataaaaaacctaagactgatagtccaaagtctgtcgcgtccaaggctgacaaacgcaagaaggtttgttctgtatgcaataagcgcttctggtccttgcaggatctaacgcgtcatatgaggtctcatactggggagaggccatataaatgtcagacctgcgagcggacatttaccctgaagcactcgctggtccggcatcaacggattcatcagaaggcacggcatgccaagcaccatgggaaggatagtgacaaggaggagcgaggcgaggaagacagcgaaaatgaaagcacacactcaggcaacaatgccgtgtcagaaaacgaggcggagctcgcccccaatgcgagcaatcacatggcggttactaggtctcgcaaggaaggcttggcatctgctactaaggattgctcacatagagaggaaaaggtgaccgccggctggccaagcgaacctggccagggggatctgaaccccgaatccccagcggccttggggcaggatctcctagaaccgcggtctaagcgacccgcacatcctatcctggccaccgcggacggggcgtcacaattggtggggatggaatag

SEQ ID NO: 131836 - DNA, 5064 bp, synthetic construct
  misc_feature 1..5064: note = Description of Artificial Sequence: Synthetic coding sequence
  source 1..5064: mol_type = other DNA
atgaccagtagctccccagcaggcctcgagggctccgatctgtctagcataaacaccatgatgtcggctgtcatgagtgttgggaaggtaacagaaaatggtgggtctccccagggcatcaaatcccctagcaagccacccggtcccaatcgcattggccgaagaaaccaggaaaccaaggaggagaaatcctcttacaactgtcccctgtgtgaaaagatatgcactacgcagcaccaattgactatgcacatccgccaacacaacacagatacgggcggagctgaccattcctgcagcatctgcgggaagagcctgtcatctgcttcatcattggatcggcacatgttagtgcacagtggcgagcgaccttataagtgcactgtgtgtggccagtcattcacaaccaatgggaacatgcacagacacatgaaaattcatgagaaggatcccaacagcgccaccgctaccgcccctccctctcctctcaaacggcgcagacttagttcaaaacggaagctgtcacacgacgccgaatctgagagagaggatcctgcacctgccaagaagatggttgaagacggtcagtcgggagatctggagaagaaggcggatgaagtgtttcattgcccagtgtgtttcaaagaatttgtgtgcaagtacggcctggagactcatatggagacccactccgacaacccattgcgatgtgatatctgctgcgttacatttcggacacatcgaggcttgctccggcacaacgcactggttcacaagcagctccccagggacgcgatgggcaggccgtttattcagaacaatcctagcatacctgccggcttccacgacctgggtttcactgatttttcctgtaggaaattccccaggatctctcaggcgtggtgcgaaacgaacctgaggcggtgcatcagcgaacaacatcgctttgtgtgcgatacctgtgacaaggcctttcccatgctgtgcagcctcgccctgcacaagcagacacatgtagcggcggaccagggtcaggaaaaaccccaggccacaccgctacccggcgacgccctcgaccaaaaagggtttctggcactgctgggcttacagcacacaaaagatgtgcggccagcgccggccgaagaacccctacctgatgacaatcaggcaattcagctgcagacactgaaatgtcaactacctcaagaccccggctgtactaacctgctttccctgagtcccttcgaggccgccagcttgggaggaagcctcacagtactgccagccaccaaagacagtatcaagcacctgagtttgcaaccttttcagaagggcttcataatccagccagatagctcaattgtggtgaaaccaatctccggcgaatccgccatcgagctggcagacatccagcagattctgaagatggcggccagcgcaccgccccagatctccttacccccatttagcaaagctcccgccgctccgctacaggcgatctttaagcatatgccaccactaaagccaaaaccccttgtgactcccagaacagtagtggccacctctacccctcccccgctgattaacgctcagcaggcttcccccggttgcatttccccctcactcccaccccctccattaaagctattaaagggatccgttgaggcagcctcaaacgctcatctgctgcagagtaagtctgggacacagccacatgctgccactaggttgagcctacagcagccacgagcggagcttccagggcaaccagaaatgaaaacacaactggagcaggattccattattgaggctctgctgcctctgtccatggaggccaaaatcaaacaggaaattaccgagggtgagctcaaggccttcatgactgctcctggagggaaaaaaacaccagctatgagaaaagtgctctatccttgcaggttctgtaatcaggtgttcgcctttagcggcgtgctgcgcgcccatgtgcgttctcacctggggatcagcccctatcagtgcaacatctgcgattatatcgctgccgacaaggctgcactcatccgacatctccggactcatagcggggagagaccttatatctgcaagatttgccattacccattcaccgtgaaggctaattgtgaacgacaccttagaaaaaagcacctgaaggccactcggaaagacattgagaaaaatatagagtacgtttcttcctctgccgctgaactggtggacgccttctgcgctcccgacaccgtgtgtcgcctgtgcggagaagacttaaagcactacagggcgctcaggatacatatgcggacccattgcggtaggggccttggcgggggacacaagggaagaaagcctttcgagtgtaaggagtgcagcgctgccttcgcggctaagcggaattgtatccatcacattctgaaacaacatctgcacgtgcccgagcaggatattgagtcatacgtccttgctgccgacggcctgggtccagcggaggctccggccgctgaggcttcgggtagaggggaggactctgggtgtgctgctctgggcgattgcaaacctttaaccgcatttttagaaccacaaaatgggttcctccacaggggacctacacaacctccccctccccacgtctctattaaactggagcctgctagtagcttcgcagtagatttcaacgagccattggattttagccagaaaggacttgctctggtccaggtgaaacaagaaaatatctcatttttatccccaagctcactagtcccatacgattgtagcatggagcctattgacctgagcatccccaagaatttccggaaaggagacaaggacctggcgactccgagtgaggcaaagaaaccagaggaggaggctgggtcatcagaacagccttctccctgccctgctcctggcccttctctgcccgtgacactgggaccttcaggaatcctggagtcacctatggcccccgcccctgctgctacaccagagcccccagcccagccattacagggcccagtgcagttagcagtgcccatctattcttcggccctcgtgtcaagcccacctctggtcggtagcagcgctctgctctccggaaccgcgctgctgcggccgttacggccaaagccgcccctgcttctaccaaaacctcccgtgacagaggaactgcctccactggcatctattgctcagataatctcatcagtgagcagcgcacctacactgttaaagaccaaggttgcggatccagggcctgcctcaaccggctctaacacaaccgcatcagattcactcggcggatcagtgcccaaagccgccacaaccgccacccccgcagcaacaaccagcccaaaggagtcttctgaaccgccagctcctgcgagctccccagaggcagcgagccctaccgaacaggggccggccgggactagcaagaagagaggtaggaagcggggcatgagatccaggcccagggctaattccggaggtgtcgatttggatagctcgggtgaattcgcgtccatcgaaaagatgttggctacaactgacacaaataaatttagtccattcctgcaaactgcggaggataatactcaggacgaggtcgctggagctcccgctgaccaccatgggccgagcgatgaggagcagggatcccctcccgaagacaagcttctcagggcaaaaagaaacagttacactaattgtcttcagaagataacttgcccccactgtcctcgggtattcccctgggcaagcagcctacagcgccatatgctgacccacacagattcacagagcgacgccgagacagccgctgccgctggagaggtactagacttaacatctcgggaccgagaacagccatccgaaggtgcaacggagctgcggcaagtcgccggggacgcaccagtggagcaagctactgccgagacagccagccccgtgcatagagaggaacacggcagaggagaaagtcacgagcccgaggaggaacacggcactgaagagtctactggggacgccgatggtgccgaagaagacgcctcttctaaccaatccctcgatctggacttcgctactaaattgatggacttcaagctcgccgagggggatggcgaggccggcgccgggggtgctgcctcacaagaacagaaactggcatgcgatacctgcggcaagtcttttaagtttcttgggaccctgagccgtcatcgaaaagcacatggacggcaagagcctaaggacgagaagggggatggggcatcgaccgctgaagaaggtccccagcccgctccagagcaagaagaaaagcctcccgagaccccagcggaggttgtcgagagcgcacccggggccggcgaagcccctgccgaaaagctggcggaagagacggaaggaccctctgatggcgagtcagctgccgaaaagagatcatcagaaaaatctgatgacgataagaaaccgaaaaccgattctcccaagtccgtcgcgagcaaggccgacaagcggaagaaggtgtgttccgtgtgtaacaaaaggttctggtccttacaggacctcacccggcacatgcggtcacatacaggcgagcggccatacaaatgccaaacttgcgagaggaccttcaccctcaaacactctctggttcgccatcagcggatccatcaaaaagcacggcacgctaagcaccacggaaaggactcagataaggaagaacgcggagaagaggattccgagaacgagtctacgcattcggggaacaatgccgtttccgaaaatgaagccgaactggcccccaacgcttccaaccatatggctgtaacccggagcaggaaggaaggacttgcctccgctacgaaagactgctcccaccgggaagaaaaggtcacggcaggatggccttctgaacctgggcagggcgatctgaacccagaatccccggccgcccttggacaggacctgcttgagccccgcagcaagcggcccgctcatccaattctggccacagcagatggcgccagccagctggtgggaatggagtag

SEQ ID NO: 131837 - DNA, 5229 bp, synthetic construct
  misc_feature 1..5229: note = Description of Artificial Sequence: Synthetic coding sequence
  source 1..5229: mol_type = other DNA
atgacatcgtccagccccgcgggtctggagggatctgatcttagttctatcaataccatgatgagcgctgtgatgagcgtggggaaagtgactgagaacggcggttctcctcagggcattaaatcaccttccaaaccacctggcccaaacagaattggtagacgcaaccaagaaacaaaagaggaaaagagtagctataattgtccactttgcgaaaaaatctgcaccacgcaacaccagctgaccatgcacatcaggcagcacaataccgacaccggcggggcggatcactcctgctccatttgcggcaagtccctgagctctgcctcgagtctggatagacacatgttggtacacagtggggagcgcccgtacaaatgtacagtatgcggacagtccttcactactaatggcaatatgcatcgacacatgaagattcacgaaaaagaccccaactccgctacagccaccgcacctccatctccacttaagcgtcggcggctgagctcgaagaggaaactgtcacacgatgcggagtctgagcgtgaggatccagcaccggcaaagaagatggtggaagatggccagagtggcgacctagagaagaaggctgatgaagtgttccactgtcctgtgtgtttcaaagaatttgtgtgcaaatacgggttggaaacacacatggagacccacagcgataatcccctgagatgcgacatttgctgtgtgacgttccgtacgcatagggggcttctgcgccacaatgctctcgtgcacaagcaactgccacgcgatgcaatgggccgcccattcatccagaacaacccaagcatcccggccgggttccacgacctcggttttactgacttttcgtgtaggaagtttccccggatctcccaggcatggtgcgaaaccaacctgagacggtgcatttctgagcaacacagattcgtgtgcgatacctgtgataaagcctttccaatgctctgttcccttgccttgcacaaacagacacatgtagccgccgatcaaggccaggagaaacctcaggctacaccactgcctggcgacgcactcgaccagaaagggttcttggcgctgctcggacttcagcacaccaaagacgttaggcccgccccagcggaggaaccactgcctgatgacaatcaggctatccagctgcaaaccctgaaatgccaattgccgcaagacccaggatgcacgaacctactgtccctttcacctttcgaggccgcgtcgctgggcggatcacttacggtcctccctgctaccaaggactctataaagcatctgtctctacagcccttccaaaaagggtttatcatacaacccgactcttctattgtggtaaaacctatcagcggggaatccgccattgagctcgcagacattcagcagatcctgaagatggctgcaagcgctccaccacagatctcgctgccacctttttcgaaggcccctgccgcccccctgcaagccattttcaaacacatgccaccccttaaacctaaacctctggtgactccccgaactgtggtggccacctcaactcctcctccactgatcaacgcccagcaagcctcccctggctgtatctcaccgagtcttccaccccctcccctaaagctgctgaagggcagtgtggaggcagcctctaatgcccaccttctccagtctaaatcaggcactcagccacatgctgcgactcgcttgagtctgcagcagccgcgggctgagctaccaggccaacccgagatgaaaacgcagttagaacaggacagcattatcgaggccctactcccactgtcaatggaggctaaaatcaaacaggagatcaccgaaggcgaacttaaggccttcatgaccgcccccggaggcaaaaaaacacccgcgatgcggaaggtgctgtacccttgtaggttttgtaatcaggtttttgctttctcaggcgtgttacgggctcacgttaggagtcatctgggcatcagcccgtatcaatgtaacatatgtgattacattgcagcagacaaggctgctctgatcagacatctccgcacccattctggtgagcgcccttacatctgcaagatatgtcactatccctttacggtgaaggccaattgtgaacgacacctgcgcaagaaacatctgaaagcaacacgcaaagacatcgagaagaatatcgaatatgtgtcttcttcagcagccgaactggtggatgccttctgtgccccggacactgtgtgtagactttgtggtgaggacctgaagcactatagggcccttaggattcatatgcgaacgcactgtggccggggactgggggggggacataaaggcaggaagccctttgagtgcaaagagtgtagtgccgctttcgccgctaagcggaattgcatccaccatattcttaagcagcacctgcacgtgccagagcaggatattgaaagctacgtgctggccgccgatggcctgggacccgcagaagcaccagctgcggaggcctctggcaggggtgaggactctggctgcgctgccctgggagattgtaagccactgactgcctttctcgaaccacagaatgggtttttgcacagaggcccgacacagcccccgccacctcacgtcagcattaaactcgaacccgccagttcttttgccgtggattttaatgagcccctggacttttcccagaaaggtctggctcttgtgcaggtgaaacaggaaaatatcagtttccttagtccctccagcctcgtgccttatgactgctccatggaaccgatcgatttgtcaataccaaagaatttcaggaaaggggacaaagatcttgccacgccttcagaagccaagaaacctgaagaagaggccggctcttccgagcagccctcaccatgtcctgctccgggcccttctctgccagtgaccctggggccatcaggtatcttggagagtcctatggcccctgctcccgcagcaacccctgaaccacctgcccagcccctgcagggtcccgtccagctcgctgtcccgatttatagcagcgcactcgtcagtagccctcctctggtcggcagttctgccctcctgtccggcacagccttgctccgaccactgaggcccaagcccccactgctgcttccaaaaccgcccgtgactgaagaattgccccctctggcatctatcgcgcaaattatttcttccgtctcttcggcccctacactccttaaaactaaggtagccgaccccggcccagcgtcaactgggtctaatacaactgcttccgactctctggggggatctgtccccaaggccgcgacaaccgcgacaccagccgccacaacttctcctaaagagagctccgaacccccagctcctgcctcaagccccgaagccgcttccccgacagagcaaggaccagcagggaccagcaagaagagagggcgtaaaagagggatgaggtctaggccccgggcaaactccggcggagtcgatttagacagtagcggcgaattcgcttccatagaaaagatgctcgcaaccaccgatactaacaagttctcccctttcttgcagactgccgaggacaatacccaggatgaggtggccggcgcccctgcagatcaccacggcccttccgacgaagagcagggctctccccccgaggataagctgttgcgagcaaagaggaatagttatactaactgcttacagaagatcacttgtccacactgtcccagagtatttccttgggcctcttccctgcagcggcacatgctgacacatacaggccagaaaccgtttccctgtcagaaatgtgacgcattcttcagcacgaaatctaattgtgagcggcatcagttgcgtaaacacggagttaccacctgcagtctaaggaggaatggcctgattccccagtcgaaggagtcagatgttggcagccacgatagcactgattcacagagcgacgccgaaactgctgcagcagccggagaagtgctagatctgaccagtcgggatcgggagcaaccaagcgaaggcgctactgagctcagacaggtagccggtgatgcccctgttgagcaggccactgccgagacagcctctcccgttcaccgcgaagaacacgggcggggagagagccacgaacctgaagaagaacacggaaccgaggagtccacaggcgacgccgacggcgctgaagaagacgcctcttctaaccaatccttagacctagattttgccactaaactgatggattttaaactggcggagggcgatggcgaggccggcgcgggtggagctgctagccaggaacaaaagcttgcctgtgatacatgtggcaagagcttcaaattcctcggcacactgtcccgacaccgcaaagctcatgggcggcaggagcccaaagatgaaaagggtgatggtgccagcaccgccgaggagggaccacaaccagcccccgaacaggaagagaagcctcccgagaccccagcagaggtggtagaaagtgccccaggagcgggcgaggcccctgccgagaagctagcagaggaaacggaggggcccagcgatggggagagcgctgccgagaagcggagctcggagaagagcgacgatgacaaaaaacccaaaacagactcccctaaatcagtcgcttctaaagctgacaagaggaagaaagtctgttctgtgtgtaataagagattttggagtctccaggatctgacaagacacatgcggtcccacaccggggagcgtccatataaatgtcaaacctgtgagcgaacattcaccctgaagcatagcctggttcggcaccagcggattcatcagaaggctcgccacgccaagcaccatgggaaagatagcgataaagaagagagaggggaggaagatagcgagaatgagagcacacacagtggaaacaatgccgtttccgagaacgaagcagagttagccccaaacgcctcaaatcacatggctgttacacgctcacgcaaggaaggactagcgtccgcgaccaaggattgctctcatcgcgaagaaaaagtgaccgctgggtggccatctgagcctggccagggggacctgaaccccgaaagtcccgccgctctgggtcaggatctcctcgaacctaggtcaaaacgacctgcacaccccatcctcgcaactgcggacggagcatcccagctcgtcggaatggagtag

SEQ ID NO: 131838 - DNA, 15 bp, synthetic construct
  misc_feature 1..15: note = Description of Artificial Sequence: Synthetic coding sequence
  source 1..15: mol_type = other DNA
atgactagctcttag

SEQ ID NO: 131839 - DNA, 495 bp, synthetic construct
  misc_feature 1..495: note = Description of Artificial Sequence: Synthetic coding sequence
  source 1..495: mol_type = other DNA
atgacatcgtcttctcctgccggcctcgagggatctgacctatcctcaatcaacaccatgatgtccgctgtgatgagtgtggggaaagttaccgaaaacggcgggtctccccagggcattaaaagcccatccaaaccacctggtccaaacaggatcggtcgacgcaatcaggaaacgaaggaggaaaagagttcctataattgtccgctgtgtgagaagatctgcacaacccagcaccagctgacgatgcatattagacagcataataccgacaccggtggggccgatcattcatgttctatctgcggcaagtcactgtcttctgctagtagtctggacaggcacatgctagttcatagcggtgagcgcccttacaaatgtactgtttgcgggcagtccttcacgacaaacgggaacatgcaccgccacatgaaaatccatgaaaaagatcctaattccgcgaccgctaccgctcctcccagccctctgaagtag

SEQ ID NO: 131840 - DNA, 2337 bp, synthetic construct
  misc_feature 1..2337: note = Description of Artificial Sequence: Synthetic coding sequence
  source 1..2337: mol_type = other DNA
atgacatcaagctctccagcggggctagagggcagtgatctgagcagtatcaacactatgatgagcgcggtgatgtccgtaggtaaggtgaccgagaacggaggatctccacagggcattaaatccccctccaaacctccagggccgaatagaattggaagacgaaaccaggaaacaaaggaagagaagtcctcatataattgcccgttatgtgaaaagatttgtaccacccaacatcaactgacaatgcatattcgacaacacaacacagacacaggcggtgcggatcatagttgcagtatatgcggcaagtctctgagctctgcaagcagcttggatcggcacatgctggtccactcaggagaaaggccctacaaatgtactgtgtgcgggcagagctttacgacaaatggcaacatgcatcgacacatgaagatccacgagaaggatccaaattccgcgaccgccaccgcgccaccatctcccctgaagagacgcagactgagttccaagcgcaagcttagtcatgacgctgaatctgagagagaggaccccgcgccagccaagaaaatggtggaggatggccagagcggggacctggagaagaaggcggatgaggtgttccattgccccgtgtgctttaaggagttcgtctgtaagtacggactagaaacacatatggaaactcacagtgacaatcctctccggtgcgacatttgctgcgttacgttcaggacccatagaggccttctgcgacacaatgcactcgtgcacaaacagctccctcgggatgctatgggccggccattcatccagaacaatccctcaattcccgctggcttccacgatctggggttcaccgacttctcctgccgaaagtttccaagaatatcacaggcctggtgtgaaactaatctgaggagatgcatcagtgaacaacatagatttgtgtgtgacacatgcgataaagcctttccgatgctatgctccctggccctccataagcagacccacgtggcggcagaccaggggcaagagaagccacaggctacacctttgcctggggacgcccttgatcagaaaggctttcttgcgctactgggcttgcagcatacaaaggatgtccggccagccccagccgaagagcccctcccggacgataatcaagctatacagctccagacactgaagtgccagcttcctcaagacccaggttgcaccaatctacttagtctctcccctttcgaggctgcctctctgggagggagcctgacggtgcttccagcaacaaaggacagcatcaaacacctctccctccagccttttcagaagggatttatcattcagccagattccagcattgttgtcaaacccatcagcggcgagtctgctatcgaactggcggacatccagcagattctcaaaatggcagcttctgccccaccccagattagcttacctccattcagcaaagcccctgccgcacccctgcaggccattttcaagcacatgcctcccctgaaaccaaagccacttgtgaccccgagaacggtggtagctacctctacccctccgccacttatcaacgcccagcaggcgagcccgggctgtatttccccttccctaccccccccaccactaaagctgctcaagggttccgtagaggctgcgtctaatgcccatctgcttcagtctaagagcggaacgcaaccacatgctgccacgcgtctaagtctgcagcagccccgggcagaactgcctggtcagccagaaatgaagacccagctggaacaggacagtatcattgaggcgttattaccgcttagcatggaggctaagatcaagcaggaaatcaccgaaggagaactgaaggctttcatgactgcccccggaggaaagaaaacacccgccatgaggaaggtgttgtatccatgccggttctgcaatcaagtatttgcttttagtggtgtcctacgtgcacatgttcggtcccacttggggattagcccttatcagtgcaacatctgcgattacatcgcagccgacaaggccgccctcatcaggcacctcagaactcattcaggtgagagaccatatatttgtaaaatatgccactaccccttcaccgtgaaggccaattgtgagaggcacctgcgaaagaaacatctgaaagccacacggaaggacattgaaaaaaacatcgagtatgttagcagctcggccgcagagttagtggacgccttctgtgctccagacaccgtctgccgcctctgtggtgaggatctgaaacactaccgcgctctccggattcatatgaggacccattgtggcagatag

SEQ ID NO: 131841 - DNA, 411 bp, synthetic construct
  misc_feature 1..411: note = Description of Artificial Sequence: Synthetic coding sequence
  source 1..411: mol_type = other DNA
atgacaagctcttctccggcaggtctggaaggaagcgacctgagctctatcaacaccatgatgagcgcagtgatgagtgtaggaaaggtaactgaaaacgggggtagccctcagggaattaaatccccttcaaagccgcccggacccaacaggattggcaggaggaatcaggagactaaagaagaaaagtcctcctacaattgtccactctgtgaaaagatttgtaccactcaacatcagctaacgatgcacattaggcagcataacacagatacaggcggggccgatcactcatgctccatctgcggcaagtcactgtcatccgcctcatcactcgacagacacatgctcgtccattctggagaaagaccttacaaatgcaccgtctgtggtcagagcttcactacctag

SEQ ID NO: 131842 - DNA, 189 bp, synthetic construct
  misc_feature 1..189: note = Description of Artificial Sequence: Synthetic coding sequence
  source 1..189: mol_type = other DNA
atgacatcctcgtccccagctggattggaaggcagtgatttgtcatccattaataccatgatgtccgccgtgatgtctgtaggaaaggtgactgaaaatggcggcagcccccaggggatcaaatccccctcaaagcctccgggccctaataggatcggacgccgcaaccaggtcagcgtacatacctag

SEQ ID NO: 131843 - DNA, 834 bp, synthetic construct
  misc_feature 1..834: note = Description of Artificial Sequence: Synthetic coding sequence
  source 1..834: mol_type = other DNA
atgtccaaaagtcttaagaaactggtagaggagtctcgggaaaaaaatcagccagaagtcgacatgtctgacaggggcatctccaacatgctggacgtgaatggcttgtttacactatcacacatcactcaacttgtgctgtcgcacaataagttaaccatggtgccccccaatattgccgaactgaagaatttggaggtcctgaacttctttaacaaccagatcgaggaactccctactcagatatctagtctgcagaagttgaagcacctgaacctcggaatgaatcgcctgaacactctacctcgaggcttcggaagtttgcctgcattggaggtcctcgatctcacatacaataacctgtctgaaaatagtctgcctggtaattttttttatctgactaccctcagagcactgtacctgagcgacaatgatttcgaaatcctgcctcccgatatcgggaaactaacgaagctacagattctgagtcttagggacaatgatttgatctcccttccaaaagagatcggggaactgacccaactgaaagaactccatatccaggggaaccgtctcactgtactgccacccgaattggggaatctggacctgactggtcagaaacaggtgttcaaggctgagaacaacccatgggtgactcccatcgctgaccaattccagctcggcgtgagccacgtgtttgaatatattcgttcggagacttacaaatatttgtatggccgccacatgcaggcaaatccggagccaccaaagaagaacaatgacaagagtaaaaagatttctagaaagcctctggccgctaaaaaccgatag

SEQ ID NO: 131844 - DNA, 675 bp, synthetic construct
  misc_feature 1..675: note = Description of Artificial Sequence: Synthetic coding sequence
  source 1..675: mol_type = other DNA
atggttccccccaatatcgcagaactgaaaaatctggaggttctgaacttctttaacaaccaaatcgaggaactccccacgcagatctcctcactgcagaaactcaaacacttgaacctgggcatgaaccgtttgaacactctccctaggggctttggctcactgcctgcactcgaagtgctcgacctcacgtacaataacctgtctgagaatagtctgcctggcaactttttctacctgaccactctaagagccctgtatctgtcagataacgacttcgagattctgcctcccgacataggtaaactgacgaaacttcagattctcagtctgagagacaacgatctcatctcgttgcccaaagagattggggaactgacccagctgaaagagctgcacatccaagggaatagattgactgttctacctcctgagttagggaacctagatctgacaggccaaaagcaagtattcaaagcagaaaacaatccttgggtgactcctatcgccgaccagttccagctgggcgtgagccacgtgttcgagtatatacggtcggagacgtacaaatacctttatgggcggcatatgcaggcgaaccctgagccgccgaagaaaaacaatgacaaatccaaaaagatttcacgcaagccccttgctgcaaaaaacaggtag

SEQ ID NO: 131845 - DNA, 834 bp, synthetic construct
  misc_feature 1..834: note = Description of Artificial Sequence: Synthetic coding sequence
  source 1..834: mol_type = other DNA
atgtccaagtctctgaagaaactggtcgaggaatctagagagaaaaaccagccggaggtcgacatgagcgaccggggcatttccaatatgcttgacgtcaacgggctgttcactctgtcgcatattacccagctggtgttgtcccacaacaagctcacgatggttccgcctaacattgcagagctgaagaacttggaggtgctaaatttttttaacaaccagatcgaagagctgccaacccaaatcagttctctgcaaaagctcaagcacttaaacctgggaatgaaccgcctaaacaccctgcccagaggctttgggtcactgcctgccctcgaagtcctggatctaacttataataacctatctgagaacagcttacccggaaacttcttctatctgaccactctgagagccctgtacctgtctgacaacgactttgagattctgccaccggacataggcaagcttaccaaactgcaaatcctaagtcttcgtgataacgaccttatctccctaccaaaggagatcggcgagctaactcagttgaaagagctccacatacagggcaaccgcctgactgttttaccccccgaattgggcaacctcgacctgacggggcagaagcaggtttttaaagctgaaaacaatccttgggtcactccaattgccgaccaatttcaactgggggtgtcccacgtgttcgagtacatccgcagcgaaacctacaaatatctgtatggccgacatatgcaggctaacccagagccgccaaagaaaaataatgataagagcaagaaaatctcgcgtaagccactggctgctaagaaccgctag

SEQ ID NO: 131846 - DNA, 945 bp, synthetic construct
  misc_feature 1..945: note = Description of Artificial Sequence: Synthetic coding sequence
  source 1..945: mol_type = other DNA
atggcagctaccgcatctgcgggggcgggaggcatcgacggtaagcccagaacttctcctaagagcgtgaaattcctgttcggcgggcttgcagggatgggcgccactgtgttcgtacagcctctggatctagttaagaatcggatgcagttatcaggagagggcgccaagactcgggagtacaagacgagctttcatgctcttacctccattctgaaagcagaagggctgcgcggaatctatacgggactcagtgccggcttgctgcgacaggccacttataccacaacacgtctcggcatctacactgtactgtttgaaagattgaccggtgccgacgggactcccccgggatttcttcttaaagcagtaattggaatgacagcaggagctaccggcgcatttgtgggcactcccgctgaagtggcattaatacgaatgacagcagatggccggctcccagctgatcagcgccgggggtacaaaaacgtgttcaatgctctaatacgcatcacacgggaagaaggagtcctgaccctgtggaggggatgtattcccacaatggcaagagctgtggtagtgaacgctgcccaactagcaagctactcgcagagtaaacagttcctgctggactctggatatttttctgataacatcctgtgccacttctgcgccagtatgatatccggcctcgtgaccaccgctgcttccatgcccgtggatattgccaagacaagaatccagaatatgcggatgatcgacggaaaacccgagtacaagaacggtctggacgtgctgtttaaagtggtgagatatgaaggcttcttttcattgtggaaaggctttacgccctactatgctcggctcggcccccatacagtgctaacctttatcttcttagagcagatgaacaaagcttataaaaggctgtttctttctggctag

SEQ ID NO: 131847 - DNA, 1530 bp, synthetic construct
  misc_feature 1..1530: note = Description of Artificial Sequence: Synthetic coding sequence
  source 1..1530: mol_type = other DNA
atgagcatgggggcgcctcgcagtctcctcttggcactcgctgcgggtctggccgtagcacgacctcccaatattgtgcttatttttgcagacgatctggggtatggcgatcttgggtgttatggccatccctcctctacaactcctaatctcgaccagttggccgccgggggactccgctttaccgacttttacgtgcccgtttcactttgcacacccagtcgtgctgcactcctgactggccggctgcctgttcggatgggcatgtaccccggcgtcctggttccgagtagtcgaggaggactgccgctggaagaggtcacagttgctgaagtactggccgctaggggataccttactgggatggcgggtaagtggcatctgggcgtggggcccgagggagccttcctccccccacatcagggattccatcgcttccttggaatcccgtactctcacgaccagggaccatgtcagaaccttacatgctttccaccagctaccccctgtgacggaggatgcgatcaggggctggtccctattcctctgcttgccaacctgagcgtggaggcgcaacctccctggttgccaggcctggaggcgcggtacatggcatttgctcatgaccttatggcagacgcccagagacaggatcggcctttcttcctgtattatgcatctcaccacacgcattacccacaatttagcggccaatccttcgccgaacgaagcggccgaggaccgtttggcgacagtttaatggagcttgacgctgctgtgggcactctcatgacagcaataggggacttaggattgctggaggagacactcgttattttcaccgcagacaatggcccggagacaatgcgaatgtcccggggcggatgcagcggactcctgcgatgtggaaagggtacaacttatgaaggtggagtacgcgaacctgccttagctttctggcctggacacatcgctccaggagtgacacatgaactcgcctcatctctggacctgctgcctactctcgcggccttggccggcgcccctttgccaaatgtgaccctggatggctttgaccttagtcccctgctgctgggcactggcaagtcgcccagacagagtttattcttctacccctcctatcctgatgaggtgagaggcgtgtttgccgttcggacgggaaaatacaaagcccacttcttcactcaaggttctgcacatagcgacactaccgccgaccctgcatgccatgccagcagctctctgactgcgcacgaaccccctctgctgtacgatctgtcaaaagatcctggcgagaactataatttattgggaggcgtcgctggagctactccagaagtgttacaggcgctgaagcagctgcagctgctcaaggctcagttggacgccgcagtcacattcgggccatctcaggtggcgcgcggcgaggatccagccctgcagatatgctgccatcccgggtgcactcctaggcctgcctgttgccactgtccggatccccacgcctag

SEQ ID NO: 131848 - DNA, 600 bp, synthetic construct
  misc_feature 1..600: note = Description of Artificial Sequence: Synthetic coding sequence
  source 1..600: mol_type = other DNA
atggccaagtcagccgaggtgaagctggcaatcttcggcagggccggagtcggaaaatctgctctggtggtgcggttcctcactaagaggttcatttgggaatacgatcccacactggaaagtacctacagacatcaggcaaccatcgatgatgaagtcgtctctatggaaatcttggataccgccggtcaagaagataccatccaacgggaaggccatatgcgttggggagaaggcttcgtgttggtctatgatatcactgaccgcgggtcctttgaggaggtgctacctctgaaaaacatcttggacgaaattaaaaaacccaagaatgtaaccttaatcttggtggggaacaaggccgaccttgaccactcaagacaggtctcaacggaagaaggggaaaagctggccactgaactggcgtgcgcattttacgaatgctcggcgtgtaccggcgagggaaatataaccgagattttctacgagttgtgtcgtgaggttcgccgcagacgtatggttcagggcaaaacgcgccggagatcctctaccactcatgtgaagcaggcaattaataagatgctgacgaagattagttcctag

SEQ ID NO: 131849 - DNA, 120 bp, synthetic construct
  misc_feature 1..120: note = Description of Artificial Sequence: Synthetic coding sequence
  source 1..120: mol_type = other DNA
atggccaaaagtgcagaagtcaaactcgctatcttcggacgggccggagtggggaaatcagccttggtggtcaggtttttgaccaaaaggttcatatgggagtatgatcccacgctgtag

SEQ ID NO: 131850 - DNA, 600 bp, synthetic construct
  misc_feature 1..600: note = Description of Artificial Sequence: Synthetic coding sequence
  source 1..600: mol_type = other DNA
atggctaaatccgcagaggtaaagttagcgatcttcggacgagccggcgtcggaaaatctgccctcgttgttcgctttctgactaaacgatttatctgggaatatgaccccaccttagagtctacttaccgacaccaagcgacaattgatgatgaggtcgtgtcaatggaaattctcgataccgcagggcaagaggacacaatccaaagggagggccatatgaggtggggcgagggttttgtgttagtttatgatatcaccgacagaggctcattcgaggaggttcttccactcaaaaacatcttggatgagatcaagaaacccaagaacgtgacactgatcttagtcggtaacaaggccgatctggaccacagccggcaggtctccaccgaggagggtgagaaactggccacagagctggcttgcgccttctatgagtgctctgcttgtactggggagggaaatatcacggagatcttctacgagctttgcagagaagtgagacggcgccggatggtacaagggaaaacacgccgtcggagtagtacgacccacgtcaagcaagcaattaacaagatgctcacaaagatcagttcttag

SEQ ID NO: 131851 - DNA, 600 bp, synthetic construct
  misc_feature 1..600: note = Description of Artificial Sequence: Synthetic coding sequence
  source 1..600: mol_type = other DNA
atggccaagagcgcagaggtgaagttagctatatttgggagagccggtgtgggcaagtctgccctggtggtccgcttcctgacaaagagatttatttgggagtatgatcccacactggagtcgacgtatcggcaccaggcgacaatcgatgacgaagtcgtgtcaatggagattctcgataccgccggccaggaggacacgattcaacgggaggggcacatgcggtggggcgaaggatttgtgcttgtgtatgatatcacagataggggcagttttgaggaggtgttaccgctcaagaatattttggatgaaatcaagaaaccaaagaacgttacactaattctcgtgggaaataaagccgatttagaccactcccgtcaggtgagtactgaggagggcgaaaagctggctactgaactggcctgtgcattttatgaatgcagtgcctgcacaggggagggcaacattacggagatcttctacgagttgtgccgggaggtccggcgacgaaggatggtccaggggaaaacacggcgccgaagctccacaacgcacgtcaagcaggctatcaacaagatgcttacaaagatcagttcttag

SEQ ID NO: 131852 - DNA, 543 bp, synthetic construct
  misc_feature 1..543: note = Description of Artificial Sequence: Synthetic coding sequence
  source 1..543: mol_type = other DNA
atggcaaaatccgcagaggtgaaattggccatatttggccgcgcaggtgtcggcaaaagcgagtccacctataggcatcaagctaccattgacgatgaagtcgtttctatggagattctagacacagcaggtcaggaggacactatccagcgggaaggacatatgagatggggtgagggctttgtcctcgtgtatgacataacggaccggggaagctttgaggaggtgcttccgcttaagaacatcctcgatgagattaagaagcccaagaatgtcacattaatcctcgttggtaataaagccgacctggatcacagtcgccaagtcagtacagaggagggggagaagctggctaccgagctcgcctgtgcattttatgagtgctctgcctgtactggagagggcaatataacggaaatcttctacgagctctgcagagaagtgcggagaagacgtatggtgcagggaaagactcgcagacgatcttccactactcacgtcaagcaggcaatcaacaagatgctgacaaagattagcagctag

SEQ ID NO: 131853 - DNA, 612 bp, synthetic construct
  misc_feature 1..612: note = Description of Artificial Sequence: Synthetic coding sequence
  source 1..612: mol_type = other DNA
atggtgagtacctatcgcgtcgccgtgctgggagccaggggagtcgggaagtcagccattgtgcgtcaattcctgtataacgagttttcagaggtgtgtgtgcccaccacagcaaggagactatatctacccgcggtggtcatgaatggacacgttcatgacttgcagatcctggatttcccccctatctctgcattcccagttaatacccttcaggaatgggctgatacatgctgtcgcggtcttcgatccgtgcatgcctacatattagtatacgatatttgctgctttgactcctttgaatatgtgaagaccattagacaacagatcctagagacacgggtgattggcacaagcgagacccccatcatcatcgtagggaataaacgtgatttgcagcgaggacgtgtgatcccccggtggaacgtatcacatttggtgcgcaaaacatggaaatgcgggtacgtggaatgtagcgccaaatataactggcatatcctcttgttgttttccgagctgttaaaatccgtgggatgcgccaggtgtaaacatgtacatgcagccttgcgctttcagggggccttgaggaggaaccggtgtgctattatgtag

SEQ ID NO: 131854 - DNA, 729 bp, synthetic construct
  misc_feature 1..729: note = Description of Artificial Sequence: Synthetic coding sequence
  source 1..729: mol_type = other DNA
atgcgccctctgtccatgagcgggcacttcctactggcccctatccctgaatcaagcagcgattatctgctgccaaaagatatcaaactggccgtgcttggcgcaggacgggtggggaaaagcgcaatgatcgttaggtttctgactaagaggttcatcggtgattacgaacccaacactggcaagctgtactctaggctggtttatgtggaaggagaccagctgagcttgcagattcaggacacgccagggggcgttcagatccaggacagcttgccacaggtcgtcgacagcctgtccaaatgcgttcaatgggccgaaggttttttgttggtttacagtattacagactacgactcgtacctgtcaatcagacccctataccagcacattaggaaagtacacccagattctaaagcccccgtcattattgtcggcaataaaggtgacctgttacacgctcgtcaggtccagacacaggacggcattcagctagccaatgaattgggctcactgtttttggaaattagcacaagtgaaaactacgaagacgtgtgcgacgtattccaacacctgtgcaaagaagtatctaagatgcatggattgagcggcgaacggcgcagagcttcgatcataccccggccacggtcaccaaatatgcaggacctcaagagacgatttaaacaggctctaagccctaaggtcaaagccccaagcgcactcggctag

SEQ ID NO: 131855 - DNA, 747 bp, synthetic construct
  misc_feature 1..747: note = Description of Artificial Sequence: Synthetic coding sequence
  source 1..747: mol_type = other DNA
atgcggctgatccagaacatgtgtaccatagctgaatatcccgcccccggcaacgccgccgccagtgattgctgcgtgggcgcggccggtcgcagactggttaaaatcgctgtcgtgggcgcctccggtgtgggaaaaactgccctggtggttaggtttctcactaaaagatttatcggcgactacgagcggaacgcaggaaacctgtacacaagacaagttcagatcgaaggtgagactctcgctctgcaagtgcaggatacgccagggatacaggtgcacgagaattcactcagctgtagtgaacaactgaatcgttgcattcggtgggcagatgctgtggtgatagtctttagcataacggactataagagttacgagttaatctcgcagctgcaccagcatgttcagcagctccatctgggcacccggctcccagtggtggtggttgccaataaggccgatctactgcacataaagcaggtggaccctcaactgggactgcagctggcatcaatgctcggctgcagcttctatgaggtatccgtctcagagaattacaacgatgtgtattccgccttccatgttctgtgcaaggaggtgagccataaacagcagccaagctccacacccgagaaacggaggacgtctctgatacctcgccctaagtccccgaacatgcaggacttgaaaagaagatttaagcaggccttgtccgccaaagtccggacagtgacctccgtctag

SEQ ID NO: 131856 - DNA, 927 bp, synthetic construct
  misc_feature 1..927: note = Description of Artificial Sequence: Synthetic coding sequence
  source 1..927: mol_type = other DNA
atgactctgaatgggggcgggtctggagctggtggatcccgaggtggaggacaggagagggaacgacgccgcgggtcaacaccatggggacctgcccccccgctgcaccggaggtcaatgccagtggacgagcgagatctgcaggccgctttgacaccgggcgccctcacagccgcggccgcaggcacggggacccaaggacctagattggactggcccgaagattccgaagatagcctgtcttctggaggcagcgactccgatgaatcagtgtataaagtccttctgctcggcgcccctggtgtcggcaaaagcgcccttgcaaggatctttggaggggtggaggacggccctgaggccgaggctgccgggcatacatacgatcgttctatcgttgttgatggcgaggaagcatccctgatggtgtatgatatatgggagcaagacggcgggcggtggttgccaggccattgtatggccatgggcgacgcgtacgtaattgtctattccgtcacagataagggaagcttcgaaaaggcgtcagagcttcgtgtgcagctacgacgggccaggcagactgacgacgtacctatcatcctggtggggaataaatcagatctggtccggagtagggaggttagcgttgacgaggggagagcgtgcgccgtcgtatttgactgtaagttcatcgaaacttccgctgcattgcatcataatgttcaggccctgttcgagggcgtggttcggcagatacggctgaggcgggactcaaaggaagcaaatgctcgaagacaggcaggtacacgccggcgtgagagccttgggaagaaggcaaagaggtttctggggagaattgtcgccaggaattccagaaagatggcctttagagccaagagcaaaagctgtcatgacctgagcgtgttatag

SEQ ID NO: 131857 - DNA, 927 bp, synthetic construct
  misc_feature 1..927: note = Description of Artificial Sequence: Synthetic coding sequence
  source 1..927: mol_type = other DNA
atgacactgaatggcggaggttctggtgctgggggctcgcgaggcggcggtcaggagcgggaaaggagaagaggcagcacaccctggggtccagcaccgcccttacaccggaggtctatgcccgtggatgagagggacctacaggccgcgttaacaccgggagcattgaccgctgccgcagcagggaccggaacccaaggtccccgactggattggcccgaagattcagaggactctctatcaagtggcggctcagattctgatgaaagtgtgtacaaggtgctgctgctcggcgcacccggcgtcggcaagagcgcactggcccggattttcggcggcgtcgaggatgggcctgaggctgaagcagccggccacacctatgaccggtctattgtggttgacggcgaagaggcatctcttatggtctatgatatctgggaacaggatggcggcaggtggctgccaggacactgcatggctatgggggatgcctatgtaattgtttactcggttacagacaagggttcttttgagaaagccagcgagcttagggtacagctcaggagagccaggcagacagacgatgtcccaatcatactcgtaggaaacaaatccgacctcgtaagaagcagagaagtgagcgtggacgagggacgcgcctgtgcagtcgtgtttgactgcaagttcattgagacgtcagctgcgcttcatcacaatgtccaggccctgtttgagggcgtcgttagacagatccgcctgcgacgggactccaaggaggctaacgcacgaaggcaggctggtacacggcgcagagaatctctggggaaaaaagcaaagcgattcctgggccgcatagtggcgagaaattcacgtaagatggcctttcgagcaaagtcaaagagctgccatgatctttccgtgttgtag

SEQ ID NO: 131858 - DNA, 579 bp, synthetic construct
  misc_feature 1..579: note = Description of Artificial Sequence: Synthetic coding sequence
  source 1..579: mol_type = other DNA
atgcaggcaattaagtgcgttgtcgtcggcgacggggccgtgggcaagacatgcctgctgatcagttatacaacaaacgccttccctggggagtacattccgacggtcttcgataactactccgctaacgttatggtggacggaaagccggtgaacctagggctctgggacacagcagggcaggaagactacgacaggctgcgaccattgtcctacccacagacggatgtatttcttatctgcttttctttggtgtctcctgccagctttgaaaacgtcagagctaaatggtatcccgaagttagacaccactgtccacacacccccattctgcttgttgggactaagctggacttgcgagacgataaggatacgatagaacgtctacgcgataagaagttggcacctataacctatccgcagggcttggctatggcaagagaaataggctccgtcaagtatctggaatgctcagcactgacacagcgagggctgaagacagtgtttgatgaagccattagggccgtgctttgccccccccctgttaagaaaccaggaaagaagtgcacagttttctag

SEQ ID NO: 131859 - DNA, 942 bp, synthetic construct
  misc_feature 1..942: note = Description of Artificial Sequence: Synthetic coding sequence
  source 1..942: mol_type = other DNA
atgcctaacactgctatgaagaagaaagtgttattaatgggcaagtcagggagcgggaagactagcatgagaagcataatttttgcgaactacatagccagggacacacggaggcttggagccactatcgacgttgagcactcccatgtgcgctttctggggaacctcgtacttaatctctgggattgcggtggacaagatacctttatggagaattattttacctcgcagcgcgataatattttccggaacgtggaagttctgatctacgtgtttgacgtagaaagtcgggagctggagaaggacatgcactattatcagagctgcctggaggcaattctccagaactccccagatgctaagatcttttgtctcgtgcacaaaatggatttggtgcaagaagaccagagggatttgattttcaaggagcgcgaagaggacctgaggcgcttaagcagacccctggagtgcgcgtgttttcggacctccatttgggacgagactctttacaaagcctggagctccattgtgtatcagttgattcccaacgtgcagcagctggaaatgaatctccgaaacttcgctcagattatcgaagccgatgaggttcttctgttcgaaagggccaccttcctggtgatctcccactaccagtgtaaggaacagcgagacgtgcaccgcttcgaaaagatctcaaatatcatcaaacagtttaagctgtcctgcagtaaactcgcagccagtttccaatctatggaggtccggaattcaaacttcgctgcgttcatcgacatctttacgtccaatacttacgtcatggtagttatgtccgatccctcaatcccctccgcggcaacccttatcaacattcgcaatgccaggaaacactttgagaagctagaaagagtggatggacccaagcacagcctgttaatgagatag

SEQ ID NO: 131860 - DNA, 1125 bp, synthetic construct
  misc_feature 1..1125: note = Description of Artificial Sequence: Synthetic coding sequence
  source 1..1125: mol_type = other DNA
atggaagaatcagatagtgaaaaaacaacggaaaaggagaatctgggtcctagaatggatccccccttgggagaaccagaggggagccttggctgggttttgcccaataccgcaatgaagaaaaaggtcctgctaatgggcaaaagcggctctggtaagaccagcatgcgctcaattatatttgctaactacatcgcacgcgacacaaggaggttgggtgccacaatcctcgaccgcattcattccctgcagataaacagtagcctatccacttatagcctggtcgactctgtggggaacactaaaacttttgatgtcgagcactcgcacgtccgattccttgggaacctcgtcctgaatctatgggattgcggcggtcaggacaccttcatggagaactatttcacatcccagcgtgacaatatatttcgcaatgtggaggtccttatttatgtctttgatgtggagagtagagagctggagaaagatatgcattactaccagtcctgcttggaggctatcctgcagaactctccagacgccaagattttctgcctggtgcacaagatggatctggtccaggaagaccaaagagaccttatatttaaagagagagaagaggacttacgtagactgtctagacctctggaatgctcctgtttccgtacatcgatctgggacgaaaccctttacaaggcttggagtagcatcgtgtatcaattaattcctaacgtgcagcagctcgagatgaacctccgcaatttcgctgagatcatcgaggccgacgaggtgttgctgttcgaaagagctacattccttgttatatcccactatcagtgtaaggaacagagggatgcccacaggttcgaaaagatatctaacattattaaacagttcaaactgtcctgctctaaattggctgcctcattccagtctatggaggtgaggaacagcaacttcgctgctttcattgacatctttacctcaaacacatatgtcatggtggttatgagcgatccaagcattccgtcggcagctactctgattaatatccggaatgcccgtaaacacttcgagaagctggaaagggttgacggcccaaaacagtgtttattgatgagatag

SEQ ID NO: 131861 - DNA, 1041 bp, synthetic construct
  misc_feature 1..1041: note = Description of Artificial Sequence: Synthetic coding sequence
  source 1..1041: mol_type = other DNA
atggaggaatctgattccgaaaagaccaccgagaaagagaatctaggcccaaggatggatccccccctgggagaacccgagggctctttgggatgggtgctgcctaatacagccatgaagaagaaagttctgctgatgggaaaatccggatccggcaaaactagcatgaggtcaatcatctttgctaattatattgctagagacacaagaaggctaggagctaccatcgatgttgagcactcccacgtgcgcttcctgggaaatctcgtactcaacctgtgggattgtggtggccaggatacatttatggagaactattttacttctcagcgagacaatatcttcagaaacgtagaggtgctgatctatgtgttcgacgtggagtccagggagctagagaaagatatgcattactatcaatcctgcctggaagcaatcctgcagaactcccctgacgcaaaaattttctgtttagtgcacaagatggatctggtgcaggaggaccagcgggatctcatctttaaggagcgcgaagaggatctacgccgtcttagcaggccgctggagtgctcgtgcttcagaacaagtatctgggatgagaccctctataaggcgtggtccagcatcgtttaccagctgataccaaatgtgcagcagctcgagatgaacctgcgaaactttgccgagattatagaagccgacgaggtgctgctatttgaaagagccaccttcctagttatctcacactatcagtgcaaagagcagcgggacgctcacagatttgagaaaatctccaatataattaaacagttcaagctgagctgtagtaaactcgcggcttcattccagtccatggaggtgaggaattctaatttcgccgcattcatcgacatctttacttcaaatacatacgtcatggtggtcatgagtgatccaagtatccccagcgccgctactcttataaacatccgcaatgctagaaaacacttcgagaagctcgagcgggtcgacggccccaagcagtgcttgttgatgcggtag

SEQ ID NO: 131862 - DNA, 585 bp, synthetic construct
  misc_feature 1..585: note = Description of Artificial Sequence: Synthetic coding sequence
  source 1..585: mol_type = other DNA
atgaagaaaaaggtgctgctgatggggaaatccgggtcaggtaagacctccatgcgctccattatctttgcgaattatatcgcccgggatacccgcagactgggagcaacaatcgatgtcgagcactctcacgtgcggttcctcggcaacttggtgctgaatctctgggactgtggcgggcaggacacttttatggaaaattattttacttcccagcgggataacatcttccggaacgtcgaagtgcttatatacgtgtttgatgtcgaatccagggagctcgagaaggacatgcattattatcaatcatgtctcgaagcgatccttcagaattcaccagacgctaagattttttgtctagtacacaagatggacctcgtgcaggaagaccagagggacctgattttcaaggaacgggaggaagatcttcgacgcttgagccggccactcgaatgtagctgtttcaggacatccatatgggacgagacactctacaaagcttggtcatccatcgtgtatcagctcattcctaatgtccagcagctcgagatgaatcttcggaattttgccgagatcatcgagtag

SEQ ID NO: 131863 - DNA, 1200 bp, synthetic construct
  misc_feature 1..1200: note = Description of Artificial Sequence: Synthetic coding sequence
  source 1..1200: mol_type = other DNA
atgagtctgcagtacggcgctgaagaaacgccactggctggttcgtatggtgctgctgactcatttcctaaggactttggctatggtgtggaggaagaagaggaagaggcagccgccgccggagggggcgtcggcgcaggggccggtggcggctgcggacccggaggggccgattcatctaaaccccggatcttgctcatgggcctgcgccggagcggcaagtccagtatccagaaagtggtgttccacaagatgtccccgaatgagacattattcctggagagcaccaacaagatttacaaggacgatatatctaacagttcttttgtaaatttccagatttgggatttccccggccaaatggacttttttgatcctacattcgactacgagatgatctttaggggaacaggggccctgatctatgttatcgacgcccaggatgattacatggaggcgctgacccgcttgcacatcaccgtaagtaaagcatacaaggtaaatccagacatgaattttgaggtgtttatccacaaagttgacgggttgtcagatgaccataagattgaaacacaaagagatatccaccagcgcgctaacgacgacctggcagatgcaggcctggaaaaactgcatctgtcgttttatctgacttcgatctatgaccattcgatcttcgaggctttttccaaggtggttcaaaaactgatccctcaacttccaaccctagagaacttgctgaacatcttcatctcgaattctggcatcgagaaagctttcctgtttgacgtggtgagtaaaatttatattgccaccgatagttctcctgtagatatgcagtcctatgaactctgttgtgatatgattgacgtggttattgacgtgtcatgtatatacgggctgaaggaagacggctccggcagcgcctatgataaagaatccatggctattataaagctgaacaataccacggtgctttatttaaaagaagttacaaagtttctggccctggtgtgtatcctacgcgaggagagtttcgaaagaaagggattaattgattacaattttcactgtttccgcaaggccatccatgaagtgtttgaagtgggcgtcacaagccacagatcttgtggacatcagacctctgctagttccctgaaagcactgacacataatggtactccaaggaatgcaatctag

SEQ ID NO: 131864 - DNA, 750 bp, synthetic construct
  misc_feature 1..750: note = Description of Artificial Sequence: Synthetic coding sequence
  source 1..750: mol_type = other DNA
atggaagcactcgcccggctgcatctcactgtgacacgggcctacaaagtcaacactgatatcaattttgaggtgttcatccataaagtggacggtctgagtgacgaccataaaattgaaactcagcgggacattcaccagagagccaacgatgatctggctgatgccggtctggaaaagatccacttgtccttttacctcaccagcatatacgaccactccatttttgaggctttttcaaaagtcgtccagaagctgatccctcaactgcccacattagaaaatttgctgaatatctttatctctaattcaggtattgagaaggccttcctgttcgatgtggtgtccaagatttacatcgccacggactccacgcctgtagacatgcaaacgtacgagctgtgctgcgatatgatcgatgtggtaattgatatcagttgcatctacggcctgaaggaggatggggccggcacgccatatgataaagagtccaccgctatcatcaagctgaataataccaccgttctctatcttaaggaagtgaccaagtttctggcattagtttgctttgtgagggaagaatctttcgaaagaaaaggcctgatagactataacttccattgctttaggaaagcaatacatgaggtttttgaggtgcgtatgaaggtggtgaaatctagaaaggtgcagaatcgcctccagaagaagaaacgggccacccccaacggcacacccagggtgctgttatag

SEQ ID NO: 131865 - DNA, 1203 bp, synthetic construct
  misc_feature 1..1203: note = Description of Artificial Sequence: Synthetic coding sequence
  source 1..1203: mol_type = other DNA
atgagccaggtgttgggtaaaccgcagccgcaagatgaagacgatgccgaagaagaagaggaagaagatgagttggtgggcctcgcagactatggggacggccccgacagcagcgacgccgatcccgactccggcactgaggagggcgtgctcgactttagcgatccattttccaccgaggtgaagcctagaatcctactgatgggtctccgccgcagtgggaaatcttctatccagaaggtggtttttcataagatgtcacctaacgaaaccctgtttcttgagtctactaataagatttgcagagaggacgtctcaaattctagctttgttaactttcagatctgggattttcctggtcaaatcgacttcttcgatcccacctttgattatgagatgatcttcagaggcactggagctttgattttcgttatcgattctcaggatgactacatggaggctttagcgagactccatctgaccgtgacccgcgcttataaggttaacaccgacattaactttgaggtgttcattcataaggttgacggactgagcgacgaccacaagattgaaacacaaagagatatacatcagcgcgccaacgacgacctcgcagacgcggggctggaaaagatccatctgtccttctatctcacgtccatttacgatcactccatcttcgaagccttctccaaggtagtgcaaaaactcataccccaactgccaacgctggaaaatcttttgaacatcttcataagcaattctgggatcgaaaaagcatttctgtttgacgtcgttagcaagatttatattgctacagatagcactccggtcgacatgcagacctatgaactgtgctgcgatatgatcgacgtggttatcgatatcagctgcatctacggccttaaggaagatggggccggcactccatacgacaaggagtccacagccattatcaagctgaacaataccaccgtgctgtatctgaaagaggtgaccaaattccttgccctggtctgcttcgtccgcgaagagtcattcgagagaaagggtctgatcgactataatttccattgtttccgcaaggcgattcatgaagtattcgaggtgaggatgaaggtagtaaaatcaaggaaggtgcagaaccggctccagaaaaagaagcgagccacacccaacggtacaccgagagtgctcctgtag

SEQ ID NO: 131866 - DNA, 348 bp, synthetic construct
  misc_feature 1..348: note = Description of Artificial Sequence: Synthetic coding sequence
  source 1..348: mol_type = other DNA
atgctgcgggacaccatgaagtcatggaatgatagtcaaagcgatctctgcagcacagatcaagaagaggaggaagagatgatctttggagagaatgaggatgacttggatgagatgatggacttgagcgatctcccaacttccctgtttgcttgttcagtccatgaagctgtgttcgaagcccgcgaacaaaaagaacgcaacatgaatttcacacgcgaacagtctcgccaccccgcttggtggttcatgagcgtcaaagtgaagcttaagagaaagaaacgtcagaagaccccaaatcgaaaactaccccgccgcggcgctccgaccctgcgtccacagcgctag

SEQ ID NO: 131867 - DNA, 726 bp, synthetic construct
  misc_feature 1..726: note = Description of Artificial Sequence: Synthetic coding sequence
  source 1..726: mol_type = other DNA
atgctgcgcgacacaatgaaaagctggaacgacagtcagtcggacctgtgctctactgatcaggaggaggaggaggaaatgatcttcggcgagaacgaagatgacctcgatgagatgatggatctgtctgatctccccacctccctgtttgcttgctctgtgcacgaagcggttttcgaggcaagggagcagaaggaaaggtttgaagcgctttttaccatctatgacgaccaggtgacattccagctcttcaagagctttaggcgtgttaggatcaacttctcaaaaccagaggccgccgcccgtgccaggattgagctgcacgagactgacttcaatgggcaaaaattgaagctgtattttgcccaggtgcaaatgtccggagaagttcgtgacaagtcgtatctcctgcctccacaaccagtgaagcagttcctgatctccccacccgcttcaccgcccgtcggttggaaacagtccgaggatgcgatgcctgtgattaattacgacctgctgtgtgcagtttctaaactcggacctggggaaaaatacgaattacacgccggtacagagtctacaccttcagtagtggttcacgtgtgtgaatcagagacagaagaggaggaagagacaaagaatccgaaacagaagatcgcacagaccagacggccagacccgccaaccgctgcccttaatgagccgcaaaccttcgactgcgccctgtag

SEQ ID NO: 131868 - DNA, 522 bp, synthetic construct
  misc_feature 1..522: note = Description of Artificial Sequence: Synthetic coding sequence
  source 1..522: mol_type = other DNA
atgctgagagacacaatgaagagctggaatgacagccagtctgacttgtgcagtacagatcaggaggaagaagaagagatgatcttcggcgagaacgaagacgatctggatgaaatgatggacttgagcgacctgccaacgtcactgttcgcctgctccgtgcatgaggccgttttcgaagcacgcgaacagaaggagagatttgaagcactcttcacaatctatgacgaccaggtgacgtttcaactcttcaagtctttcaggagggtcagaatcaatttctccaagccagaagcagcagctcgggctagaatcgagctccatgagacagatttcaatgggcagaaactgaaactttatttcgctcaggagcgaaatatgaactttaccagggaacagtcgaggcaccccgcctggtggtttatgtccgtcaaggtcaagcttaaacggaagaaacgccagaagaccccaaaccgcaagctgcctcgtcgcggtgcaccaacccttagacctcagcgctag

SEQ ID NO: 131869 - DNA, 198 bp, synthetic construct
  misc_feature 1..198: note = Description of Artificial Sequence: Synthetic coding sequence
  source 1..198: mol_type = other DNA
atgctcagagacactatgaaaagctggaatgacagccagtcagatctgtgttccactgaccaggaggaggaagaggagatgatttttggagaaaacgaagacgatctcgatgagatgatggacctcagtgaccttcccacgtctttgttcgcatgctcagtccacgaagctgtgttcgaggcccgtgaacagaaatag

SEQ ID NO: 131870 - DNA, 696 bp, synthetic construct
  misc_feature 1..696: note = Description of Artificial Sequence: Synthetic coding sequence
  source 1..696: mol_type = other DNA
atgttgcgggataccatgaaaagctggaacgacagccagtccgacctctgctctaccgatcaggaagaagaagaggagatgatatttggagagaacgaagacgatctggacgagatgatggatctttcggatctgcctaccagcctgttcgcttgttcagtgcatgaggcagtctttgaggcccgcgagcagaaggaacgcttcgaggctctctttactatttacgacgaccaggtcactttccaacttttcaaatcgtttagacgcgtccgtattaatttttcgaagccggaggctgcagcacgcgccagaatcgagttgcacgaaactgactttaatggccaaaaattgaagctgtatttcgcccagtcatatctcctgcccccacagcctgtaaagcagttcctgatcagccctccagcaagcccccccgtggggtggaaacagtctgaggacgccatgcccgtgatcaattatgatttgttatgcgctgtgtcgaaactgggccccggtgagaagtacgaacttcatgctgggactgaatccactccaagtgtcgtggttcacgtctgcgagagtgagaccgaagaggaggaggaaacaaaaaacccaaaacagaaaatagctcagacacgacgtcctgacccacccactgcagctctaaatgaacctcaaacgttcgattgcgctctgtag

SEQ ID NO: 131871 - DNA, 552 bp, synthetic construct
  misc_feature 1..552: note = Description of Artificial Sequence: Synthetic coding sequence
  source 1..552: mol_type = other DNA
atgctgcgagacactatgaagtcctggaatgattcacagtctgatctgtgtagcaccgatcaggaagaagaagaggaaatgatattcggggagaatgaggatgatcttgacgaaatgatggacttgtctgacctccccactagcctctttgcctgctccgttcatgaggcagttttcgaggctagggagcaaaaggtccagatgtctggggaagttagggataagagctatctccttccaccacaaccggttaaacagtttctgattagccctccagcgagtcctccggtgggctggaaacagtctgaggatgcaatgcccgtaatcaactatgatctcctgtgtgccgtttccaaattgggcccaggtgaaaagtacgaattgcatgcaggcactgaaagtacgccgtcagtggttgtccacgtgtgtgagtccgaaacagaagaagaggaggaaaccaagaatcccaagcagaaaatagcccaaaccagacggcctgatccacctactgccgctctgaacgagcctcagaccttcgactgcgccctgtag

SEQ ID NO: 131872 - DNA, 900 bp, synthetic construct
  misc_feature 1..900: note = Description of Artificial Sequence: Synthetic coding sequence
  source 1..900: mol_type = other DNA
atgcactctctggccaccgctgcccctgtccccaccacgctggctcaggttgaccgcgagaagatttatcagtggatcaatgagctgtcgagtcccgaaacccgggagaatgcattgctcgaattgtccaaaaaacgggaatccgtgccagatcttgctcccatgctgtggcattcgttcggcactatagccgcccttcttcaggaaatcgtgaacatttaccctagcattaatccccccaccctcaccgcccaccagtcgaaccgggtgtgcaacgccttggcattgctgcagtgtgtcgcctctcatccggagaccagatccgccttcctggccgcgcacatccctctgttcctgtatccattccttcacacagtaagcaagacaagaccttttgaatacctgcggttaacatctctgggcgttatcggggcactcgtgaaaactgatgagcaagaggttatcaactttctgctgaccactgaaatcattcccctgtgtcttcgtatcatggaatctggatccgagctcagcaagaccgtagccactttcatcctgcaaaaaattctgctggacgatactggcctcgcctacatatgtcaaacttacgagaggttttcccacgttgccatgattttaggcaagatggtgttgcagttaagcaaggagccaagcgctaggcttctgaagcacgtcgtgcggtgttatcttagattatcagacaaccccagagcccgagaagcactgcgtcagtgcttacccgaccaacttaaggatactacattcgcccaagtgctcaaagacgataccaccacgaaacggtggttagcacagctggtcaagaatcttcaggaaggccaggttaccgacccccggggcatcccgctccccccccagtag

SEQ ID NO: 131873 - DNA, 996 bp, synthetic construct
  misc_feature 1..996: note = Description of Artificial Sequence: Synthetic coding sequence
  source 1..996: mol_type = other DNA
atgcattcattggccaccgccgctccagtgccaacgacgttagcccaggttgatagagagaaaatttatcagtggataaacgagctgtccagccctgaaacacgcgagaatgcacttcttgagctcagtaaaaaacgggaatccgtaccagaccttgcacctatgctttggcatagtttcggcactatagctgcgctacttcaggagatagtcaacatctaccctagcattaaccctcccaccctgactgcacaccagagcaatcgtgtatgtaacgctctggcacttctgcagtgcgtggcttcacaccctgagactcgtagcgccttcctggcggcccatattccgctatttctctatccctttcttcataccgtctcgaagactagaccttttgagtatctgagactaacctccttgggcgtgatcgtggaaacgggttttcaccatgtgggccaagccgacctcgagctgcctactagctcagatctccccgctagtgccagccagagcgccggaattaccggggccctggtgaaaacagacgaacaagaggtgatcaactttctgctgacaacagaaattattcccttatgcctgaggataatggagtccggttctgagctcagcaaaactgtcgcaaccttcatcctacagaagattcttctggacgacacggggcttgcatatatttgccagacatacgagcggttttcgcatgttgcaatgatattgggcaagatggtgctccagctgtctaaggagccatcagcccgactgctgaaacacgtggtgcgctgttacttaagactcagcgataaccccagggcccgggaggcgctgaggcagtgtcttccggaccagcttaaggacaccacattcgcccaagtcctcaaagacgataccacaacaaagcgctggttagcccaactcgtgaagaacctccaggaaggccaagtcaccgatcccagaggcatacccctgccgccacaatag

SEQ ID NO: 131874 - DNA, 900 bp, synthetic construct
  misc_feature 1..900: note = Description of Artificial Sequence: Synthetic coding sequence
  source 1..900: mol_type = other DNA
atgcactccctggctacggccgcccctgttccaaccaccctagcacaagtcgatagagaaaagatttaccagtggatcaacgagctgtcttcccccgagacacgggagaacgctcttttggagctgtcgaagaagcgcgagagtgtgcccgatctagccccaatgctgtggcactcgttcggtactattgcagcgctccttcaggaaatcgtgaatatctatccttccatcaatccacctaccctgacagcacaccagagtaacagagtgtgtaatgctctggcgctgctccagtgcgtcgccagccacccagaaactcggagcgcctttctggcagcacatattccacttttcctctatccttttttgcacacagtcagcaaaactcgaccttttgagtacctgagactgacctccctcggtgtaataggtgcgctcgtaaagacagacgaacaagaggtcataaacttcttactgaccactgagattatccctttgtgcctccgcatcatggaaagtggctctgaacttagtaagaccgtcgcaacttttatcttgcagaagattttactggatgatactggcctcgcgtacatttgtcaaacctacgaacggtttagccacgtggccatgattctcggtaaaatggtgctgcagctctctaaggaaccaagtgccaggctcctgaagcacgtggttcgctgctatcttaggctctccgataacccacgtgcacgcgaggcattgcgacaatgtctacccgatcagcttaaagatacaacatttgcccaggtgctgaaggacgatacaaccacaaagcgctggctcgcacagctcgtgaagaatctgcaggaaggtcaagttacagatcctcgggggatcccacttcctccacaatag

SEQ ID NO: 131875 - DNA, 777 bp, synthetic construct
  misc_feature 1..777: note = Description of Artificial Sequence: Synthetic coding sequence
  source 1..777: mol_type = other DNA
atgcactcgctggccaccgccgccccggttcctaccacactggcccaggtggaccgggaaaaaatctatcagtggataaacgagctgtcctctcctgaaaccagggagaacgcgttgctggaactttccaagaagcgggagtctgtgcctgacttggctccgatgttatggcactcatttggtaccatcgcggcgttgctgcaggagattgtaaatatctacccttctataaaccctccgacccttactgcgcaccagagtaatagagtgtgtaatgcgctggctctactccagtgtgtggcaagccatcctgagactcggtcagccttccttgcagcacacatcccattattcctgtacccttttctgcacacagtttctaaaacgcgaccgtttgaatacttgagacttacaagcctgggagtgattggtgcactggttaaaacggacgaacaggaagtaatcaacttcctccttaccactgagatcattcctttatgcttacgcattatggagtcagggagcgagctaagcaaaacggttgccaccttcatcctgcaaaaaattttgctggatgacaccgggctggcatatatctgtcagacctacgagcggttctcccacgtggcaatgatcctgggcaaaatggtgctgcagctgtcaaaggaaccatctgcgagactgctcaagcacgtcgtacggtgctatctgcggctctctgacaaccctaggttttcggatctcaccttctgctggagttcgttccaaagaaaatag

SEQ ID NO: 131876 - DNA, 990 bp, synthetic construct
  misc_feature 1..990: note = Description of Artificial Sequence: Synthetic coding sequence
  source 1..990: mol_type = other DNA
atggccgccctgggaggagacggactgcggctgctgagcgtgagtcgcccagagagacctcctgagagtgccgccctggggggcctgggccccggcctctgctgctgggtatctgtgttctcctgcctttcattggcctgttcatacgtcggatctttgtatgtctggaaaagcgagctgccacgggaccacccagctgttattaagagaaggtttacttccgtgttagtcgtgagtagtttgagccccctctgtgtactcctgtggagagagctgacaggaatacagccaggcaccagtttattgactctcatgggtttcagacttgaaggcatctttccagccgccctgttgcccctgcttctaactatgatattatttctcggccccttgatgcagctgtccatggactgcccttgtgatctcgccgacggcctgaaagtggtcctagcgccgagaagttgggccagatgcctgactgatatgcggtggttgcgtaatcaggtgatcgcacctctgactgaggaattggtcttcagggcatgcatgctacctatgctggctccctgcatgggcctcggtccagccgtattcacgtgccccctgttctttggcgtcgcccattttcaccacatcatcgagcagctgcggttccggcagtcgtctgtgggcaacatctttctgtctgccgcgttccaattcagctatactgccgtgttcggggcatacacagctttcctcttcatccgcacagggcatctgatcggccctgtgttgtgtcactctttctgcaattacatgggattcccagccgtgtgcgccgcactggaacatcctcaacggagaccgctcctggccggctatgccctgggagtcggattgtttcttctgcttctgcaacctctcactgatccaaaactgtacggcagcctgccactgtgcgttctgctggagagggcaggagatagtgaggctcctctgtgcagctag

SEQ ID NO: 131877 - DNA, 927 bp, synthetic construct
  misc_feature 1..927: note = Description of Artificial Sequence: Synthetic coding sequence
  source 1..927: mol_type = other DNA
atggcggccctgggtggggatggtctcaggctgctgtctgtctctcggccggagaggcccccagagtcagctgccctgggtggccttggacccggcctatgttgttgggtgtctgtgttttcgtgcctctcactggcatgctcgtatgtgggaagcctgtatgtgtggaagagcgagctcccgcgcgatcatcccgcagtcattaaaaggaggtttacctccgtgctggttgtctcctctctgtctcctctgtgcgtgctgttgtggcgagaacttacgggaatccagcctgggacttcgttgctgactctcatgggattccggctcgagggaatattccctgcggctttattgcctcttcttctcacaatgatcctcttcctgggccccctgatgcaactgagcatggattgtccttgtgatctggccgatggcctcaaagtcgttctggcccctcgtagctgggccagatgtctgacagacatgcgctggctccgcaaccaagtgatcgccccactgacggaggagctggttttccgcgcctgcatgcttccaatgctggctccttgcatgggcttgggtcctgctgtgttcacctgtccgttattctttggcgtcgcccattttcaccatatcatagaacaactgcggtttaggcagtcgtcggtcgggaacatattccttagtgctggtcacctgatcggaccagtactttgccactctttctgcaactacatgggcttcccagcggtctgcgccgcacttgaacaccctcagaggcgacccctccttgcaggttacgctctcggtgtggggttattcctgctgcttctgcagcctctgaccgacccaaagctgtacgggtcactgcccttatgcgtgctattagagcgggctggagactccgaagcgcccctgtgctcatag

SEQ ID NO: 131878 - DNA, 1164 bp, synthetic construct
  misc_feature 1..1164: note = Description of Artificial Sequence: Synthetic coding sequence
  source 1..1164: mol_type = other DNA
atggtgccgaaaggcgccacaatgctggtcattccaccagggctgtccgaggaagaagaagcactccagaaaaaatttaataaactcaaaaagaaaaagaaggcacttttagctttgaaaaaacagagctcaagctcaacaaccagccagggcggtgtaaagagatccttgtctgaacagcctgtgatggacactgccaccgctactgagcaagccaagcaattggtgaagagtggggcgataagtgcaattaaagccgaaacaaaaaattctggctttaaacggagcagaaccttggaaggcaaactgaaggaccccgaaaagggaccggtacctacctttcagccatttcaaagatcaatctctgctgacgatgatctgcaggagtcctccaggagacctcaacgtaaatccttgtatgagagctttgtttccagttcagaccggctccgcgaacttggaccagacggcgaggaagcggagggaccgggggctggggacggcccccctaggtcgttcgattggggttacgaagagaggagtggcgcacacagctctgccagtcccccgaggtcaaggtctcgggacaggagtcacgagagaaatcgggatcgggaccgggatagggagagggacagagaccgcgaccgagacagggaccgggaaagggatagagatcgcgatagggacagggatagagatagagagagggatagagacagggaacgcgatagggaccgggaccgagaaggtcccttcagacggtccgattcattcccagaacgaagggcgcctaggaaaggaaataccttgtacgtatacggagaagatatgacacctacattgctccggggagcattcagtcctttcgggaacatcatcgatctgtcaatggacccacctaggaactgcgcatttgtcacgtacgagaaaatggagtcggcagatcaggctgtggcagaactcaacggaacccaggttgagtctgtccaactgaaggtgaatattgcacgcaagcagcctatgctagacgccgccacggggaagagcgtttggggatcgctggcagttcagaacagtccaaagggatgccaccgggacaaacgtacgcagatcgtttattcagacgacgtgtacaaagaaaatcttgtggatgggttttag

SEQ ID NO: 131879 - DNA, 1143 bp, synthetic construct
  misc_feature 1..1143: note = Description of Artificial Sequence: Synthetic coding sequence
  source 1..1143: mol_type = other DNA
atgcttgtaataccgccaggcttgagcgaggaggaggaggcactgcagaagaaattcaacaaactcaaaaaaaaaaaaaaagctctcttggctctgaagaagcagtcatcttctagcacaaccagccagggtggggtcaaacggagcctgtccgagcaaccagtgatggatacagcaaccgctactgaacaagctaaacagctggttaagtctggggctatttcagccattaaggccgagactaaaaattccggcttcaaaagatcacgcacgctcgagggcaagctcaaggacccagagaagggcccagtccctaccttccaaccttttcaacgctctattagtgctgatgacgacctgcaagagtctagtaggaggccacaacgaaagagcctctatgagagctttgtttcctcttctgaccgtctgcgagagctaggccccgacggggaggaagccgagggaccaggggccggcgacgggccgccaaggtcctttgattggggctacgaagagagatctggcgctcattctagcgcctcgcctccacgaagccggtcaagggataggagtcatgagaggaatcgcgatcgtgaccgtgacagggagcgagaccgagatcgggatagggatcgggaccgcgaacgagatagggatcgggatagagacagagatcgagaccgagaaagagatagggacagagagcgggacagagaccgcgaccgcgagggtcctttccgcaggtcagattcttttccagagcgtagagcccccaggaagggaaacacgctgtatgtttatggggaggacatgacccccacccttctcagaggagctttctcccctttcggaaacatcatcgatttgtcaatggacccaccccgaaattgtgcatttgtgacctatgagaagatggaaagtgcggaccaggcggtggccgagctgaatggcacgcaggtggagagcgttcagctgaaagtgaatattgcaagaaagcaaccgatgctggatgcagcgactggcaagtccgtctggggctctctagcggtgcagaattcgcccaaaggatgtcaccgcgacaaaagaactcagattgtatatagcgacgacgtctataaagagaacctggtggatggcttttag

SEQ ID NO: 131880 - DNA, 1143 bp, synthetic construct
  misc_feature 1..1143: note = Description of Artificial Sequence: Synthetic coding sequence
  source 1..1143: mol_type = other DNA
atgcttgtgattcctcctggtctgagtgaggaagaagaggccctgcaaaaaaaattcaacaagctcaagaaaaagaaaaaagccctcctggcattgaaaaaacaaagcagcagctcaactacgagccaagggggcgtgaagcgtagtttatcagaacagcctgtgatggacacagccaccgccaccgagcaagctaagcaactagtgaaatccggggcaatctccgctattaaggcggaaacaaaaaacagcgggtttaagcggtcccggaccctggaagggaaactcaaagatcctgaaaagggcccagtccccacgttccagccattccaacgctcgatcagcgcggacgatgacctccaggagagttccagacgaccccagcgcaaaagtttgtacgagagcttcgtttcttcgagtgaccggctgcgagaactgggccccgacggcgaggaggctgaagggccaggcgcgggggatggaccccctcggagctttgattggggctacgaggagcgatcaggagcccactctagtgctagccctccccgtagcagatcccgagacagatcacacgaacggaaccgcgatcgtgatcgcgaccgtgagcgcgatcgcgatagggacagggatagggacagggagcgagatcgagatagggaccgggacagggaccgcgatcgggaaagagatcgcgatcgggaaagagatagggatcgggaccgcgagggcccttttagacgcagtgacagtttcccggaaagaagggccccgcgcaaaggaaatacactttatgtctatggcgaagacatgacacctactctgctcaggggagccttcagtcctttcggaaatataatcgatctgtctatggaccctccaaggaattgcgcttttgtgacatacgaaaagatggagtccgctgaccaggctgtggccgaactgaacgggacacaagtggagagcgtccagcttaaggtcaacattgcccgcaaacaaccaatgctcgatgccgctacgggcaagagtgtgtgggggagtttggccgtccagaattcaccaaagggttgccatcgggacaagcgcacacagatcgtgtatagcgacgacgtgtataaggaaaacttagtagacggattttag

SEQ ID NO: 131881 - DNA, 1143 bp, synthetic construct
  misc_feature 1..1143: note = Description of Artificial Sequence: Synthetic coding sequence
  source 1..1143: mol_type = other DNA
atgctcgtgatcccacccggcctaagcgaagaagaagaagccctccagaagaagtttaacaagctgaagaagaagaaaaaggctctgctggccttaaagaagcagtccagttcatctacgacctctcagggcggcgttaagaggtcgcttagcgaacagcctgtgatggatacggcaaccgccactgaacaggcaaagcagctggtgaaaagcggcgcaatttcagccatcaaagctgaaactaaaaatagcggttttaaacgcagccgcacactggaaggtaaactaaaggatccagaaaaaggccctgtccccacatttcagcccttccagcgttctatcagcgcggatgatgatcttcaagagtcgagccgacgccctcagcgaaagtctctctacgaaagctttgtgtcctctagtgaccggttacgagagttagggccagatggcgaggaggctgagggacctggcgctggagacggaccgcctcgctccttcgactggggctatgaagagagatctggcgcccattcttctgccagcccccccagaagtcgatcacgagatcgaagccacgagagaaatagggatcgagaccgcgacagggagagggatagagatcgcgaccgcgaccgggaccgtgagcgggaccgcgaccgggatcgtgaccgtgacagagacagagaaagggaccgtgatagggaacgcgaccgggatagagatagggagggtcccttccggagatcggattctttccctgaaagacgcgcgcctagaaaaggtaacaccctgtatgtctacggggaggatatgacacccaccctgttgaggggcgctttcagtccctttggcaacattatcgacctttccatggatcccccacgaaattgtgcctttgtgacatatgagaagatggaaagtgctgatcaagcagttgcagaattgaacggcacacaggtcgaaagcgtgcagctaaaagtgaacatcgctcgcaaacagcctatgttagatgcagccaccgggaagagcgtatggggtagcctggcagtgcagaattcccccaagggctgtcacagggacaaacgaacacagattgtctatagtgacgatgtctataaggaaaatcttgtggacgggttctag

SEQ ID NO: 131882 - DNA, 885 bp, synthetic construct
  misc_feature 1..885: note = Description of Artificial Sequence: Synthetic coding sequence
  source 1..885: mol_type = other DNA
atgttagtgattccaccggggctcagtgaggaggaggaggctcttcaaaaaaaattcaataagttgaagaagaaaaaaaaagcactccttgcgctgaagaaacagtcctcctcttcaacaaccagtcaggggggcgtcaagagaagtctcagcgagcagccagtaatggataccgccactgcaacagaacaggctaagcagctcgtgaaaagtggcgctatttcagctattaaggctgaaactaaaaattcagggtttaagcggtcccggacactggaaggtaagctaaaggacccggagaaaggccccgtgcccaccttccagccattccagagatccatttcagccgacgacgatttgcaggagagctcacgtagaccccagcggaagagtctttatgagtcctttgtgtcaagcagcgacagacttcgagaactaggaccagacggagaagaggccgagggacctggcgccggcgatggtccaccgagaagctttgactggggctacgaggagcgctcgggcgcccattcaagcgcttcccctcctcgtagccgtagccgggacagatcgcatgaaagaaatcgggaccgagacagagatagggagagagatagggatagagatagggaccgggatcgggaaagggatcgagatcgagacagggatcgcgacagagatcgtgagagagaccgggatcgcgagagggatcgggacagggatagggagggtccatttaggagatccgattctttcccagaaaggcgcgcccctcggaagggcaacacgctgtacgtttatggcgaagatatgaccccaacccttctgaggggcgctttttcacctttcgggaatatcattgacttgagtatggacccgccatag

SEQ ID NO: 131883 - DNA, 480 bp, synthetic construct
  misc_feature 1..480: note = Description of Artificial Sequence: Synthetic coding sequence
  source 1..480: mol_type = other DNA
atgcttgtaatcccccccggcctgtctgaagaggaggaggccctgcagaagaagtttaataagctcaaaaaaaaaaaaaaggcactgctggccctcaaaaagcagagctcatcatcgacaacctcccagggaggcgtaaagcgctcactcagcgaacaacctgttatggacaccgcgacggccacagagcaggctaagcagctggtgaagtctggagctatatctgccatcaaagccgagactaaaaacagcggtttcaaacggtccaggactctcgaggggaagctcaaggatccggagaaaggacccgtccctactttccagccctttcagagatccatttccgccgacgatgatctgcaggaaagttctaggcgcccccagcgcaaatctctctatgaatcctttgtgagctcttcagatagactgcgcgaactcgggcccgatggggaggaggccgaaggcccaggtgcagggtag

SEQ ID NO: 131884 - DNA, 723 bp, synthetic construct
  misc_feature 1..723: note = Description of Artificial Sequence: Synthetic coding sequence
  source 1..723: mol_type = other DNA
atgcttgtaatccctcccggtctatccgaagaggaagaggctttgcaaaaaaagttcaataaactaaagaagaaaaagaaagctctgttagctttgaagaagcagtcatctagttccacaacgtctcaggggggcgtgaagagatccctgagcgagcagcccgtgatggatactgctactgctactgagcaggcaaagcagctcgtcaaatctggcgctattagcgccatcaaagccgaaacaaagaatagcggttttaaaagaagtcgcaccctggagggcaaactgaaagaccctgagaaaggacccgtgcccacctttcagccatttcagaggagtatcagcgccgatgacgaccttcaagagagtagccgccgtccgcagaggaagagcctctatgaatcggaccggctaagagagctcggacccgacggcgaggaggccgagggacccggggcaggagacggccctccgcggtccttcgactggggctacgaagaacgttctggggcacattcctccgcaagccccccgcggtcgaggtcacgagataggtcccatgaacggaatagagaccgagaccgggaccgagaacgggatcgagatagagaccgcgaccgggaccgcgagcgggatagagatcgggaccgcgatcgagaccgcgatcgagagcgtgaccgggatcgcgagagagacagggacagagatagggaagggccgtag

SEQ ID NO: 131885 - DNA, 480 bp, synthetic construct
  misc_feature 1..480: note = Description of Artificial Sequence: Synthetic coding sequence
  source 1..480: mol_type = other DNA
atgctagtgattcctcccggtctttcagaggaggaagaggcgttgcaaaaaaagttcaataagttgaagaaaaagaagaaagccctgctcgccttgaagaagcaatcgagctcttccaccaccagccaggggggagtgaagcgaagtctatcagagcagcctgtgatggatactgctacggccacagagcaggcaaagcagctagtgaagtctggggccatcagcgcaattaaggcggaaacaaagaactccgggttcaagagatctcgcacactggagggaaagctcaaggaccccgaaaaggggccagttcctactttccagcctttccagcgtagtattagcgctgatgatgaccttcaggaatccagtcgaagacctcagcggaagtcgctctatgaatcattcgtgagtagctctgatcggctcagagagctgggtcctgatggcgaggaggccgagggccctggagctgggtag

SEQ ID NO: 131886 - DNA, 480 bp, synthetic construct
  misc_feature 1..480: note = Description of Artificial Sequence: Synthetic coding sequence
  source 1..480: mol_type = other DNA
atgctggttatcccacctgggctctccgaggaagaagaagccttgcagaagaaatttaacaagttgaaaaaaaaaaagaaggctctgcttgccctgaagaagcagtcatcaagtagtactacgtcacagggcggtgtgaagagaagcctgtcagaacagccggtcatggacactgcaaccgctacagagcaggccaaacaattagtaaaaagtggcgctatttccgcgatcaaagccgaaacaaagaacagcggcttcaagaggtcacgcaccttagaaggtaaactcaaggacccagagaagggacctgtccccacgtttcagccttttcagaggtccatctcggcggacgatgacttgcaggaaagcagtagacggccacagcgcaaaagtctgtacgaaagttttgtgagcagctctgacagattacgggagttgggcccagacggggaagaagcagaaggccctggagcaggatag

SEQ ID NO: 131887 - DNA, 1005 bp, synthetic construct
  misc_feature 1..1005: note = Description of Artificial Sequence: Synthetic coding sequence
  source 1..1005: mol_type = other DNA
atgctggtaatccctccgggcctatctgaggaggaagaagcactccaaaagaagttcaataagctcaaaaagaagaagaaggcactattagcactgaaaaaacagagctcgtcaagcacaacaagccagggcggagtgaaacggtccttaagcgaacagcccgtgatggatacagccaccgccacagagcaggccaaacaattggttaaatctggtgcaatcagcgctatcaaggctgagactaaaaatagtggtttcaagaggtcgcgtactcttgaaggcaaacttaaagatcctgaaaaggggcctgtgccgacctttcagccgttccagaggtcaatcagtgccgacgacgatctccaggagtcatcacgtaggccgcagcggaagagtctctatgagagtgaccgtttgcgggaactgggcccagacggtgaagaggccgaggggcccggggccggtgacggcccaccacgtagcttcgattggggatacgaagaacggtccggggcccattcttccgcctctccaccccgtagtaggtcgcgcgaccgctcccacgaaagaaaccgggacagggatagagatcgggagcgggaccgggatagagacagggatagagatcgagaacgcgatcgagaccgcgacagagatagggatcgggaccgcgaaagagatagagatagggaacgcgatcgggatcgcgatcgcgaaggaccattccgccgtagcgatagttttcctgaaagacgggcccccagaaaagggaacactctctacgtctatggcgaggatatgactcctacactgctcaggggcgccttctccccgtttggaaacatcatcgatctttcgatggatcctccgcggaactgcgcattcgttacatacgagaaaatggagtctgctgatcaagctgtggctgagcttaatggcactcaggtggagagtgtgcagctgaaagtaaatatcgcccggaaacagcccatgttagacgctgcctag

SEQ ID NO: 131888 - DNA, 723 bp, synthetic construct
  misc_feature 1..723: note = Description of Artificial Sequence: Synthetic coding sequence
  source 1..723: mol_type = other DNA
atgctggtgatcccccccgggcttagcgaggaggaggaggcgctgcagaagaagttcaataagctaaaaaaaaagaagaaagccctgctggctcttaaaaagcaaagcagttcctcgaccacttcacaaggaggcgttaaaagatctctgtccgaacagcctgtgatggacaccgccacggctaccgaacaggctaagcagctcgtcaagagtggtgctatcagcgccataaaagcagagactaaaaattctggctttaaaagaagtcgaacactggagggcaaactcaaggatcccgagaagggaccagttcccaccttccagccattccaaaggagtatcagtgctgatgatgatttgcaggaatctagcagacgtccacaaaggaagtccctgtatgaatccgatcgactccgggaactgggtccagacggtgaagaggctgagggccctggtgccggtgatggcccccccagaagtttcgactggggttacgaggagaggagcggagcccacagcagcgcctctcctccaagatccaggtcccgggatcggtcccatgaacgaaatagagatagagatcgggatcgggagcgcgacagagatcgagatagagaccgtgatcgcgaaagggaccgggacagagacagggatagagatagggatagggaaagggatcgagatcgggaacgcgatagagaccgagatagagaagggccatag

SEQ ID NO: 131889 - DNA, 480 bp, synthetic construct
  misc_feature 1..480: note = Description of Artificial Sequence: Synthetic coding sequence
  source 1..480: mol_type = other DNA
atgctggtgattccaccaggcctttctgaggaagaagaagctctgcagaagaagtttaataagctgaagaagaagaagaaagccctgttagccctcaagaagcagtcaagttcgagtacaacgtctcaggggggagtcaaaaggagtctctcagagcaacccgttatggacacagctacggctacagaacaggcaaaacagttggtcaagtccggggcgatcagcgctatcaaggccgagacaaaaaacagcggttttaagcgctctcgtaccttagaaggcaagttgaaggaccctgaaaagggacctgtgcccacgtttcagccatttcagcggtccattagtgctgatgatgatttgcaggaatccagccgccggccacagcgcaaaagtctctacgagagcttcgtctcctcgtcagaccgcctcagagaactggggcccgacggcgaggaggcagaaggacccggggccggctag

SEQ ID NO: 131890 - DNA, 1005 bp, synthetic construct
  misc_feature 1..1005: note = Description of Artificial Sequence: Synthetic coding sequence
  source 1..1005: mol_type = other DNA
atgttggttatcccaccagggctttccgaagaggaggaggcgcttcagaaaaagttcaataaactcaaaaagaaaaagaaggcactcctggccctaaagaagcagtcaagctcaagcacaacatcacagggaggagtcaagaggtcactgtccgagcaaccggtgatggacactgctacggcaactgaacaggccaaacagctggtgaaatcaggagccatttcggccattaaagccgaaaccaaaaactccggattcaaaaggagcaggacgctggagggcaaactaaaagatcctgagaaaggaccagtcccaacattccagccctttcagcgatccatctccgcagacgacgatctacaggagtccagccgacggccccagcgaaagtctctgtacgaaagtgatcgtttgcgcgagctgggtcccgacggggaagaggcggagggacccggagctggcgatggtcctcctcggagtttcgactgggggtacgaggaaagatcaggcgctcactcatctgcctcccctcccagatcaaggtcaagagaccgtagccacgagcgtaacagggatcgcgatcgggaccgcgagcgggacagggacagagaccgagatcgggaccgcgagagggacagggaccgggatagagacagagacagggaccgggagcgagaccgcgacagagagagagatcgagaccgggaccgggagggtccgtttagaaggagcgattcattccctgagcgcagagcaccaagaaaagggaacaccctctatgtgtatggcgaggacatgactccgacattattacggggtgcattttcccctttcggtaacatcatcgatctgtccatggaccccccaagaaactgcgcttttgtcacatatgagaaaatggagtcagctgatcaggctgtggcagagctgaacggaacgcaggttgagagcgtgcaattgaaagtgaacatcgcacgcaagcagcctatgctggacgcagcctag

SEQ ID NO: 131891 - DNA, 480 bp, synthetic construct
  misc_feature 1..480: note = Description of Artificial Sequence: Synthetic coding sequence
  source 1..480: mol_type = other DNA
atgcttgtcatccccccgggactcagtgaagaggaggaggccctgcagaaaaaattcaacaaacttaaaaagaagaaaaaagcactattggctttaaagaaacagtcctcaagttccacaactagccaggggggagtcaagaggtccctaagcgaacagcctgtgatggacacggctaccgcaactgagcaggctaagcagctggtgaagtccggggccattagtgccattaaagcagagacaaagaacagcggctttaagagatccagaacgctggaaggcaagctgaaggaccctgagaagggacccgtgcccacattccagcctttccagcgtagcatctctgcggacgatgatctccaggaaagcagccgcagacctcaacgtaaaagcctctatgagtcctttgtgagtagttccgatcgtttgcgggagctgggccctgatggagaggaggccgaggggccaggggctgggtag

SEQ ID NO: 131892 - DNA, 1143 bp, synthetic construct
  misc_feature 1..1143: note = Description of Artificial Sequence: Synthetic coding sequence
  source 1..1143: mol_type = other DNA
atgctcgtcattcccccaggtctctcggaggaagaggaggctctacagaagaaattcaacaaattaaagaaaaagaagaaagctctgctggcactgaaaaagcaatcatcctccagcactacaagccaaggtggagtcaaaaggtcgctttcagagcagcctgtgatggacactgccactgccacagaacaggccaaacagctcgtcaagagcggagcgatatccgctatcaaggctgagaccaaaaacagcggattcaaaaggagcaggaccttagaaggaaaactcaaagatccagagaagggacctgttcctacgttccagccatttcagcggtccatctcggcagatgatgacctacaggagagctccaggaggccccagcgcaaatcattatatgagagctttgtgagctcttcagatagattaagagaacttggtcccgacggcgaggaggccgagggcccaggcgcaggggatgggccgcctcgcagcttcgactggggttacgaggagaggtcaggcgctcacagttcagcttccccccctcgctcgagatcacgagatagatctcacgaaagaaatcgggatcgcgatcgggatagggagcgcgacagggatcgggatcgggatcgcgacagggaacgggaccgcgacagagatagagatcgcgacagagatagagagcgcgatagagacagggagcgggaccgcgaccgggaccgcgagggtccttttcgacggagtgattccttccctgagcgcagggcaccccgcaaaggtaacacactgtacgtatacggtgaggacatgaccccaaccctgctgcgaggggccttttcgccatttgggaacattatcgatctctccatggatcctccacggaactgcgcatttgtcacctacgagaaaatggaaagcgccgatcaagccgtggccgaactgaatggcacacaggtagagagtgtccaactgaaagtcaacatcgcacgaaagcaaccaatgctcgatgctgcgacagggaaatctgtgtggggatctcttgccgtccagaactctcctaaggggtgccatagggacaagcgaacacagatcgtttacagtgacgacgtgtataaagagaacctcgtcgatgggttctag

SEQ ID NO: 131893 - DNA, 885 bp, synthetic construct
  misc_feature 1..885: note = Description of Artificial Sequence: Synthetic coding sequence
  source 1..885: mol_type = other DNA
atgttggtaatacctccagggctgtctgaagaggaggaggctcttcagaaaaagtttaataaactgaagaaaaaaaagaaagctctgttagcccttaaaaaacagtcatctagtagcaccacatctcagggcggcgtgaaaaggtccctgagtgagcaacctgttatggacaccgccaccgccacagagcaagctaagcaactggttaagtctggagcaatttcagcaattaaagccgagacaaaaaattctggctttaaaaggtccaggaccttagaaggaaaacttaaggacccagagaaggggccagtccctacctttcaaccattccagagatccatctcagcggacgacgacctgcaagagtcttccagacgtccgcagagaaaatcactctatgagtcttttgtctcttcgtcggaccgcttaagggagcttggacccgacggagaagaagcggagggccccggcgccggggacggcccgccccgttcttttgattggggttatgaagaacgctccggagcacactcttccgccagccctcctaggtcccgcagccgcgacaggtcccatgagcggaaccgcgatcgggatagggatagagaaagagatcgcgacagggacagagaccgagatcgtgagcgggaccgagatagagatagagatcgcgaccgcgacagagagcgggacagggatagagaacgcgatagagatcgcgatcgggaaggccccttcagaaggtccgactcttttcctgagcgcagagcacctaggaaggggaatactctgtacgtttatggtgaggacatgacacctactctgttgcgcggagccttttcaccattcggcaacataatagatctgtctatggatccgccctag

SEQ ID NO: 131894 - DNA, 723 bp, synthetic construct
  misc_feature 1..723: note = Description of Artificial Sequence: Synthetic coding sequence
  source 1..723: mol_type = other DNA
atgctggtgatccccccaggtctcagtgaggaggaagaggccctgcaaaagaagtttaataagcttaagaagaaaaagaaggctctgcttgccctcaagaaacagtctagcagttcgaccactagtcaaggtggagttaaaagaagtcttagcgagcaaccggtgatggataccgccacagcaactgaacaggcaaaacaattggtgaaatctggtgctatttctgcaataaaggctgaaacaaagaacagcggcttcaagcgcagtagaactctcgaagggaagctgaaagatcctgaaaagggccctgtcccaacctttcagcctttccagcggtctatctccgccgacgatgatctacaggagtcttctcgaagaccccagcggaagtccctgtatgagtccgaccgtcttcgtgagcttgggccggacggtgaggaggccgaaggccctggagctggcgacggccccccacggagctttgattggggatacgaggagcggagtggagcacattcatcagcttccccaccacgctcaaggagtcgggaccggtcacatgagcggaatagagaccgcgaccgcgatcgcgagagagacagggatcgggaccgcgatcgagaccgcgaacgtgacagagaccgggacagagacagagacagggaccgagaaagagatcgcgatcgagaacgcgaccgcgatcgggaccgggaagggccatag

SEQ ID NO: 131895 - DNA, 885 bp, synthetic construct
  misc_feature 1..885: note = Description of Artificial Sequence: Synthetic coding sequence
  source 1..885: mol_type = other DNA
atgctggtgatccctcccgggctatccgaagaggaggaggctctgcaaaagaaatttaacaagctgaagaagaagaagaaagccttattggcgttaaaaaaacagagttctagtagcactacctcccaggggggcgtgaagagatctttgtcagagcagccagtgatggatactgccacagccactgagcaggcaaagcagctagtgaaatccggcgcgatcagcgcaatcaaagccgaaactaagaactccgggtttaagcgcagcaggaccttagaagggaaacttaaggaccctgagaaggggccagtgcctaccttccagccatttcagcgttccatttcagctgacgacgatttacaggaatcaagccgccgcccccaacgaaaaagcctgtatgaaagttttgtgtcatcctcggataggctgcgtgagctcggccctgacggcgaagaggcagagggcccaggagctggagatggacctcccaggtctttcgactggggctacgaggaacggtcgggcgcgcactctagtgccagtccgccccggtcgcgctcacgtgacagatcacacgagcgaaatcgtgatagggacagagaccgtgagcgcgatcgagatagagaccgcgaccgagacagggagcgggacagagacagagatcgagacagagatcgggacagggaaagggatcgagatagagaacgcgatagagatcgggatcgcgagggacctttccgaaggtctgactcatttcctgagaggcgagcaccccgcaaaggaaacactttatacgtgtacggtgaagacatgactccgacgttattgcgcggagccttcagtccatttgggaacataatcgacctgtccatggacccaccttag

SEQ ID NO: 131896 - DNA, 1005 bp, synthetic construct
  misc_feature 1..1005: note = Description of Artificial Sequence: Synthetic coding sequence
  source 1..1005: mol_type = other DNA
atgctcgtgattcctcctggcctgagcgaagaggaagaagcacttcaaaagaagttcaacaagctcaagaaaaaaaagaaggccctcctagcccttaaaaaacaaagcagctcgagtactacctctcagggaggggtgaaaagatccctgtccgaacagccggttatggacaccgcaaccgctactgagcaggccaagcagcttgtgaaaagcggcgccatatcagctatcaaggcggaaacgaagaatagtggctttaagcgcagccgcaccctggaaggcaagttgaaagacccagaaaaagggcctgtgccgaccttccaaccgttccagcgatcaattagtgccgacgatgatctgcaagagtcgtcccggcgccctcagcgaaagagcttatacgagagcgacaggctgcgcgagctaggccccgacggcgaggaggccgagggccccggtgccggagacggccctcctaggtcctttgattggggatacgaagaacgaagtggcgcgcatagttccgcatcccccccccgtagtcggagtcgcgaccgctctcacgagcgcaatagagatcgcgatagagatcgggagcgcgaccgggatcgagaccgggaccgcgaccgggagagggacagagacagggatagggatcgggacagagaccgagagcgggacagggacagagagagggaccgcgatagagatcgtgagggtccctttagaaggtcagactcgtttcctgagaggcgtgcgccacgaaaaggtaataccctgtacgtttatggtgaggatatgacacctactctgctgagaggagccttctcaccttttggtaatatcattgatctgagtatggaccctcctaggaattgtgccttcgttacatacgagaaaatggaatctgccgatcaggccgtggcagagttaaacggcactcaggtggagtctgttcaattaaaggtgaacattgctcgaaagcagcctatgctggatgccgcctag

SEQ ID NO: 131897 - DNA, 1005 bp, synthetic construct
  misc_feature 1..1005: note = Description of Artificial Sequence: Synthetic coding sequence
  source 1..1005: mol_type = other DNA
atgctggtcattcccccaggactgtccgaggaggaggaggcgttacagaagaagtttaacaagctcaaaaagaagaagaaggccttactggccctgaaaaaacagtccagctcaagcacgacatctcagggtggcgtgaaacggagcctcagtgagcagcctgtgatggatactgctacggccacggagcaggctaaacagctggtaaaatccggagccattagcgccatcaaggcggagaccaagaactccggcttcaaaagatcccggacgttggagggaaagctcaaggatccggaaaagggaccagttcccacatttcagcccttccaacgctcaatatctgctgatgacgacctccaagagagctcaaggagacctcagcgcaagagtctttacgaatccgaccggctcagagagctcgggcccgatggtgaagaggccgagggccccggcgccggtgacggccctcccagatccttcgattggggctacgaagagaggtccggagcacatagtagtgcctcaccaccaagatcacgaagtcgcgataggagtcatgagagaaacagggacagagatcgggaccgtgagcgggacagggacagagatagagaccgagaccgtgagagggaccgagaccgtgatcgggatagagatcgcgatcgagaacgagatagagatagggagcgggaccgcgaccgtgacagagaaggaccattcagaaggagcgatagcttccctgaacggcgagccccccgcaagggtaatactctgtacgtttacggggaggacatgacccccacactgctccgtggcgcattctcacccttcgggaacatcattgatctgtctatggacccgccacggaactgcgcatttgttacctacgagaagatggaaagtgcagaccaggctgtagctgagcttaacggcacacaggtggagagtgtacagttgaaagtcaacatcgcccgcaagcaacccatgctggatgccgcctag

SEQ ID NO: 131898 - DNA, 1005 bp, synthetic construct
  misc_feature 1..1005: note = Description of Artificial Sequence: Synthetic coding sequence
  source 1..1005: mol_type = other DNA
atgctagtcataccacccgggctgtctgaagaggaagaggccttacagaagaaattcaacaaattgaagaaaaagaagaaggccctactggcacttaaaaaacagtcctccagtagtacgacctcacagggaggggttaaacgctctctgagcgaacaacccgtgatggacacagcaacagcgactgaacaggccaagcagctggtgaaatcaggcgccatctcagccataaaggcagaaacaaaaaattcaggattcaaaaggtcacggacattagaaggaaagcttaaggatcctgagaagggccctgtgcccacttttcagccattccagcggagtatttccgctgacgacgatctgcaggagtcctctcgcagaccccagcgcaagtcgctttatgagtctgaccgcctccgggagctgggccccgacggggaagaagcagaaggcccaggagccggggatggccccccccgcagctttgactgggggtatgaggagagaagcggcgcccatagtagcgcatcacctccacgtagcagaagccgggatcggagccacgagcggaaccgggatcgcgatagagacagagaaagagatagagatcgcgatcgcgaccgcgatagagagagagacagagatagagatagggaccgggacagggatagggaaagagaccgggacagagagcgtgaccgagatcgggaccgcgaggggccctttagaaggtcagactcttttccggagcgacgcgcaccaagaaaggggaataccctgtatgtttacggcgaagacatgactccaacccttctcaggggcgccttctccccattcggtaacatcatcgatctaagcatggacccccctaggaactgcgccttcgtgacttatgaaaagatggaaagcgctgaccaggccgtagcagaacttaatggcacacaagtagaaagcgtccagctcaaggtcaatatcgctcgcaagcagccaatgctcgacgccgcctag

SEQ ID NO: 131899 - DNA, 1053 bp, synthetic construct
  misc_feature 1..1053: note = Description of Artificial Sequence: Synthetic coding sequence
  source 1..1053: mol_type = other DNA
atgctcgtgatcccacccgggttatctgaagaggaagaggccctgcagaagaagtttaacaagctgaagaaaaagaaaaaggccctcctggctctcaagaagcaatcctccagtagcaccacctctcaagggggcgtgaagagaagcctgtcagaacagccggtcatggataccgctaccgcgaccgagcaggcaaagcagctggtgaaatcgggagccatctcagcaattaaggcagagacgaagaattccgggttcaaacgctcaagaaccctggagggtaagctgaaggaccctgagaaaggtcctgtccctactttccagccattccaacgtagtatcagcgccgacgatgacctccaggagtcgagtcgcaggccccaaaggaagagcctgtacgagagttttgattggggatatgaggagcggagcggggcccattcaagtgcgagcccgccacgctccaggtcccgagatagatcccacgaaagaaaccgcgaccgagaccgcgaccgcgagcgggaccgcgaccgggacagggaccgggaccgtgagagagatcgggatagggaccgagacagagacagagacagggagcgtgaccgggatagagagagagaccgcgaccgcgatagggaaggaccatttcgacgctccgattcttttcccgagcgcagagcccctcgcaaggggaatacgttgtatgtctacggggaggatatgacgccaactctcttgagaggcgccttctcgcctttcggtaacattatcgacctgtccatggatcccccaagaaactgcgcctttgtgacctacgaaaaaatggaaagtgctgaccaggctgtcgcagagctgaatggaacccaggtcgaaagcgtgcagttaaaagtaaacattgcccggaaacagcctatgctcgacgcagccactgggaagagtgtgtggggcagcctggccgtgcagaacagtcctaagggttgtcatcgggataagagaacccagattgtgtactctgatgatgtttataaggagaacctggtggatgggttctag

SEQ ID NO: 131900 - DNA, 1143 bp, synthetic construct
  misc_feature 1..1143: note = Description of Artificial Sequence: Synthetic coding sequence
  source 1..1143: mol_type = other DNA
atgctggtcatcccccccggcctgagtgaggaagaagaggcactgcagaagaaattcaacaagctcaagaagaagaagaaggctctgctagcactcaaaaagcagtcttcaagcagcacgacctctcagggtggtgtcaagcgttccttgagtgaacagccggtgatggacaccgccactgctacggagcaggccaaacagctggtgaagtccggagctatatctgctatcaaagctgaaacaaaaaattccggctttaagcggtcgaggacgctcgagggaaagctgaaagacccggagaagggcccagtgccaactttccaacccttccagcgcagtatatcagctgatgacgacttacaggagagctccaggagaccacagagaaaatcgttgtacgagagcttcgtgtcttcttccgacagactcagagagcttggcccggatggtgaggaagccgagggacctggcgcaggggacgggcccccccgaagcttcgactggggatacgaggaacgatccggagctcactcctctgcaagcccgcctcgctcacgctcaagggataggtcacacgagcgcaatagggatcgggatcgtgatcgagaacgggacagggatagggacagggatcgggatagagagcgagatagagacagggaccgtgacagggatagggatcgggagagggaccgcgaccgggagcgggatagggatagagacagagagggcccattccgtagatccgattccttccctgagcggagagctcctaggaaaggcaacactctgtatgtatacggcgaagatatgactccaactttgctgagaggagccttcagcccatttggaaacataatcgacctttcaatggaccccccgcggaactgcgctttcgtgacatacgagaaaatggagagcgctgatcaagcagttgcagaactgaacgggactcaggtggagtctgttcagctcaaagtgaatattgctcgcaaacagccaatgctggatgccgctaccgggaaatccgtgtgggggtctttggcggtgcagaattcccccaaggggtgtcacagggataagcgcacacagatcgtgtacagcgacgacgtatataaggagaacttagtcgacggcttctag

SEQ ID NO: 131901 - DNA, 723 bp, synthetic construct
  misc_feature 1..723: note = Description of Artificial Sequence: Synthetic coding sequence
  source 1..723: mol_type = other DNA
atgctcgtgatcccacctggattgagtgaagaggaagaggccttacagaaaaagtttaacaagttgaaaaagaaaaagaaggctcttctcgcactcaagaagcaaagctcttcaagtactacaagccagggcggagtgaaaagatcgctttccgagcagcctgtcatggacaccgcaaccgcgacagaacaggcaaaacagcttgtgaaatctggcgcaatctcagccattaaagcagagacaaaaaatagtggatttaagcgcagcagaactctggaaggtaagctaaaggaccctgaaaagggccctgtccccacattccagcccttccaaagaagcattagcgcagatgatgaccttcaggaatccagccgccgacctcagcggaagtcattgtacgagtccgacagattgagggaattgggtcccgacggcgaggaagcagaagggccaggcgctggcgacggcccaccccggtccttcgattgggggtacgaagagcggtccggcgctcatagtagcgccagccctccacgatctcggagtcgagatagatcccatgagaggaaccgtgaccgcgatcgagacagggagcgggaccgtgatagggaccgggaccgtgatcgggaaagagatcgcgatagggaccgcgaccgcgacagggatcgggaaagggaccgggacagggagcgcgatagggatcgcgacagggagggcccctag

SEQ ID NO: 131902 - DNA, 1005 bp, synthetic construct
  misc_feature 1..1005: note = Description of Artificial Sequence: Synthetic coding sequence
  source 1..1005: mol_type = other DNA
atgttggtcatacctcccgggttaagcgaagaggaggaggcgttgcagaaaaagtttaacaaactgaagaagaagaagaaggcactgctcgcgttgaagaagcagtcatcatcatctacaacaagccagggaggggtgaaaaggtctttgtcagaacagcccgtgatggatactgcaacagctaccgagcaggctaagcagctggtaaaaagcggagctataagtgccattaaggctgagactaaaaactccggattcaagaggtcccgcactctggaaggcaaacttaaagaccctgaaaaaggccctgtgcccaccttccagccctttcagagatctatctccgccgatgacgacttgcaggagtctagccgacgcccacagagaaaaagtttgtacgagtccgatcgtctaagagagcttggtccagacggagaagaagccgaagggccgggcgccggtgatggccctccaaggtctttcgattggggctacgaagaacgtagtggagcccattcatctgcatctcctccccggagtaggtcccgcgaccggtcccacgaaaggaatagagacagggatcgcgaccgagaacgtgacagagacagagaccgggaccgtgatcgtgagcgggacagagaccgagatagagaccgagacagagaccgtgagagggatagagaccgggagcgagacagagaccgcgaccgcgaagggcctttcagaaggtccgactccttccccgaacgcagagctccccgtaagggaaacacgctgtatgtgtatggtgaggatatgaccccaacactcctgcgaggagcattttccccgtttggtaatattatcgacctttccatggatccaccccggaattgtgccttcgtgacatacgagaagatggagtctgccgatcaggcagttgcagagctcaacggaacacaggtcgagtcagtccagctcaaggtcaatatagctcgaaagcagcctatgctggatgctgcctag

SEQ ID NO: 131903 - DNA, 885 bp, synthetic construct
  misc_feature 1..885: note = Description of Artificial Sequence: Synthetic coding sequence
  source 1..885: mol_type = other DNA
atgctggtcatcccacctggcctgtctgaggaggaggaggctctgcagaaaaagtttaacaagttaaaaaaaaagaagaaagccctcctggctctcaaaaaacagagtagcagtagtactacttcacaaggaggagtgaagcgaagtctgagcgagcaacctgtaatggataccgccaccgcaacagagcaggccaagcagctggttaagtcaggagctattagcgcaattaaggccgagacaaagaactccggattcaagaggtcgcgcactttggaaggcaaactgaaggacccagaaaagggacctgttccgacctttcaaccatttcagcgttcgattagcgctgacgacgacctacaagagtctagccggagaccccagcgcaagagcctgtatgagtccttcgtcagttccagtgatcgtctgagggaattaggccccgatggcgaggaggctgaggggccaggggctggggatggccctcctagaagtttcgactggggttacgaagagcgcagtggggctcactcctctgcctccccccctcgcagtcgaagtagggatcggagccatgaacgcaacagggaccgggatagggatagagagcgagatcgggaccgtgacagagacagggacagagaacgtgaccgcgatagagatagagatagagatagagatcgggaacgggacagagaccgcgaaagagatagggatagagaccgggaggggccttttagacgctctgattctttccccgagaggcgagctccgcgcaaaggtaataccctgtacgtgtatggggaggacatgacacctacactgcttcgcggagctttttctccatttgggaacattatagatctatcgatggacccgccatag

SEQ ID NO: 131904 - DNA, 885 bp, synthetic construct
  misc_feature 1..885: note = Description of Artificial Sequence: Synthetic coding sequence
  source 1..885: mol_type = other DNA
atgctggtcatccctccaggcctctccgaggaagaggaggctctccaaaagaagtttaacaaactgaagaaaaagaaaaaagcactcctggccctcaagaagcaaagcagttcttcaaccacctctcagggaggcgtcaagcgctccctttcagaacagcctgtgatggataccgccaccgcaactgaacaggctaagcaactagtcaagagtggcgccatctctgctattaaggccgaaactaagaattccggctttaaaaggtccagaacactggaggggaagctgaaggatcctgagaaaggacccgtgcccaccttccagcctttccagcgttcaatttcagcagacgacgacctccaggaatctagccggaggccccagaggaagtctctttatgaaagcttcgtgagctcctctgaccgactcagggagttgggtcctgacggcgaagaagccgaaggccctggagccggcgacggaccgccaagatctttcgactggggttacgaggagaggtccggcgctcattccagtgcttcccccccccgttcaaggagtcgggacaggagtcacgaacggaatcgagacagggatcgggatagagagcgggatagagatcgggatagagaccgggatagggagcgggaccgagatcgagaccgggatcgagacagggaccgggagagggatagggaccgtgaaagagatagagatcgagatcgagaaggccctttcagaaggtcggacagctttcccgagcggcgggctcccaggaagggtaacaccctttacgtgtatggagaagatatgacaccaactcttctgcgaggagctttcagtccattcggcaacatcatcgacctgagtatggatccaccttag

SEQ ID NO: 131905 - DNA, 885 bp, synthetic construct
  misc_feature 1..885: note = Description of Artificial Sequence: Synthetic coding sequence
  source 1..885: mol_type = other DNA
atgctggtaatccctcccgggttaagcgaagaggaagaggccttgcaaaaaaaattcaataagctgaaaaaaaaaaagaaggccctcttggccttaaagaagcaaagctcgagttcaacaacctcgcagggaggtgttaagcgtagcctttcagagcaacccgtcatggacacagcaacagccaccgagcaggcgaaacagttggttaagtcaggcgcaatcagcgcaattaaagctgagactaaaaattcaggcttcaaacggtcgaggaccctcgaaggaaaactgaaagaccctgagaagggacccgtgcctactttccaaccgttccagagatctatctcggccgacgacgacctccaagaaagctcacgccgaccacagcgcaaatccctgtacgaaagctttgtgtcttcttcggacaggcttagggagttaggccccgacggcgaggaggcagaggggccaggggccggcgacggaccccctcgctccttcgactgggggtacgaggaaagatccggggcccactcctcggcctccccaccacggagccgctctagggatagatcccatgagcgcaacagggaccgagaccgcgatagggagagagaccgggatcgggatcgggaccgtgacagagaaagggatcgggatcgcgatagagatcgcgacagagatagagaaagagaccgtgaccgtgagcgggaccgagacagggaccgcgagggcccatttcgtagatctgactcttttcccgaacgaagagctccccggaaggggaataccttgtatgtctacggagaagatatgactccaactctgctccgcggagcattctctcccttcggtaacattatcgacctctcgatggatccaccgtag

SEQ ID NO: 131906 - DNA, 723 bp, synthetic construct
  misc_feature 1..723: note = Description of Artificial Sequence: Synthetic coding sequence
  source 1..723: mol_type = other DNA
atgctggtcatcccgcccggcctatccgaggaagaggaggctttacaaaaaaagttcaataaactcaagaagaagaaaaaggcactgctagctctcaaaaagcagtcatctagctcaactacttcgcaagggggcgtgaagcggtctctgagtgagcagcctgtgatggacactgccaccgccaccgaacaggccaagcagctcgtgaagtccggggccatctccgccattaaggccgagacaaagaacagcggctttaaaagatcccggacgctggaaggcaagttaaaggatcctgagaagggcccagtcccgaccttccagccctttcagcgttctatctctgcagacgacgacttacaagaatctagcaggcggccacagcgaaaatcattgtatgaatccgatcgactaagagaattggggcccgatggggaagaggccgagggccccggagctggcgatggtcccccacgatcatttgactggggttatgaagagcgcagtggcgcacacagtagcgcgagccctccaagatccagaagtcgcgataggagccacgagcgtaaccgtgatcgggaccgcgacagggaaagagatcgcgatcgcgatcgcgaccgcgatcgggagcgcgaccgggaccgagatcgcgatcgcgatcgcgatagagagcgagatcgagatagagaacgagaccgcgatagagatagggaaggcccctag

SEQ ID NO: 131907 - DNA, 1143 bp, synthetic construct
  misc_feature 1..1143: note = Description of Artificial Sequence: Synthetic coding sequence
  source 1..1143: mol_type = other DNA
atgctggtaattcctcctggcctgagcgaggaggaggaagctctccagaaaaagttcaataaactgaaaaaaaagaagaaagcgcttttggcactcaagaagcagagctcaagcagtaccacttcccagggtggggttaaacggtccctgtctgaacagcccgttatggacaccgccacggcaaccgagcaggcaaaacagcttgtgaaatccggtgccatttccgctataaaagccgagaccaagaatagcgggtttaaacgatcgcgcacgcttgaggggaagctgaaggatcctgagaaggggccggtcccgacgttccagccctttcagcggtccatatcggcggacgacgacttacaggaatcaagccggcggcctcagcgaaaaagtctctatgagagttttgtgtctagttcggacaggcttagagaacttggcccagatggagaggaggcagaaggtcctggtgctggagatggtcccccaagatccttcgattgggggtatgaagagcgatcaggtgcgcactcgtctgcctcgccaccccgcagcaggagccgggaccgttctcacgagcgaaacagagatagggaccgcgacagagaacgcgatcgcgatagggatagagatcgtgacagagagagagatagagatcgggaccgagatcgcgacagagaccgcgaacgtgacagggatcgcgagagagatcgcgaccgagaccgagagggcccatttcgacggtccgactcattccctgaaagacgggcacctagaaaaggcaacacgctatatgtgtacggggaagacatgacccctacgctgctgagaggcgcgttttccccgttcgggaacattatagatctgtcgatggatcctccacgtaactgtgccttcgtgacctatgaaaagatggaatccgctgatcaggccgtggctgagctcaacggcacacaggtggaatctgtgcagttgaaagttaatatcgcgcgaaaacagcctatgttggatgctgctacgggcaaaagcgtctggggaagcctggccgtccaaaacagcccaaagggatgccacagagataaacgcacacagatagtctattcagacgatgtgtacaaagagaatcttgtcgacgggttctag

SEQ ID NO: 131908 - DNA, 480 bp, synthetic construct
  misc_feature 1..480: note = Description of Artificial Sequence: Synthetic coding sequence
  source 1..480: mol_type = other DNA
atgctggtcattccgcctggcctttctgaagaggaagaagccttacaaaaaaaatttaacaagctgaagaagaaaaaaaaggcactcctcgcccttaaaaaacagtcctcgagttctacaacaagtcagggcggtgtgaagcggagcctttctgagcaacctgtgatggacacggcaacagcaaccgagcaggcaaagcagctagtgaagagcggggctatctcagcaatcaaagctgagaccaagaactctggatttaagaggagccggaccctcgaggggaaactgaaggaccccgagaagggcccggtaccgacttttcagccctttcaaaggtcaattagtgccgacgacgacctgcaggaatcttcccgacgcccgcagaggaaatccctctatgaatcttttgtatcctcctccgatcgactgcgggaactgggcccggatggcgaggaagctgaagggccaggtgccggatag

SEQ ID NO: 131909 - DNA, 1164 bp, synthetic construct
  misc_feature 1..1164: note = Description of Artificial Sequence: Synthetic coding sequence
  source 1..1164: mol_type = other DNA
atggtccccaagggcgccaccatgctggtgatccctcccggcctgtcggaggaagaggaagcccttcaaaagaagttcaataaactgaagaaaaaaaagaaggccctcttggcgctgaagaagcagtccagtagctctacaacctctcaagggggtgtcaagagatctttgagcgagcaacccgtgatggacaccgccaccgctactgagcaggccaaacagcttgttaaatcaggggctattagcgctataaaggctgagaccaaaaattcggggttcaagcgatcaaggacacttgaggggaagctgaaggatccggagaaggggcccgttcccacgttccagccttttcagagaagcatcagcgcagacgatgatcttcaggaatcctctcgccgcccccaaaggaagagcctttacgaatcctttgtgagctcaagtgatcggcttcgggagttgggacctgacggtgaagaagccgagggcccaggcgccggggacgggcctcccaggagcttcgattggggatatgaagaacggtcaggagcgcactcctccgcgagccctcctcggagccgctctcgtgatcgcagccatgagcgtaacagagacagagatagggatcgggaacgtgacagagatcgggatagagatcgcgacagagaacgcgaccgcgacagggatagagacagagatagagatcgcgagcgcgatagggaccgggaacgagaccgcgaccgggacagggagggcccatttaggcggagcgactcctttcccgaacgccgtgcccctcgtaaaggaaacaccctgtacgtatatggcgaagacatgacccctactcttctgagaggagctttcagccccttcggtaacattattgacttaagtatggaccctcctcgaaattgcgcatttgttacatatgaaaagatggaatcggccgatcaggctgtagccgagctcaacgggacacaagtggaaagcgtgcagcttaaggtcaatatcgccaggaagcagcctatgctggatgctgccacgggaaaaagcgtatggggttcactggccgtgcagaactcaccaaaaggatgtcatagagacaaacggacgcagatcgtgtattcagatgacgtgtacaaggaaaacctggtggacggcttctag

SEQ ID NO: 131910 - DNA, 1164 bp, synthetic construct
  misc_feature 1..1164: note = Description of Artificial Sequence: Synthetic coding sequence
  source 1..1164: mol_type = other DNA
atggtgcctaagggcgcaaccatgctcgtgatcccccccggtctttcagaagaggaagaagctctccagaagaagtttaataagctcaagaagaagaagaaggctctcctagccctgaagaaacagagctctagctccaccacatctcagggcggtgtgaaaaggtccctcagcgaacagcctgttatggacacagcaactgctaccgagcaagccaagcagctggtgaagagtggcgcgatttcggccataaaggctgagaccaagaacagcggcttcaagcgctccagaaccctcgaaggaaaactgaaggacccggagaaaggtcccgtacctacgttccagccatttcagcgctccatcagcgccgacgacgacttgcaggagtcctctagacgcccgcaaagaaagtctctgtacgaaagctttgtctcctccagtgatagactgagagaactgggaccagatggagaggaggcagagggcccgggagctggcgacggtccacccaggagctttgattggggatacgaagagcggtccggagcccacagcagcgccagtccgccccgcagtagatcacgcgatcggtctcacgagcgcaacagagaccgcgatagggatcgcgagagggatcgggatagagacagagatagggaccgggagcgtgaccgcgaccgtgaccgggatcgagatcgcgatcgcgaaagagatagagacagggaacgtgatagagacagagacagggaggggcctttccgacgttcagattcctttcccgaacgaagggcacccagaaagggcaatactttgtatgtgtatggggaggatatgaccccaaccctacttagaggcgcgttctcccccttcggaaacatcattgacctgagtatggaccctcccagaaactgtgcctttgtcacttacgagaagatggagagcgctgaccaggcggtcgctgaattgaacgggacccaagtcgagagtgtgcagctgaaggtgaatattgcgagaaaacaaccaatgctcgatgcagctacgggcaaaagcgtctgggggtcactcgcggtgcaaaatagccctaaaggatgtcacagagataaaagaacgcagattgtgtactcagatgatgtctacaaggaaaacctcgtcgatggcttctag

SEQ ID NO: 131911 - DNA, 1164 bp, synthetic construct
  misc_feature 1..1164: note = Description of Artificial Sequence: Synthetic coding sequence
  source 1..1164: mol_type = other DNA
atggtgcccaagggcgccaccatgctggtcataccccctggactcagcgaagaggaagaagccctgcagaagaaattcaacaagctcaaaaaaaagaaaaaagctctgctcgccctgaaaaagcagagctctagcagcacaacatcccaggggggtgtcaagaggtccttgagcgagcagccagtcatggacactgccacggccacagaacaggccaagcaactagtgaaatcgggggccatcagtgcaatcaaggctgaaactaagaactccggatttaaaaggagccgaactctggagggtaagttaaaggaccctgagaaaggtcctgtgcccactttccagccatttcaaagatccatatccgccgatgacgatttacaagaatcttcccgcagaccccaacggaagagtctctacgaaagtttcgtaagctctagcgaccggctgagggaactggggcctgacggagaggaggctgaaggacccggtgccggtgacgggccacctcggtctttcgactggggctacgaggagaggtccggcgctcactcgagtgcatctccacctagaagccgctcgcgcgatcgctcacatgagaggaaccgcgacagggatagagacagagaacgcgacagggatagggatcgggatcgcgacagggagagagacagagacagggaccgggaccgtgacagagatcgggagcgggaccgggatagggaaagggatcgcgatcgagacagggaaggtccgtttcgcaggtccgattcatttccagaacgccgagctcctagaaagggtaacaccctctatgtgtatggggaggatatgacaccaaccctcctgaggggagcgttctctccatttggaaacatcatagacctgtccatggatcccccccgtaactgtgcgttcgtcacttacgaaaagatggaatcagccgaccaggctgtggctgagcttaacgggacccaggtagaaagtgttcaactcaaagtgaacatcgctcgaaagcagccgatgctggacgcggccaccggcaaaagtgtctggggctccttagccgttcagaactcaccgaaggggtgtcaccgggataaaaggacccaaatagtgtattctgacgacgtgtataaggaaaacctggtggatgggttctag

SEQ ID NO: 131912 - DNA, 1164 bp, synthetic construct
  misc_feature 1..1164: note = Description of Artificial Sequence: Synthetic coding sequence
  source 1..1164: mol_type = other DNA
atggtgcctaaaggggcaacgatgctggtgattccgcccggactcagtgaggaggaggaggcactccagaagaaatttaacaagctgaaaaaaaaaaaaaaagccttgctagcactcaagaagcagtctagctctagtaccacaagtcagggcggggtgaagagaagcctgagcgaacagcccgtgatggacactgcaaccgcaaccgaacaggctaagcagctcgttaaatctggggcgatctccgccatcaaggccgagaccaagaattccggtttcaagcgcagccgcacactcgaaggtaagcttaaggaccccgaaaaggggccagtgcccaccttccaaccattccagaggtccatcagcgccgacgacgacctgcaggagtcatcccgtaggccgcagaggaaatccttgtatgagagttttgtctccagctccgatagactgagggaactggggccagatggtgaagaggctgagggtcctggcgccggggacggtcctccccgctcctttgactggggttatgaagagagatctggtgctcacagctctgccagtcctccaaggtctcgcagtcgcgaccggtctcacgagcgtaatagggacagagatagggaccgagaacgcgaccgggatcgtgatcgggatcgtgatcgtgaaagggaccgggaccgcgatcgcgacagagatcgcgaccgcgaacgcgatcgggacagagaaagggatagggatagagacagagaaggcccttttcgtaggtcagacagctttcctgagcgcagggcaccaaggaaggggaatactttatacgtgtacggggaggacatgacccctacactgttgagaggagcgttttcgccttttgggaatattattgacctctctatggatccacctcgaaattgcgctttcgtcacctacgagaaaatggagagcgccgaccaagccgttgcggagctgaacgggacccaggtagaatctgttcaacttaaggtgaacatcgcccggaagcagcccatgctggacgctgccacaggcaagtcggtgtggggcagcttggcagtccaaaattctcctaagggctgccacagagataaacggacacagatcgtgtattccgacgatgtatataaggaaaatctggtagatggattctag

SEQ ID NO: 131913 - DNA, 1164 bp, synthetic construct
  misc_feature 1..1164: note = Description of Artificial Sequence: Synthetic coding sequence
  source 1..1164: mol_type = other DNA
atggtgccaaaaggtgcgacaatgctggttatccccccagggctcagcgaagaggaggaggccttacagaagaaattcaataaacttaagaaaaagaagaaagccttactggctcttaagaaacagtcgtccagtagcacaacttctcagggcggagtgaagagatctctctctgagcaacctgtgatggacacagctactgccacagagcaggcaaagcagctggtgaaaagcggtgcaatttctgcaataaaagcagagactaagaatagtggattcaaacggtcaagaacattggaagggaagctgaaggacccagagaaaggccccgtgcccaccttccagcctttccagcgctccatcagtgccgacgatgatctccaggagagtagccggcggccgcaacgcaaaagcctgtatgaaagtttcgtctcatcttctgatcgccttcgggaactgggccctgatggagaagaagctgagggcccaggcgctggtgatggtccgcctcgcagcttcgactggggatacgaggagaggagcggggcccactcgtcagctagccccccccgatcaaggtctagggatagatctcatgaacgtaaccgggatagagaccgcgacagggagcgagatcgtgatagagatagggaccgcgaccgggagagggatagagaccgagaccgggaccgggacagggaccgtgaaagagacagagaccgcgaacgtgatagggatcgggatcgagaggggccttttagacggtctgactcatttccagaacgcagggcccctcgtaaaggtaatacactgtacgtgtatggggaggacatgactcccactctcctgcgtggagccttttcgcctttcgggaacatcatcgacctgtccatggaccctccacgtaactgtgcattcgttacttacgaaaagatggagtccgcagatcaagctgtcgctgagctaaacgggactcaagtggagtctgtacaactcaaggtgaacatcgcccgtaagcagccaatgctggatgctgccacagggaaatccgtctggggatcccttgccgttcagaacagcccgaaaggatgccatcgtgacaagagaacacagattgtttacagtgatgacgtgtataaggagaacctggttgatgggttttag

SEQ ID NO: 131914 - DNA, 3294 bp, synthetic construct
  misc_feature 1..3294: note = Description of Artificial Sequence: Synthetic coding sequence
  source 1..3294: mol_type = other DNA
atggccacacaggtcatggggcaatcctccggcgggggaggactgttcacttccagcggtaatatcgggatggctctgcctaatgacatgtacgatcttcatgatctaagcaaggcagagctggccgctccccagctcataatgctggcgaacgtcgcactcactggcgaagtcaatggcagttgttgtgattacctggtcggggaagaacgccagatggccgagcttatgcctgttggcgataacaactttagtgatagcgaagaaggggaaggattggaggagtcggccgacatcaaaggcgagccacacgggctggagaacatggaactgcgttccttagaattgagcgtcgtggaacctcagcctgtttttgaagccagtggagctccagatatttatagcagcaacaaggacctacccccagagacccctggagctgaagacaaaggcaaatccagcaagaccaagccatttagatgtaaaccttgtcagtacgaagccgagagtgaggaacaattcgtacaccatatcagggtgcactccgcaaaaaaatttttcgtggaggagtccgctgaaaaacaggcgaaagcccgagaatccgggtcctctacggccgaggaaggagacttctccaagggtcccattaggtgtgaccgatgtggatacaataccaatcgctacgatcattatactgctcacctgaaacaccacaccagagcaggtgacaacgagagagtttataagtgcataatctgcacatacactaccgtgtctgagtaccactggcggaaacacttgagaaaccattttcctaggaaggtctacacatgcggcaagtgtaactatttctccgacaggaagaacaactacgtgcagcacgtcaggacccacaccggagagagaccctataaatgtgaactttgcccatattccagtagtcagaaaacccacctgactcggcacatgcggacccattcaggcgaaaaaccttttaaatgcgaccaatgttcttacgtcgcttccaatcagcatgaggtgactaggcacgccagacaagtccataatggccccaaaccacttaactgcccccattgcgattataaaactgcggaccggtctaattttaagaagcacgtcgagttgcacgtgaatccgcgtcaattcaactgcccagtctgcgattacgccgcatcaaagaagtgcaaccttcagtatcacttcaagtcaaagcatcctacttgcccaaacaagacaatggacgtgtctaaggtgaagcttaagaagacaaaaaagagagaagccgacttgcctgataacatcaccaatgagaaaacagaaattgaacagaccaagattaaaggtgacgtcgccgggaagaaaaatgaaaagtccgtgaaagctgagaaaagagacgtctccaaagagaaaaagccatctaacaacgtgtctgttattcaggtaactacccgaaccaggaaatctgtaaccgaggtgaaggaaatggacgtccacaccggatcgaattccgagaaatttagcaagaccaaaaagagcaagcgtaaattggaggtcgacagccatagcttgcacggtccagtcaacgatgaggaaagctctacaaagaaaaaaaagaaagttgaatctaagtctaaaaacaacagccaggaagtacccaagggggactcaaaggtggaagagaacaagaagcaaaacacttgcatgaagaagagcacgaaaaagaagacgttaaagaataaatccagcaagaagtcaagcaagcctcctcagaaggaacccgtggaaaagggttctgcccaaatggacccgccgcagatgggccccgcccctacagaggctgtacagaagggacccgtccaagtggagcccccgcctcctatggagcacgcccagatggaaggagctcagatcagacctgcacccgatgagcccgtgcaaatggaggtggtgcaggagggccccgcccagaaagaactcctccctcctgtggaacccgctcagatggttggcgcacagatcgtgctggcccatatggaactccccccacctatggagacggcacaaactgaagttgcgcagatgggtcccgcgcctatggagccagcacagatggaggtggcccaggtggagagcgctcctatgcaggttgtgcagaaagagcccgtacaaatggagctgtctccgcctatggaggttgtgcaaaaggaaccagttcagatcgaactaagcccgccaatggaggtggtccagaaggaaccagtcaaaatcgaactttccccccctatcgaggttgttcagaaagagcccgtgcagatggagctgagccctccaatgggcgttgtgcaaaaagagccggcacagagggaaccccctcctcccagggaacctcctttgcatatggaaccaatctccaaaaagccccccttgagaaaagataaaaaggagaaaagcaacatgcagtccgagcgtgcacgcaaggaacaggtccttatcgaagtcggactggttcctgtgaaggacagttggctgctgaaggagtcagtgtccacagaagacctctcaccacctagtccacccctgccgaaggaaaacctccgtgaggaggcttcaggagaccagaaactgctcaatactggagaaggaaataaagaagccccccttcagaaagtaggggcggaggaggccgatgagagccttccagggctggcagctaacataaacgagagcacacacatcagctcatctgggcagaaccttaacactccggagggagagaccctgaacgggaaacatcagactgattcaattgtatgcgaaatgaagatggatacagaccagaacacaagagagaatctcacaggcatcaatagcaccgtcgaagagccggtgtctcctatgctgcctcccagtgctgtggaagaacgagaagcagtctcgaaaacagccctggcttctccccctgcgacaatggccgccaacgaaagccaggaaattgatgaagatgaggggatccactcccatgagggcagcgacctatccgataacatgtctgagggctcagatgatagtggactccatggcgctcggcctgtgccacaggaaagctcccgcaagaacgccaaagaggccctagccgtaaaggcagcgaagggggattttgtgtgcatattctgcgatcggtcctttcgaaagggcaaggactacagcaagcacctgaaccgccatctggtgaacgtttattatcttgaggaggctgcccagggtcaggagtag

SEQ ID NO: 131915 - DNA, 3225 bp, synthetic construct
  misc_feature 1..3225: note = Description of Artificial Sequence: Synthetic coding sequence
  source 1..3225: mol_type = other DNA
atggccactcaggtcatgggccaaagctcagggggcggaggcttgtttactagcagcggcaatatcggcatggcgctacctaatgatatgtacgacctgcatgatttatcaaaggcggagcttgcagcacctcagctcatcatgttggccaacgttgcgctcaccggcgaggtgaatggatcctgttgtgattacctagtcggcgaagaaagacagatggctgagctgatgcctgtcggcgacaataacttctctgactccgaagaaggcgaggggctggaagaaagcgccgatattaagggggagccccatggccttgagaacatggagctcagatccttggagctctctgttgtggagcctcagcccgtgttcgaggctagcggtgctccagatatctattccagtaacaaagacttgcctcctgagactcctggggctgaagataagggcaaatcttctaagacgaagccctttcgatgtaaaccttgccagtatgaggccgagagtgaagaacagttcgtgcaccacatccgcgtgcactccgctaagaagttcttcgtggaagaatcggcagagaaacaggccaaggccagagaatctggcagttcaacagccgaagaaggggacttcagcaagggacctatcaggtgtgatcggtgcgggtacaacacaaatcgctacgatcactacactgcccatctgaagcatcacacaagagctggagataatgagcgagtatacaagtgcattatatgtacatatacaaccgtgagtgagtaccattggaggaaacacttacgcaaccacttccctcgcaaagtttacacttgcggcaaatgtaattacttctctgaccgcaagaacaactatgtgcaacacgtcaggacccatacaggaaagcgacctagcggtgagaagccttttaaatgcgaccagtgttcttacgtggcaagcaatcaacacgaggtgactcgtcacgccaggcaggtgcacaatggcccaaaacccctgaactgccctcactgtgactataagactgcagatagatccaacttcaagaagcatgtggaactgcacgtgaatcctaggcaattcaattgccccgtttgtgattatgctgccagtaagaagtgcaatcttcaatatcacttcaagtccaagcaccccacttgtccaaacaagaccatggacgtgagcaaagttaagcttaagaaaaccaagaagcgggaggctgatctgcccgacaatattactaacgagaagaccgagatcgagcagaccaagataaagggggatgtcgccggcaagaagaatgagaagtctgtcaaggcagagaaacgggatgtgagcaaggaaaaaaagccgagcaacaatgtttctgtgattcaggtgacaacccggactcgaaaatcagtcacggaagtgaaagagatggacgtgcatactggtagcaactcggaaaaatttagcaaaactaagaaatcaaaaaggaagcttgaagtggatagccactcgctacacggccccgttaacgacgaagaatcttcaacaaagaagaagaagaaagtcgaaagtaagagcaaaaataatagccaagaagtaccaaagggagattcaaaggtggaggaaaataagaaacagaacacatgcatgaaaaagtccacaaagaaaaaaactctgaaaaataagtctagtaaaaagtcctccaaaccccctcagaaggaacctgtggagaagggttccgcccaaatggaccctccccaaatggggcccgcccctaccgaggcagtacaaaaagggccagtacaggtggagcccccgcccccaatggagcacgcccaaatggaaggtgctcaaatcaggccggctccggacgaaccagtccaaatggaggtcgtccaggaggggcctgcacagaaggagctgctccccccagttgagccagcccagatggtgggcgcccagattgtcttggcacatatggaattaccacccccaatggagacagcacagacagaggtggcgcagatgggaccagctcccatggaacctgctcagatggaggtggctcaagtcgagtccgctcctatgcaggtggttcagaaggagccggtacagatggaactgtctcccccaatggaggtggttcagaaggagcccgtccagatagaactctcaccccctatggaggtggtgcagaaggagcccgttaagatcgaattaagcccacccatagaggtagtgcagaaggagccagtgcagatggagctcagccctccaatgggtgtggtgcagaaagagccagcccagcgcgagccccctcctccccgggagccccctctccatatggaacccatctccaaaaaacccccattgagaaaggataagaaggagaagtcaaatatgcaatccgagcgggcccgcaaggagcaagttttaattgaagtgggcctggtcccagtgaaagattcctggctgctgaaggagtccgtcagcactgaggatctatccccacccagcccacctcttccaaaagagaatctcagagaagaggcttcgggagatcagaagttgcttaacaccggagagggaaataaggaagcgcctttgcagaaggtcggcgcagaagaagccgatgagtccctgcccggcctggctgccaacattaatgaaagcacccacatctcaagcagcggacaaaatttgaatacacccgagggggagacgctgaacgggaaacaccagacagattctattgtgtgtgaaatgaagatggacacagaccaaaacactagggagaatctgaccgggattaactctacagtagaagagccggtttcacctatgctgcccccaagcgcagtggaagaaagagaagccgtgtccaagaccgcactggcgtccccacctgcgaccatggctgctaatgaaagccaagaaatagatgaggacgagggtatccactctcacgagggcagtgacctgagcgataacatgtccgaaggatccgacgattctggtctccacggagccagaccggtgccacaagagagctcacggaaaaatgcgaaggaagcactggctgttaaagccgctaagggcgatttcgtgtgtattttctgcgaccggtcctttagaaaaggcaaagattattccaaacacctgaacagacacctggtaaatgtgtactacctggaggaggctgcacaaggtcaggagtag

SEQ ID NO: 131916 - DNA, 1383 bp, synthetic construct
  misc_feature 1..1383: note = Description of Artificial Sequence: Synthetic coding sequence
  source 1..1383: mol_type = other DNA
atggctacacaagtgatgggacagtcatctggtggcggtgggctctttaccagctcgggaaacattggaatggccttgcccaacgacatgtacgacctccacgatctttccaaggctgaattagccgccccccagctgatcatgctagcaaatgtagctcttacaggcgaagtcaacggctcatgttgtgattacttagtgggagaggaaaggcagatggctgaactcatgccggtgggcgacaacaatttctccgattcagaggaaggtgagggtcttgaggaaagcgccgacattaagggcgagccccacgggctggagaacatggaactacgatcccttgagctgagcgtcgtcgagccccaacctgtgttcgaggccagtggagcaccagacatctatagcagcaataaggatttgccgcccgagacacctggtgccgaggacaaaggtaaatcaagcaagacaaagccctttaggtgtaagccctgccaatacgaggcagagtctgaagaacagttcgtccatcacataagggttcactctgccaagaagtttttcgtggaggagagcgccgaaaaacaggctaaagccagggaatcgggctctagtaccgctgaggagggcgatttcagcaagggaccaatccggtgcgatagatgcggatacaatacgaatcggtatgaccactataccgcccatctcaagcaccacacgagagcaggtgacaatgagcgcgtatataagtgtattatctgcacttacacaaccgtgagcgagtaccactggagaaaacacctgcgaaaccactttcctaggaaggtgtacacatgtggtaagtgcaactatttcagcgatcgtaaaaataactatgtgcagcacgtgcgtacacatacaggggagagaccgtataagtgtgaactgtgtccatacagctcttctcagaagacacatctaactagacatatgaggactcacagcggcgagaagccttttaagtgtgaccagtgttcatatgtagcctctaatcaacacgaggtcacgagacacgcgcgacaggtccacaacggaccaaaacctcttaactgccctcattgcgactacaaaaccgcagaccgctctaactttaagaagcatgtggaactacatgtcaaccccaggcagttcaactgccccgtttgcgactacgccgcgagcaaaaaatgtaatttgcagtatcatttcaagtcgaaacaccctacctgccccaacaagacaatggacgtctccaaagtgaaactgaaaaagacaaagaaaagagaagcggatctgccggataatataacgaatgaaaagactgaaatagagcaaacaaagaaaaagaagaagaaaaaaaagaaatag

SEQ ID NO: 131917 - DNA, 5745 bp, synthetic construct
  misc_feature 1..5745: note = Description of Artificial Sequence: Synthetic coding sequence
  source 1..5745: mol_type = other DNA
atggctgacggaaaaggggatgctgcggctgtggcaggcgcgggcgcagaagcccccgccgtggccggtgcgggagatggagtcgagacggagtctatggttcgtggccatcggccagtgtctcctgctcctggagcaagcgggctccgtccctgcctgtggcagctggaaaccgagctaagagagcaggaagtgtccgaagtttccagcttgaactactgtaggagcttctgtcagacacttctccagtatgcttcaaacaagaacgcatctgagcatatcgtttatctgttggaagtctataggctggccatccagtccttcgcatccgccaggccctacttgactacggaatgtgaagacgtcctgttggtgctgggcagattggtcttgagctgcttcgagctcctgctgagtgtcagtgagtctgagcttccctgcgaagtgtggctgccttttctgcagtcgctgcaggagagtcatgacgccctcctggagttcggtaacaataatctgcaaattctggttcacgttaccaaagagggggtgtggaagaatccggtgttgcttaagattctatcccaacagcctgtggaaacagaagaggtcaacaagctgatagcccaggaaggcccatcctttctccagatgaggattaaacacctcctcaaatctaattgcatcccacaggcgacggcactgtccaaactttgtgcagaatccaaagaaatcagcaacgttagttcatttcagcaggcctacatcacgtgtctgtgcagcatgttaccaaatgaggatgctatcaaagagattgctaaagtcgattgcaaagaggttctggacattatttgcaacctcgagagcgaaggacaggacaatacagcgttcgtgctgtgtaccacgtatcttacccagcaactccagactgcaagtgtgtactgttcctgggagctcacattgttctggagcaagctacagcggcgcatcgaccccagcctggacacatttctagagcgctgtcggcagttcggcgtgatcgccaagacgcagcagcacctgttctgcctgatccgcgtcatccaaaccgaagctcaggacgccggcctgggtgtctctattttgctctgcgttcgcgctctgcagctgcggagttccgaggatgaggagatgaaagcgagtgtatgcaaaaccattgcctgccttcttcccgaggacctggaagtcagacgcgcttgtcagctgacggaattcctaatcgaaccgtccctagatggatttaatatgttagaagagctctacctgcagccagatcagaaattcgacgaggaaaatgctcctgtgcccaactccctaagatgtgaactgctgctggctctcaaagcccactggccattcgatcctgaattctgggactggaagacactcaaaaggcactgccaccagttactgggtcaagaagcctcagattcagatgatgatttgtcaggctatgagatgagcatcaacgacaccgacgtcctcgaatccttcctttccgactatgacgagggtaaagaagacaaacaatataggcgaagggatctgacagatcagcataaggaaaagagagacaaaaagccaatcgggtcaagcgaaagatatcagcgttggctgcagtacaaattcttctgcctgctgtgcaagagagaatgtatcgaggcccgcatactgcatcacagtaaaatgcacatggaggacggaatatacacatgtcccgtgtgcatcaagaagttcaaaaggaaggagatgtttgtgccccacgtaatggaacacgtgaagatgcccccctccaggcgtgataggtcaaagaagaaattactccttaagggctctcaaaaaggaatttgcccaaaatcaccaagtgccattccagagcaaaaccatagcctcaatgaccaggctaaaggggaaagccatgagtacgtaacattctccaaactcgaggactgccatttgcaggaccgggatctgtacccctgtcccggtactgactgctctcgggtgtttaaacagttcaagtacctcagcgtccacttgaaagccgaacaccagaataatgatgagaatgcaaagcactatctggacatgaaaaacagacgggaaaagtgcacctactgcagacggcacttcatgtctgcgtttcacctgagagagcatgagcaggttcattgtgggccacagccatacatgtgcgttagtatcgactgctatgcccgctttggttcagtaaacgagttgttgaaccataaacagaagcacgacgacctgagatataaatgcgaactgaacgggtgtaatatagttttcagcgacttggggcagctgtatcatcacgaagctcagcattttagggacgcctcgtatacctgcaactttcttggctgtaagaagttctactatagcaaaatcgagtatcagaaccacctaagtatgcacaacgttgaaaactctaacggtgatattaaaaagtccgtgaagctagaggagtctgcaactggcgagaagcaggactgtattaaccagcctcatctcctcaaccagacagacaagagtcaccttcctgaggacctgttttgcgccgagtcagcaaacagccaaattgacactgaaaccgccgagaacctgaaggagaatagtgacagcaatagttccgaccagctgagccattcaagctcggcaagcatgaatgaagagctgattgatactctggatcatagtgagaccatgcaagacgtgctgctgtccaacgagaaggtttttggaccttcaagtctgaaagaaaaatgttcgtctatggccgtgtgcttcgacgggaccaagttcacttgtggtttcgatgggtgtgggtcaacctacaaaaacgctagaggaatgcaaaagcatctccgcaaagtacatccataccactttaagcccaagaagatcaagacaaaggatctgttcccgagcctaggtaacgagcataatcagacaacggaaaaacttgatgccgagcccaaaccatgctcggacacgaactctgacagtcccgatgagggcctcgaccataatatccatattaagtgtaagcgcgagcaccaaggctacagcagcgagagttccatatgcgcatctaagcgtccatgcacagaggatacaatgctggaattacttttgaggctgaaacacctgagcctgaaaaattctattacgcatggaagctttagcggatcattgcaagggtaccctagcagcggcgctaagtcactgcaaagcgtctcaagcatttcagacctcaacttccagaaccaggatgaaaacatgccatcacaatacctggcccagctggcagccaagccgttcttttgcgaacttcaggggtgtaagtacgagttcgtaaccagggaggcactgctcatgcactacctcaaaaaacacaattatagtaaagaaaaagtgctccagcttacaatgttccagcaccggtattccccctttcagtgtcacatctgtcagagatcattcacaaggaaaacccatctgcggatccactacaagaataagcatcaaatcggatccgaccgggccacacacaaactgctcgataatgaaaagtgcgaccacgaaggaccatgtagtgtcgatcggctgaagggcgactgcagcgcggagctcggtggggacccaagctccaatagcgagaaacctcattgccatcccaaaaaggacgagtgctccagcgaaaccgacctggaatcctcatgcgaggaaaccgagagtaagacaagcgatatcagttcccctatcgggtctcatagagaagagcaggagggcagggagggccgggggagcaggcggaccgtagcaaaaggtaatctgtgttacatcttgaacaaataccacaaaccatttcattgcattcataagacctgtaactcatccttcacaaacctcaaaggcctcatcagacactatcgcaccgtgcaccagtacaacaaagaacaactctgtttggagaaagacaaagcccgcactaagagagagttggtgaagtgtaaaaagatttttgcttgcaagtataaagaatgcaacaagagattcctctgttctaaagcactagcgaaacactgttcagactctcataacctcgaccacatcgaagagcctaaggtgttgtccgaggctggttctgcagcccgattcagctgcaaccagcctcagtgccccgccgtattctacacattcaataagcttaagcatcatctgatggagcaacataacattgaaggggaaattcattcagactacgaaatccattgtgacctgaacggttgtggacagatcttcacacacagatccaactattcccaacacgtgtactacagacacaaggattattacgacgatctgttcaggagccagaaggtcgccaacgaacgtctattgaggagcgaaaaggtctgtcagaccgcagatacccagggacatgaacatcaaaccaccaggagatccttcaatgctaaatcaaaaaaatgcggactgattaaagagaaaaaagcgcctatctccttcaagaccagagccgaggccctgcacatgtgtgtggaacacagtgagcatactcagtatccttgcatggtccaaggttgcctgtccgtcgttaaacttgaaagtagcattgtgcgacattataagagaacccaccaaatgagtagcgcctacctggagcagcagatggagaatctggtggtgtgcgtgaaatatgggacgaaaattaaggaggaacccccttcagaagcagacccctgcataaagaaagaggagaacagatcgtgtgaatccgaacgaaccgagcacagtcatagcccaggcgattcttccgcccccatccagaacacggactgctgccactcatccgaaagggacggcggacagaaaggatgcattgagtctagcagtgtgttcgacgccgataccctgttgtaccgcgggacactgaagtgcaaccacagctctaaaactacaagcctggagcagtgtaacatcgtccaacccccacccccatgcaaaattgaaaacagtatcccgaaccccaatggtacagagtctggaacatatttcacctcttttcagctgcctctcccacggattaaggaatccgagacaaggcagcactcctccggccaagagaacacagtgaaaaacccaactcacgtcccgaaggaaaacttcagaaagcattctcagcccaggagcttcgacctcaaaacatataaacccatgggctttgagtctagcttccttaaatttatccaggagtccgaagaaaaagaagatgattttgacgactgggagccctcagagcatctgactctgtctaactcttctcagagcagtaatgacctcacaggcaacgtggtggccaacaacatggttaatgactctgagccagaagtggacatcccccattcctcaagtgactcgactatccacgaaaaccttaccgctattcctccattgatcgtagctgagacgacaaccgtgccctccctggagaacctacgggtggtgctggataaagcgcttactgactgcggcgagctggccctgaaacagcttcattatctgaggccggtcgtggtgctggaaaggtctaagttcagcaccccaatcctcgacctatttcctaccaagaagacggatgagctctgtgtaggttccagctag

SEQ ID NO: 131918 - DNA, 4824 bp, synthetic construct
  misc_feature 1..4824: note = Description of Artificial Sequence: Synthetic coding sequence
  source 1..4824: mol_type = other DNA
atgttctatcatgatctcttctacagagagttaaccctgttctggagtaagcttcagcgacggatcgacccgtccctggacacttttcttgaacggtgccggcagttcggagtaatagcgaagacccagcagcatctgttctgccttattcgcgtcatccaaaccgaagcccaggatgccggcttgggcgttagcatactactgtgtgtgcgtgccttgcagctacgctcttcagaggatgaggaaatgaaggcttcagtgtgcaagaccatagcatgcctgttgcctgaggatctggaagttcggagagcttgccaactgaccgaattcctgatcgagccatcattagatggttttaatatgcttgaggaactgtatctacagcctgatcagaaatttgacgaagagaacgcgcccgtgcctaacagcctgcgatgtgaactgcttctggcccttaaagcgcactggccttttgatccagagttctgggattggaagaccctgaagcgccactgccaccagttactcggccaggaggcgtctgatagcgatgacgatttgtctgggtatgaaatgtccatcaacgacacggacgtgctagaaagctttctctccgactatgacgaaggtaaagaagacaagcagtatcggcgccgggatttgactgatcagcataaggagaagagagataagaaacccatcggctccagtgagcggtaccagcgctggttacaatacaaattcttctgtctgttgtgcaagcgggagtgtatcgaggcccggattctccatcattctaaaatgcatatggaagatgggatctatacctgcccagtctgcataaagaaattcaagaggaaagaaatgttcgtgccccacgtcatggagcatgtcaaaatgccaccaagtcgacgggaccgttctaagaagaagcttctgcttaagggaagccagaaaggaatttgcccgaagagcccatccgcgatcccagaacagaatcacagtctgaacgatcaagcaaagggggaatcccatgagtacgtgaccttcagtaaacttgaggattgtcacctgcaagaccgcgacctctacccctgccccgggacagactgttcacgggtcttcaagcagtttaagtatctcagcgttcatctgaaagccgagcatcaaaacaacgacgagaatgctaaacattacctggacatgaaaaaccggagggagaaatgcacttactgcaggaggcactttatgtctgcattccatctcagggaacacgagcaggtgcactgtggcccccagccctacatgtgtgtctcaatcgattgctatgctcggtttggctcggtaaacgagttacttaaccataaacaaaagcatgatgacctaagatacaaatgtgagttaaacggatgcaatatcgtcttttctgatcttggccaactgtatcaccatgaggcgcaacatttccgggatgcttcctatacttgcaactttctaggctgcaagaagttctactactccaagatcgagtaccagaaccatctgtccatgcataatgtggagaattctaacggagatatcaagaaatcagtgaagctcgaagaaagcgcaacgggggagaagcaggattgcatcaatcagccccacctgttgaaccagaccgacaaatctcacttgcccgaggacctgttttgcgccgagtccgctaatagccaaatcgacaccgagaccgccgaaaatctgaaggagaatagtgactctaactctagcgatcagttaagtcattccagcagcgcctcaatgaacgaagagttgattgacacgttagaccatagcgaaacgatgcaagacgtcctcctgtccaacgaaaaggtgtttggcccctcctcgctgaaggagaaatgctcatctatggctgtgtgtttcgatggcacaaagttcacctgcggatttgatgggtgcggaagtacctataaaaatgcacgggggatgcagaagcacttacgaaaggtacatccctatcacttcaaaccgaaaaaaatcaaaacaaaggatctcttcccctctctgggtaatgaacataaccagaccaccgagaagttggatgcagaacctaagccatgcagcgacaccaactctgactcaccagacgagggcctggatcacaacatccatataaagtgcaaaagggaacaccagggatacagctcggaaagttcgatttgcgcatcaaaaagaccttgcacagaggatacaatgctggaactgcttctgcggctgaaacacctaagcttgaagaattctattactcacggctcgttcagtggatccctgcaaggttaccccagtagcggggctaagtcattacagtcagtgtcctctatttctgacctgaacttccagaaccaggacgagaatatgccgtcacagtatcttgctcagctggccgcaaagcccttcttttgtgagttgcaaggttgtaagtacgagtttgttactcgggaagcactgctgatgcattacctcaaaaaacataactacagcaaggagaaggttttgcagttaactatgtttcagcaccggtattccccctttcagtgccacatatgccagcgaagtttcacgaggaagacacatctgcggatacattataaaaacaagcaccagatcggcagtgaccgggctacacacaagctcctggataatgaaaagtgcgaccacgaagggccgtgttctgtggaccggttgaaaggagactgtagcgctgaactcgggggcgaccctagcagcaatagcgagaagccccactgccaccccaagaaagacgaatgctcctcagaaaccgatctggagtcaagctgcgaggagacagaatctaagactagcgacatttcctcacccatcgggagtcaccgtgaagagcaagagggcagggagggccggggctcccgacgcaccgtggctaagggaaacctgtgttacattctgaataagtatcataagccttttcattgcatccataagacctgcaattctagcttcaccaacctcaaaggtctaatacggcactaccggaccgtccatcaatacaacaaggagcaactgtgcctggagaaggacaaggctcgaacaaagcgcgaactggtgaagtgcaaaaaaattttcgcctgcaagtataaggaatgcaacaagcgcttcctgtgtagtaaagctctcgcaaagcactgctccgactcgcacaacttagatcacattgaagaacctaaagtgctgagcgaagccgggtcggcggcaaggttctcctgtaaccaaccccaatgccccgctgtgttttacaccttcaataagcttaaacaccatctcatggaacaacataatattgagggtgagatacattccgactatgagattcattgcgatctgaatgggtgcgggcagatttttacacaccggtccaactattcccaacacgtttattaccgacataaagactattatgatgacttattccgcagtcagaaagtggccaacgaacgattactacggtccgagaaggtgtgccagacagccgatacacagggacatgagcaccaaactacccgacggagttttaacgcaaagtccaagaaatgcggcctgataaaggaaaagaaagcccctatttccttcaaaacaagagcagaagctttgcacatgtgtgtcgaacatagcgaacatacccagtacccctgtatggtgcagggatgcttgtctgtcgttaagctggaatcatccattgtccgtcactacaaaagaactcatcaaatgagctcagcatacctcgaacaacagatggagaatctggtggtttgtgtgaagtacggaacaaagattaaggaggagcctcccagcgaggcagatccgtgcataaaaaaagaggagaacaggtcttgcgagagcgagagaaccgagcacagtcactcgccaggcgacagttctgcacctattcagaacacagactgttgccacagctcagagagggatggagggcagaaaggctgcattgagtcttcatctgtgttcgacgcagatacactgctgtaccggggaacgctgaagtgtaaccacagcagtaagacaacctcactcgaacaatgtaacatcgtccagccaccccctccatgtaaaatagaaaacagcatccctaacccaaatggcacagaatccggcacctatttcacttccttccagttgccactcccacgaattaaagagagcgagacacggcaacacagttctgggcaggaaaataccgttaagaatccaacacacgtccccaaggagaattttcggaagcacagccaaccacggtctttcgatctcaaaacctacaagccaatgggatttgaatccagcttcctaaagtttatccaagagagcgaggaaaaagaagatgatttcgatgattgggaaccgagcgaacacttgaccctttctaactcctcacagagttcaaacgatctgacaggcaatgtcgtagctaacaatatggtgaatgactctgagcccgaagtggacatcccccactcttcatctgactccacaatccatgagaacttgacagccatcccgcctctgatcgttgcagagaccaccacagtgccatccctggagaatttgagggtggtgctggataaggcattaaccgactgcggagagctggccctgaaacagctgcattaccttaggcctgtggtggttctggaacggtcaaagttttccacccccatcttagacctgttccccaccaagaagacagacgagttgtgcgtaggttcaagttag

SEQ ID NO: 131919 - DNA, 1641 bp, synthetic construct
  misc_feature 1..1641: note = Description of Artificial Sequence: Synthetic coding sequence
  source 1..1641: mol_type = other DNA
atgttttactatcccaacgtcctccagcggcatacagggtgcttcgcaacaatatggcttgccgccacgagagggtcaaggctggttaagcgggagtacctccgagtcaatgtggttaaaacgtgcgaagaaattttaaactatgtgcttgtacgagtccagccgccccagcccggcttgccaagaccaagattctctctttatctttccgcccagctacagataggggtcattcgcgtgtatagccagcagtgccagtatctcgttgaggacatccagcatattttagaacgactgcatcgggctcagttacagatccggattgatatggagacggaactgccaagtctgctccttccgaaccacttggctatgatggaaaccctggaagatgcacccgatccttttttcggaatgatgtctgtggatcccaggctaccttctccctttgatataccccaaataagacatctcctggaagctgcaatcccggagagggtagaggaaatcccgcccgaggtcccaactgaaccccgagaacccgagcgcatacccgtgaccgtactgccacctgaggccatcacaattcttgaggcagagcccatcaggatgctagaaatagaaggtgagcgggaactccccgaggtctccaggcgtgagctcgatcttctgattgctgaagaggaggccatcttactcgaaatccctcgactgccacctcccgctcctgccgaggtggagggcattggagaggcactgggaccagaagagctgcgcctgacaggatgggaacctggcgccctcttgatggaggtcacccccccagaagagttgcgactccctgcaccaccttcaccagagaggagaccgccagtacctcccccaccccgtcgaaggcgcagacggcgcttgttattttgggataaagagacgcagatttcacctgagaaattccaggaacagctacagacccgggcccactgttgggagtgtcctatggtgcaacctcccgagagaaccatcaggggtcctgccgagctgttccgcacgcctactcttagtggttggctcccccctgaactgctgggtctgtggacacattgcgctcagccaccacccaaggcccttcggcgcgagctgcccgaggaggccgcagcagaggaggagaggcgcaagatcgaagtgccatctgagatcgaggttcccagggaagccctggaaccttcagttcccctgatggtatccttagagatcagcctggaggcagctgaagaagagaagtctcgcattagcctaatccctcctgaggagcgatgggcttggcccgaggtggaagcacccgaagcccccgctttgcctgtggttccagaacttccagaggtccctatggagatgccactggtgctgcctcctgaactggaactgctgagcctggaggctgttcatcgagctgtcgcactggagctccaggccaaccgagagcccgatttctcgagtctggtgagtcctctgagtccgcgacgaatggccgccagggtgttttatctgctgctcgtcctgtccgctcagcaaatcctgcacgtgaagcaggaaaagccatatggacgcctgctgatccagccaggcccaaggtttcactag

SEQ ID NO: 131920 - DNA, 1590 bp, synthetic construct
  misc_feature 1..1590: note = Description of Artificial Sequence: Synthetic coding sequence
  source 1..1590: mol_type = other DNA
atgttttattatcctaacgtgctgcaaagacacaccggatgctttgctaccatttggttagccgccaccaggggaagccgcttggttaagcgggaatatctccgcgtgaacgtggtcaagacctgcgaagaaatacttaactacgtcctcgtcagggtccagccaccacagccgggtctgccacgtcctcgctttagtctgtatctatccgcacagctgcagattggcgtcattcgagtctatagccagcagtgccagtacttggtggaggacattcagcatatccttgaacgtcttcatagagcccagctgcagatccggattgatatggaaaccgaactcccctcgctccttctgcccaatcacctggccatgatggaaaccctcgaggacgcgccagatcccttctttggaatgatgtcagttgacccaagactcccctcccctttcgatatcccacagatccggcaccttctagaggccgcaatacctgagagggtcgaggagataccccccgaagttccaacggaacccagggagccagaacggatacccgtgacagtcctgccccctgaggccattactattcttgaggcagaacccatccgcatgctggagatcgagggcgagagagagctaccggaagtgtcacggcgggaattggacctcctgatagcagaagaagaggcaattctgctggagatccccagactgccaccacctgcaccggccgaagtcgagggaataggcgaagctttgggtcctgaagagctcagattgacagggtgggaaccaggagccctgcttatgaggcggccaccagtgcccccacctccccggcgtcggcgccggcggagactgttgttttgggataaagagactcagattagtccagagaagtttcaggaacagctacagactcgtgcacactgttgggagtgcccgatggtacaacctcctgagcggacaatacgcgggcctgccgagctgttccggacccccactttgagcggttggctccctcccgagctgctaggcctctggacccactgtgcccagcccccgcccaaagctctgcgcagagaactcccggaagaggccgctgctgaagaagagcgacgcaaaattgaagtgccctccgagattgaagtccctcgagaagcattggagcccagtgttcccctgatggtcagtcttgaaatttcgctggaggccgctgaagaagaaaagagtaggattagcctgatccctcctgaagagagatgggcctggcctgaggtggaggcccctgaggccccagctctgccagttgtaccggagctgccggaggtaccaatggaaatgccgttagtgttaccgcctgagttagagctgctatcacttgaagctgtgcaccgcgccgttgcactggaacttcaagctaatcgggaaccagatttcagctccctcgtcagccccttatctcccagaaggatggccgctagggttttctatctgcttcttgtactgagcgcgcagcagatactgcacgtgaaacaggaaaaaccatacggcaggcttctaattcaacccgggcccaggtttcactag

SEQ ID NO: 131921 - DNA, 225 bp, synthetic construct
  misc_feature 1..225: note = Description of Artificial Sequence: Synthetic coding sequence
  source 1..225: mol_type = other DNA
atgttctattaccccaacgtactgcaacgccatacgggctgcttcgccaccatttggctggcggctaccaggggcagcagactcgtgaaacgggagtacctgcgtgtcaacgtggtaaaaacttgcgaggagattctgaattacgtcctcgtgcgagtccagccgcctcagcctgggcttcccaggccgcgcttctcattgtacctatcagcccaactgcagtag

SEQ ID NO: 131922 - DNA, 1641 bp, synthetic construct
  misc_feature 1..1641: note = Description of Artificial Sequence: Synthetic coding sequence
  source 1..1641: mol_type = other DNA
atgttctattatccgaacgtgttgcagcgccatacaggctgttttgcgacgatttggttggccgcaactagaggctctcgtttagtcaaaagagagtatctgcgcgttaatgttgtcaagacttgtgaggaaatcctcaattacgtgctggtgcgggtccagccgcctcagcccggactccccaggcctagattctcactgtatctctccgcccagctacagatcggagttattagggtgtacagtcagcaatgtcagtatctggtcgaggatatacaacatattcttgagcgattacatcgtgctcagttacagataaggattgacatggagaccgagctgccttcattactgctgccaaatcaccttgcaatgatggagaccctggaggacgcacctgatcctttctttggaatgatgtctgtggatccccgccttcccagcccttttgacattccccagatcagacatctgttggaagcagccattccagagcgggttgaagaaattcctcctgaagtgccaactgaaccacgagaaccagagagaatccctgtgacggtcttaccacccgaggcaatcaccatactggaagccgagcccattaggatgctggagattgagggcgagagggaattgcctgaagtgtcacgccgggagctggacttactgattgccgaggaggaagctatccttttagaaatacccagactacccccacctgcacctgcagaagtggaaggaatcggcgaggcgctaggccccgaggagttgcggcttaccggctgggaacctggagcgctgttgatggaggtgaccccccccgaggagctgcgcttaccggccccccccagtcctgaacgcagaccaccggtgcccccccctccccgtcgacggaggagacgtaggctactcttctgggataaggagacccagatttctcccgagaaatttcaggagcagctgcagaccagagcgcattgttgggagtgccctatggtgcagccacccgagcgaacaatacggggacctgcagaactctttcgtactcccaccctttctggctggctgccgcctgagcttttgggtctgtggacacattgtgctcaaccaccgcccaaggcactgcggagggaactgcccgaagaggctgcagctgaggaagaaaggagaaagattgaagtccctagcgagattgaagttcctagagaagccctggaaccttctgtacctttgatggtgtccctcgaaatttcactagaggccgcagaggaagagaaaagcaggatatcgcttataccccccgaagagaggtgggcatggccagaagtggaggccccagaagcccctgcgctgcccgtggtacctgaactacctgaggtaccaatggagatgcctctggtcctgccacccgaacttgaactgctgtctttagaggcagtgcacagagccgttgccctggagcttcaggctaaccgcgaacccgacttttcaagcctagtgtccccactcagccctcggcgtatggctgctcgagtgttctatcttctcctcgtgctctcagcacagcaaattctacatgtgaagcaagagaagccctacggtcgcttgcttatacagcccggccctcgcttccactag

SEQ ID NO: 131923 - DNA, 699 bp, synthetic construct
  misc_feature 1..699: note = Description of Artificial Sequence: Synthetic coding sequence
  source 1..699: mol_type = other DNA
atggccggtgacaccgaggtgtggaaacagatgtttcaggagctaatgcgagaagtcaagccctggcacaggtggactctgcggccagataagggtcttcttcctaatgtgttaaaacctggatggatgcaataccagcaatggacatttgcacggtttcagtgctcttcctgttctcggaattgggctagcgcccaggtactcgtgctgttccacatgaactggagcgaggagaagagtcggggccaagtgaagatgcgggttttcacccaaagatgcaaaaaatgcccacaacctctgtttgaagacccagagttcactcaggaaaatatctctcgcattctaaaaaacctggtgttccggatcctgaagaagtgctatagaggacggtttcagctcatcgaagaagtcccaatgattaaggatatctcactagagggtccccacaactcagacaattgcgaagcttgcctgcagggcttctgcgcaggcccaattcaagtaacttctctgccacctagccagactcctagggttcactcaatttataaagtggaggaggttgtgaagccttgggccagtggcgaaaatgtctattcttatgcttgccagaaccacatctgccgtaatcttagcatattctgttgttgcgtgatcctgattgtcatagtggtgattgttgtgaagactgcaatctag

SEQ ID NO: 131924 - DNA, 741 bp, synthetic construct
  misc_feature 1..741: note = Description of Artificial Sequence: Synthetic coding sequence
  source 1..741: mol_type = other DNA
atggtagtcgacttttggacctgggagcagacttttcaggaattgattcaggaggcgaagcctagggctacctggactcttaaactggacgggaacctgcagctggattgcctggctcagggatggaagcagtaccagcaaagagcctttggctggttcaggtgttcttcgtgtcagcgcagttgggcctctgcacaggtccagatcctgtgtcatacatactgggaacattggacttcccagggccaggtgcggatgcggttattcggccagagatgtcagaagtgttcctggtctcagtacgaaatgcccgagttctcaagtgactcgacaatgagaatactcagcaacctggtacaacacattctcaaaaagtactacggcaacggtacaaggaaaagtcccgagatgccagtgattctcgaggtgtctctcgaagggtctcacgatactgcgaactgcgaagcctgtaccttggggatatgcggccaaggcctgaaatcgtgtatgacaaagccaagcaaatccctgcttccccatctgaaaacagggaattcctcaccgggcatcggtgccgtgtaccttgctaaccaggcaaagaatcagtctgctgaggccaaagaggctaagggcagtggttatgagaaactagggccctccagggatcccgacccattgaacatctgtgtgtttatcctgctgctggtgttcattgtcgttaaatgttttaccagtgagtag

SEQ ID NO: 131925 - DNA, 447 bp, synthetic construct
  misc_feature 1..447: note = Description of Artificial Sequence: Synthetic coding sequence
  source 1..447: mol_type = other DNA
atggccagggctttgtgccggttacccaggcgggggctttggctgctcctggcccaccatttattcatgactactgcctgccaagaagctaactacggcgctctgctcagagaactgtgtctcacccagtttcaggtggacatggaagctgtaggtgagacactttggtgcgattggggccggaccatcaggtcgtaccgggaactcgccgattgtacctggcatatggctgaaaagctcggatgtttctggcctaacgccgaggtggaccggttcttccttgctgtgcatggccggtacttccgatcctgcccaataagtggcagagcagtccgtgatcccccgggcagtatactgtacccctttatagtggtaccaataacggtcacactcttagtcactgccttggtcgtgtggcagtccaaacgcaccgaagggatcgtgtag

SEQ ID NO: 131926 - DNA, 381 bp, synthetic construct
  misc_feature 1..381: note = Description of Artificial Sequence: Synthetic coding sequence
  source 1..381: mol_type = other DNA
atgactacggcttgccaagaggcaaactacggggcattactcagagaactttgtctgacccagttccaggtcgatatggaggcagtgggagagacgctgtggtgcgactggggccgaaccattcggtcttaccgggagctggctgactgtacatggcatatggccgaaaaactgggatgcttttggcctaatgcagaggtggacaggttctttctggctgttcatggtagatatttccgaagttgtccaatctcggggagagccgtccgagatccaccaggttctattctgtatcctttcatcgtagtgccaataactgtgacattgctcgtgactgcattggtagtctggcagagcaaacgaaccgaggggattgtttag

SEQ ID NO: 131927 - DNA, 381 bp, synthetic construct
  misc_feature 1..381: note = Description of Artificial Sequence: Synthetic coding sequence
  source 1..381: mol_type = other DNA
atgacaaccgcctgtcaagaggcaaattacggcgcgctcctgcgggagctctgcttgacccagtttcaggttgatatggaagcggttggtgagaccttatggtgtgactggggacggactatccggtcttatagagaattggccgattgcacatggcatatggcggaaaagctggggtgcttttggcctaacgccgaagtcgatcggtttttcttggcagtccatggtaggtacttccgttcctgcccaattagtggtagagcggtgcgagatccgcccggaagcatcctctacccatttatagttgtgccaattacagtgacccttctggtgacggccttagtagtctggcagtccaaacggactgagggaatagtctag

SEQ ID NO: 131928 - DNA, 381 bp, synthetic construct
  misc_feature 1..381: note = Description of Artificial Sequence: Synthetic coding sequence
  source 1..381: mol_type = other DNA
atgaccaccgcttgccaggaagccaactatggtgccctcctccgagaactgtgcctgacacagtttcaagtggatatggaagcagtaggagagaccctgtggtgcgactggggcagaactatccgttcatatcgcgagctggcagactgcacttggcacatggccgagaagctaggctgcttctggcccaacgcagaggttgatcggttctttctagccgtgcacgggcgatatttccgatcttgtccaataagcggccgcgctgtacgcgacccccctggatccatactttacccgttcatcgtggtgcccataacagtgacactgctagtgaccgcactcgtagtttggcaaagcaagagaacagaaggcattgtatag

SEQ ID NO: 131929 - DNA, 528 bp, synthetic construct
  misc_feature 1..528: note = Description of Artificial Sequence: Synthetic coding sequence
  source 1..528: mol_type = other DNA
atggcctctcttcgggtcgagcgggctggtggcccacgactgcccagaacacgtgtcgggagaccagccgcactgagactgctgctattgctgggtgccgttctaaaccctcacgaagccctggcccagccactcccgactacgggcacaccgggatcggaaggtggaacggtgaagaactacgaaacggccgtgcaattttgttggaaccactacaaagatcaaatggaccccatcgagaaggattggtgtgactgggccatgatcagcagaccctactccacactgcgcgactgtttagagcatttcgctgagctcttcgatctcggttttcctaatccactcgcggagcggatcatcttcgagacccatcagattcacttcgccaactgttcgttggttcagcccacattcagtgacccgcccgaggacgtactcttggccatgattattgccccaatctgcttgatccccttcctcatcacattggtcgtctggaggtctaaggactccgaagcgcaggcgtag

SEQ ID NO: 131930 - DNA, 447 bp, synthetic construct
  misc_feature 1..447: note = Description of Artificial Sequence: Synthetic coding sequence
  source 1..447: mol_type = other DNA
atggaaaccggggccctgcgccgcccgcagctccttccgctgctcttgttgctctgtggagggtgtcccagagccggcggctgcaatgagactggaatgctcgagcggctgcctctgtgtgggaaggcctttgcagacatgatgggcaaggtggatgtgtggaagtggtgtaacctgagcgagtttatcgtgtattacgaaagcttcaccaattgtaccgagatggaggcaaacgtagtcggatgctactggcccaatcctctcgcccaaggcttcatcaccggaattcacagacagtttttttctaactgtacagtggaccgtgtccatttagaggatcctcctgacgaagtgctgatacctctgattgtgattcctgtggtgctgacggtggccatggcggggctggttgtctggcgaagtaaacggaccgacactttactctag

SEQ ID NO: 131931 - DNA, 447 bp, synthetic construct
  misc_feature 1..447: note = Description of Artificial Sequence: Synthetic coding sequence
  source 1..447: mol_type = other DNA
atggaaactggagctcttcgccggccacaactccttccactactgctgctgctgtgcggagggtgccctcgcgcaggaggatgtaatgaaactggcatgctggagcggctgcccctatgtggcaaggccttcgcagacatgatggggaaagtggacgtgtggaaatggtgcaatctgtcagaattcatagtgtattatgaaagttttacaaattgtaccgaaatggaggccaacgtggtcggctgctactggccaaacccattagcacaggggtttatcactgggatacatagacagttcttttctaattgtacagtagatcgggtccacctcgaggatccaccagatgaggtgcttatcccactgatcgtgatacccgtggtgctcaccgtagccatggctggcctggtggtttggcgtagcaagcggacagacacattgctgtag

SEQ ID NO: 131932 - DNA, 456 bp, synthetic construct
  misc_feature 1..456: note = Description of Artificial Sequence: Synthetic coding sequence
  source 1..456: mol_type = other DNA
atggagacgggtgccctgaggcgacctcagctactcccactcctgctgctgttgtgcgggggatgccccagagccgggggctgcaacgagaccggcatgctcgagcgcctgcctctgtgcggaaaggcatttgcagacatgatgggcaaggtggacgtgtggaagtggtgcaatctgtctgagtttattgtctactatgagtcatttactaactgtaccgagatggaggctaacgtggtcggatgctattggcccaacccactagcacaggggttcatcaccggtattcaccgccagtttttctctaattgcacagtggatagggttcatctagaggatcctcccgacgaggtccttatccctctgatcgtgattcccgtggtactcactgtagccatggccggactggtagtgtggcgatccaagagaaccgatacattgttatgcggaaactag

SEQ ID NO: 131933 - DNA, 606 bp, synthetic construct
  misc_feature 1..606: note = Description of Artificial Sequence: Synthetic coding sequence
  source 1..606: mol_type = other DNA
atggtgtcatggattatttctcgcttagtagtgctcatatttggcactctgtatccggcctattatagctataaggcagtaaaaagcaaagacataaaagaatacgtaaaatggatgatgtactggatcattttcgcgctgtttactactgccgagaccttcaccgacattttcctgtgctggtttcccttttattatgagctcaaaatcgcgtttgtggcatggttactttctccatatacaaaaggctccagtctgctttacagaaagttcgtgcatcccacactgagctctaaggaaaaggagatcgatgattgtcttgtgcaggccaaagatcgaagttacgatgctctggtgcacttcgggaaacgggggctgaatgtcgccgcaaccgctgcagttatggctgcaagtaaaggacagggggcactgtctgaaagactgagatcctttagcatgcaggaccttacaaccattcgcggggatggggcacctgccccctccggaccaccacctcccgggtccgggcgcgccagcggcaagcacggccagcctaagatgtctcgttcagcctctgagtctgcatcctccagcggtacagcctag

SEQ ID NO: 131934 - DNA, 525 bp, synthetic construct
  misc_feature 1..525: note = Description of Artificial Sequence: Synthetic coding sequence
  source 1..525: mol_type = other DNA
atggaccacttacaagcgggcggggttaaatggatgatgtattggataatttttgccctgtttaccacagctgaaacttttaccgatatctttctatgttggttcccattctattatgagctgaagattgccttcgtagcatggctgctgagtccgtatacaaagggcagctcattgctgtatcggaaattcgttcaccctaccttatcttcgaaagagaaggaaatagacgactgcctcgttcaggctaaagatcgtagctacgacgccctggtccatttcggtaagagggggttaaatgttgccgctaccgcagctgttatggcagcatccaagggccagggggctttgagcgaacgtctgcggagcttctctatgcaggacctgaccactatccggggtgacggtgctcccgcacccagcggacctcctcctccaggaagcggccgcgcctctggaaaacatggccaaccgaaaatgagccggtcggcctcagagtccgcctcttcatccggaaccgcatag

SEQ ID NO: 131935 - DNA, 627 bp, synthetic construct
  misc_feature 1..627: note = Description of Artificial Sequence: Synthetic coding sequence
  source 1..627: mol_type = other DNA
atgcaaaaagtgctgtctaacgggcagacagaggaagtacgatccggaagtaggctaatttttgggaccctgtacccggcatactactcatacaaggcagtgaaatccaaggacatcaaagagtatgtgaagtggatgatgtattggattatctttgccttgttcaccaccgcagagaccttcacagatatattcttgtgctggtttccattctattatgaactaaaaatcgcctttgtcgcctggctgcttagtccttacaccaaaggctcaagcttgttatacaggaagttcgttcaccccactctgtccagtaaggaaaaggaaatcgacgactgcctggtgcaggccaaggatagatcctatgatgcgttagtccatttcggaaaacgggggctgaatgtagccgccacagccgccgtgatggctgctagcaaggggcagggggccctttctgaacggctgcgtagctttagcatgcaggatctcaccactatacggggcgatggagcacctgcaccttcagggccgccgccgcccggctctggaagagccagtggaaagcatgggcagcctaagatgagtcgatcagccagtgaaagcgcctcaagcagcggaactgcttag

SEQ ID NO: 131936 - DNA, 543 bp, synthetic construct
  misc_feature 1..543: note = Description of Artificial Sequence: Synthetic coding sequence
  source 1..543: mol_type = other DNA
atgagtctgcatccttgccggctgaataacctgccaaaccaggtgaaatggatgatgtactggatcatttttgccctgttcaccacagcggagacgttcacagacatttttttatgttggttccctttctattacgagctgaagatagcttttgtggcgtggctcttatctccgtatactaaaggctcatcattactgtacagaaaatttgttcaccctaccttgagctccaaggaaaaagagattgatgactgtctggtgcaggctaaggaccggtcctacgacgctctggtgcacttcggcaagagaggcctgaatgtggcggcgaccgctgcagtgatggcggcctccaaaggccagggagccctgtccgagagactgaggagcttctccatgcaggacctcaccaccatccgcggtgacggcgcacccgccccttccgggccgccgcctcccggcagcgggcgcgcatccgggaagcatggccagcccaagatgtctcggagtgcctccgaaagcgcctcctcttcaggaacagcctag

SEQ ID NO: 131937 - DNA, 432 bp, synthetic construct
  misc_feature 1..432: note = Description of Artificial Sequence: Synthetic coding sequence
  source 1..432: mol_type = other DNA
atggtaagttggatcattagtcgcctcgtggtcctgatttttggaaccctatatccagcttattattcctataaggccgttaaaagcaaagatattaaggagtatgtcaagtggatgatgtactggatcatttttgctctgtttacgactgcagagactttcacagatattttcctctgttgggacagggtgccatatcgacgcgattgcggcgcatctgcctgccggacctcccccccttcaggcgagacggctccactcttacctagggctccccatcaccgtggcttgggcggccccgccgccaacaccgccagcttgaggtgtccaggggtcctcctgcgcgctcttgcagcccaggcacccccgaggatactaaggagccgattccggaagaaatccaccagtagctctgcaacggagactacttag

SEQ ID NO: 131938 - DNA, 759 bp, synthetic construct
  misc_feature 1..759: note = Description of Artificial Sequence: Synthetic coding sequence
  source 1..759: mol_type = other DNA
atggtgtcatggattatctcgcggctggttgtcctaatattcgggaccctgtatcccgcttactcatcatataaagccgtaaagaccaagaatgtaaaggagtatgtgaaatggatgatgtactggatagtctttgcgttttttacaacagctgagaccttaacggacatcgtgctgagctggttccctttttacttcgaactgaaaatagcctttgtcatttggctgctttcaccctatactaagggaagtagtgttctgtaccgcaagttcgttcaccccacactctctaataaagagaaggaaatcgatgagtatattacccaggcacgcgataagtcctacgagaccatgatgcgagttggcaaacgtggcctaaatctggcagctaacgcagccgtgacagccgccgccaaaggcgtactcagtgaaaaactccggtccttttcaatgcaggatctcactttgatccgggacgaggacgccctgcccctgcagaggccagatggtaggcttaggccctcccccgggagcctgcttgatacgatcgaggacttgggtgatgacccagccctctccctccgcagtagcacaaatcccgctgactctcggactgaagcctctgaggacgacatgggcgataaagcaccgaaacgcgcaaaaccaataaagaaggcccccaaggcggagccactggcttctaagacccttaagaccagacctaagaagaaaacaagcggtgggggcgatagcgcatag

SEQ ID NO: 131939 - DNA, 765 bp, synthetic construct
  misc_feature 1..765: note = Description of Artificial Sequence: Synthetic coding sequence
  source 1..765: mol_type = other DNA
atggtgtcctggattatctccagactggtcgtcttgatctttggcacactctaccctgcctactcgtcctacaaagccgtgaagacaaaaaacgtcaaggaatacgtcaaatggatgatgtattggatcgtgtttgcatttttcacaacagccgaaaccctaacggacatcgtcctatcctggttccccttttactttgaactcaagatcgcctttgtcatatggttactgtccccgtacaccaagggctcaagtgtcctgtacagaaaattcgtacaccccacactttccaacaaggaaaaggagatcgacgagtatattacccaggcaagggataaatcttacgaaactatgatgcgcgtcggaaagcgaggcctgaatttggcggctaatgctgccgttacagccgcggccaaaggccaaggggtccttagtgagaaacttcggtcgttctcaatgcaggacctgaccttgatccgagacgaggacgctcttcctctacagaggcccgacggccgcctgagaccatctcccggatcgctactggatacaatcgaggacctgggtgacgaccctgccttgagtctgagatctagcaccaaccctgccgatagtcggaccgaagcctccgaagacgacatgggagataaggccccaaaacgagcaaaaccaataaagaaagcaccaaaagctgagcctttggcatcaaaaacacttaagaccaggccgaagaagaagacttcgggaggaggagattcagcttag

SEQ ID NO: 131940 - DNA, 723 bp, synthetic construct
  misc_feature 1..723: note = Description of Artificial Sequence: Synthetic coding sequence
  source 1..723: mol_type = other DNA
atgttataccctgcctattacagttacaaggctgtcaagactaaaaatgtcaaagagtatgtgcgttggatgatgtactggattgtgtttgctctgtacaccgtcatcgaaaccgtagcggaccagactgtcgcctggtttcccctgtattatgaacttaaaattgctttcgtcatctggctactgagtccctataccaagggcgcaagcctgatttatcggaaattcctccacccactcctgtctagtaaagagagggaaatcgatgactatattgtccaagctaaagaacgtggatatgagacaatggtgaacttcgggcggcaggggctgaatctggccgccactgctgcagtaacggctgccgtgaaatcccaaggagctatcacggaacgcctccgtagtttctcaatgcatgatcttactactattcagggggacgagcctgtaggacagaggccctatcaaccgttacctgaagcaaagaaaaagagcaaacccgccccctctgagtcagctgggtacggcataccacttaaagacggagacgaaaaaaccgacgaggaagcagagggcccatatagtgataacgagatgctcacgcataaggggctgaggaggtcgcaatctatgaaatctgtcaagactacaaagggcaggaaggaagtccgctacggttccctaaagtataaagtgaagaaaagaccccaggtgtacttctag

SEQ ID NO: 131941 - DNA, 768 bp, synthetic construct
  misc_feature 1..768: note = Description of Artificial Sequence: Synthetic coding sequence
  source 1..768: mol_type = other DNA
atggtatcctggatgatcagtagagcagtcgtcctggtttttggcatgctttatcctgcctattattcctataaagcggtgaaaacgaaaaatgttaaggaatatgtgagatggatgatgtactggatcgtgttcgcactgtatactgtaattgaaacagttgcggaccagacagttgcatggtttcccctgtactatgaactgaagatcgccttcgtcatttggttgctgtccccctacactaagggtgcgtctctaatttacaggaaattccttcaccccttactctccagcaaggagagggaaatcgacgactatatcgtgcaagcaaaagagcgtgggtacgagactatggtcaattttgggcggcagggcctgaacctggctgccaccgctgcagtgacagccgccgtgaaaagccaaggcgcaattaccgagcggctcagatcattcagcatgcacgatctcaccaccatccagggtgacgagccggtcgggcaaaggccgtatcagccactccctgaggcaaagaaaaagagcaagcctgctcccagcgagtcagctggttacggcatcccgctgaaggacggagacgagaagactgacgaagaagcagaagggccatatagcgacaacgaaatgttaacccataaggggctgcgccggagccagagtatgaagagcgtaaaaaccactaaaggtcggaaagaagtgcgctatggcagcctaaagtacaaagtcaagaaaagaccccaggtctacttttag

SEQ ID NO: 131942 - DNA, 774 bp, synthetic construct
  misc_feature 1..774: note = Description of Artificial Sequence: Synthetic coding sequence
  source 1..774: mol_type = other DNA
ctcatgatgtggctcttggttgagagggccttaattcagttggtctttgggatgctatacccggcttactactcatacaaagccgttaagaccaagaacgttaaggaatatgtacggtggatgatgtactggatagtgtttgctctgtatacagtgatcgagacagtggcagaccaaaccgtggcctggtttcccctgtactatgaactgaagattgccttcgtcatctggttattgagcccctacaccaagggagcatcactcatctataggaaatttctacaccccctgctgtctagcaaggagagagaaatagacgactacatcgtacaggccaaagagagaggttatgagacaatggttaatttcgggaggcaaggactgaatctcgctgccactgctgccgtgaccgccgctgttaaaagtcaaggggccattacagaacgcctgagaagcttttcaatgcatgatctgactactatacagggcgatgagcctgtcggccaacgcccttatcagcccctcccggaagccaagaaaaagtccaaaccagctccatctgagtcggccgggtacggaattcccttaaaggacggagacgagaagaccgacgaggaggcagagggaccgtattccgacaacgagatgctaacgcacaaaggcctgcggcgatctcagagcatgaagtctgtcaaaacaaccaaagggcgaaaagaggtaagatacggttctctcaaatacaaagtaaaaaaacgcccccaggtctacttttag

SEQ ID NO: 131943 - DNA, 774 bp, synthetic construct
  misc_feature 1..774: note = Description of Artificial Sequence: Synthetic coding sequence
  source 1..774: mol_type = other DNA
atggtgtcttggatgatctgtcggctggtcgtcttggtgtttggaatgctttgtccagcctacgcgtcctacaaggcagtaaaaaccaagaatattcgggaatatgtcaggtggatgatgtactggattgtgtttgccctgttcatggccgcggagattgtgactgacatcttcatctcttggttcccattctactatgaaatcaagatggctttcgtgctgtggcttctgagtccttacacaaagggcgcctccctgctatacagaaagtttgtgcatccatcactgtctagacacgagaaggaaatagatgcttacatagttcaagccaaagagcgatcttatgaaaccgttctgtcttttgggaagcgggggctaaatatcgcagcttccgctgccgtgcaggctgccactaaatcacagggggcattggccggccgcctccgctcattctcgatgcaggacctacgcagcatcagcgatgcaccagccccagcttatcatgatcctctgtatttagaggatcaggtgtcgcacaggaggcccccgatcggctaccgggccggcggcctgcaggactctgacacagaggatgagtgttggtccgacactgaggccgtgcccagggctcccgcgcgaccacgcgagaagcctctcatccgctcccagtcgctgagagtggtgaagcggaagccgcccgtgagagaagggacctcccgcagtctcaaagtcaggactaggaagaagaccgtaccatcagacgtagatagttag

SEQ ID NO: 131944 - DNA, 522 bp, synthetic construct
  misc_feature 1..522: note = Description of Artificial Sequence: Synthetic coding sequence
  source 1..522: mol_type = other DNA
atggtgtcgtggatgatttgtagactcgtggttctggtcttcggtatgctttgtcctgcttatgctagctataaagctgtgaagacaaagaacataagggagtatgtcagatggatgatgtactggatcgtctttgcattgtttatggccgccgagatcgtgactgacatcttcatttcttggtttccattctattacgaaatcaaaatggcctttgtcctgtggttgctgagcccatatacgaagggcgcctcactgctttatcgcaaatttgtgcatcctagcctctcccggcatgaaaaggagattgatgcgtatatcgtccaggctaaggagagaagttatgagaccgttttatctttcggcaagcgggggctcaacatcgccgcctcagctgcagtgcaggcggcaacaaaagggacgggccccggtgcttgtagaactgccacgccacgcatgagcgtcggtcagatactcaggcaaagccccggaagacaacctgggcctgagaggagcccttag

SEQ ID NO: 131945 - DNA, 570 bp, synthetic construct
  misc_feature 1..570: note = Description of Artificial Sequence: Synthetic coding sequence
  source 1..570: mol_type = other DNA
atgtcagccgctatgagagaacgctttgacaggttcctccatgaaaagaattgtatgaccgatctcctcgccaagctggaggctaagacaggggtcaacagaagttttattgccctaggcgtcatcgggcttgtggcgctgtatctggtgttcggatatggagcgagcctcttgtgcaaccttatcgggtttggctaccctgcttatatctccataaaagcaatcgagagtcctaataaggaggacgatacacagtggctgacttattgggttgtctacggcgtattttcaatcgcagaatttttcagtgacatttttctgtcatggttccccttttattacatgttgaaatgtgggttcttactgtggtgcatggccccatcaccgtccaatggagctgaacttctctacaagaggattatccggcctttttttctgaagcatgaaagtcagatggattcagtcgtgaaggaccttaaggacaaggcaaaagagacagccgacgcaattacaaaggaagccaaaaaagctacagtgaacttgctcggagaagagaaaaaatctacatag

SEQ ID NO: 131946 - DNA, 396 bp, synthetic construct
  misc_feature 1..396: note = Description of Artificial Sequence: Synthetic coding sequence
  source 1..396: mol_type = other DNA
atgtccgccgctatgcgcgagcggtttgaccggttcttgcacgaaaaaaactgtatgacggacctgctggctaagctcgaggcaaagacgggagtcaataggagctttatagcactgggcgtgataggacttgtggcgctttaccttgtctttggatatggggcttctctgctctgcaacctcattggtttcggctatccggcttacatctccatcaaggctattgagagtccgaataaggaggacgatacacagtggctgacctattgggtggtctatggcgtcttttccattgccgagtttttcagtgacatctttcttagttggtttcccttctactatatgctcaaggtgtggtctgggctcggattcttgctccctagatgcctgctgtag

SEQ ID NO: 131947 - DNA, 1413 bp, synthetic construct
  misc_feature 1..1413: note = Description of Artificial Sequence: Synthetic coding sequence
  source 1..1413: mol_type = other DNA
atgcacttcagtatacctgagactgaaagtagatccggtgactcaggcgggagtgcgtacgtggcttataatatccacgtcaatggagttctgcactgtcgggtcagatactcccaactacttggtttacatgagcagctgaggaaggaatacggcgccaacgtcctcccagcttttccaccaaagaagttgtttagccttactcctgctgaggtggaacagcgccgcgagcagctggagaagtatatgcaggcggtaagacaagacccattgttagggtcaagcgaaactttcaacagtttcctcagacgcgctcagcaggagactcaacaggtgcccactgaagaagtgtcgctcgaagttctactgagcaatggtcagaaagtgctagtgaacgtactgacttccgatcagacagaggacgtcctggaagccgtagctgcaaaattggacttgcccgatgacctcatcggctatttttctcttttcctcgttcgcgagaaagaggatggagcctttagtttcgtcaggaaactccaggaatttgagctgccctacgtatccgtgacctcgttgcggagccaagaatacaagatcgtgttgagaaagtcttactgggattccgcctacgacgacgatgttatggaaaatagagtggggttgaacctgctctacgctcagacagtgtcagatatagagcggggatggattttggtcaccaaagagcagcacagacagttgaagtcgcttcaagagaaggtgtccaagaaagagtttctgcggcttgcacagactctccggcactatggataccttcgcttcgatgcatgcgtggccgactttcctgagaaagactgccctgttgtggtgtctgccggcaattcagagctgtcactccaacttagactccccgggcagcagctgagggagggctcctttcgggttacacggatgaggtgttggcgagtgacttccagtgtgcccctgccatccggctccacttcatccccgggacgggggagaggggaggtgcgcctggagctggcttttgaataccttatgtccaaagatcgcctccagtgggtcacaataacatcacctcaagcaattatgatgagcatctgcctgcaatcgatggtggacgagctgatggtgaaaaaatccggcggtagcatccggaaaatgctgcggaggagagtcggcgggaccctccggaggagtgacagtcaacaggctgttaagtcccctcccctgctcgagtcacccgacgcaactcgggagagtatggttaagcttagcagcaaattgtccgccgttagtctgaggggcatcggctccccttctaccgacgccagtgcgtccgacgtccacggaaatttcgcctttgaaggtatcggcgacgaggacctgtag

SEQ ID NO: 131948 - DNA, 2814 bp, synthetic construct
  misc_feature 1..2814: note = Description of Artificial Sequence: Synthetic coding sequence
  source 1..2814: mol_type = other DNA
atgcatcggccccggaggagagggacacggcctcccttgcttgccctacttgccgccctcctgctggctgcgcgtggagccgccgcacaggagactgaactgtcggtgagtgcagagctcgtccctaccagctcttggaatatttctagtgagctcaacaaggactcctacctcacactcgacgagcctatgaataacatcaccacctccctaggacaaacagcagagttgcactgtaaagtgtccggtaaccctccacccaccatcagatggttcaagaacgacgcgcccgtggttcaagagccaagaaggctctccttccgctctacaatttacggaagtcggctcagaataaggaatctggataccacggacactggatactttcagtgtgtagccacaaacggcaaggaagtcgtgagtagtaccggggttctgttcgtcaagttcggcccccctccaacagcttcgcccgggtacagcgatgaatacgaggaagatgggttctgtcagccatatcggggcatagcctgcgctaggtttattggaaataggacggtctatatggagagcctccacatgcagggtgagattgagaaccagattacagcggcttttacaatgattggtacatctagccatctctctgataagtgctcgcagttcgccatcccttcactgtgccattacgccttcccttactgtgacgaaacttcgagcgtgccaaaacctagagacctgtgccgagacgagtgtgaaattctcgaaaacgtgctgtgtcagactgagtatatattcgcccgcagtaaccctatgattctcatgcgcttaaaactccccaactgcgaggacctgccacaacccgagtcccccgaggctgctaactgcatccgcatagggatcccaatggcggatccaattaacaaaaaccacaagtgttataacagtaccggagtggactatcgcggaacagtctctgtgaccaagtccggaaggcagtgccagccctggaattcacagtacccacacacccacaccttcacggctctgcggttccctgagcttaacggcggtcattcttattgtcgaaaccccgggaaccagaaagaagccccatggtgcttcaccctggatgagaacttcaagtcggatttatgcgatattcccgcttgcgactcgaaagacagcaaggaaaagaacaagatggagattttgtatatactcgtcccaagcgtggccatccctctggcaatcgcactcttattcttcttcatctgcgtttgtaggaataaccagaagtcttctagtgcacctgtgcagcgacagcccaagcacgtgcgggggcaaaacgttgagatgagcatgctgaacgcgtataagccgaagtcaaaggccaaagagttgccgctttccgctgttcggttcatggaggagcttggggaatgtgctttcggaaagatctataagggccacctgtacttacctggcatggaccacgcccagttggtagccatcaagaccctgaaagattataacaatcctcaacaatggactgaattccagcaggaagcctcactcatggcagagttacaccatcctaatatcgtctgtcttctgggggcggtgacccaggagcagcctgtatgtatgctttttgagtacatcaaccagggcgacctgcacgagttccttattatgcggagcccccattcagacgtcggctgttcctctgacgaagacggaacagtgaaatcgagcctagatcacggcgacttcttgcacatcgccatccaaattgccgccggaatggaatacctatcctctcatttttttgttcataaagacttagccgctagaaatattttgatcggggaacaactccatgtcaaaatttctgatctgggtttgtcaagggaaatctatagtgcagattattaccgcgtgcaatccaaatccctgctgccgattcgatggatgccacctgaggccatcatgtatggcaaatttagctccgactccgatatttggtcattcggcgtggtgctgtgggagattttttccttcggcttgcaaccatattacggctttagtaatcaggaagtgattgaaatggtcaggaagcgccagctgctgccctgctctgaggactgccctccacgcatgtattccttaatgaccgagtgctggaatgaaattccttctcgtcggccaagattcaaggatatacacgtgcggctgcggagctgggagggcttgagtagtcacaccagttccaccactcctagcggcggcaacgctacaacacaaacaacgtccctgtcagccagccctgtgagtaacttatccaaccctcgctatccaaactatatgtttccgtcacagggcataaccccccaggggcagattgcaggctttatcggcccacccattcctcagaaccagcgtttcatcccaatcaacggatatcccataccgcctggatatgccgccttccccgcagcacactatcagccgacaggccccccgcgagttatccaacattgcccccctcccaagtcaagaagcccttcatctgcatccggttcgacctccaccgggcacgtgacatcgctgccaagttctggctctaatcaggaggcaaacatccccctgctgccacacatgtccatcccaaaccatcccgggggtatggggattacagtttttggcaacaagagccagaagccgtacaagatcgactcgaaacaggcaagcttacttggtgacgccaatatccatggtcacacagaaagcatgatttccgcagaactgtag

SEQ ID NO: 131949 - DNA, 1182 bp, synthetic construct
  misc_feature 1..1182: note = Description of Artificial Sequence: Synthetic coding sequence
  source 1..1182: mol_type = other DNA
atgcatcgtcccagacgacggggcactaggcctccacttctggccctcttagcagcactgttgctagcagcccggggcgccgcagctcaagaaacagagctcagcgtgagcgcagaactggtgcctacctcctcatggaatattagttctgaactcaacaaggacagctatctgactctcgacgagcctatgaacaatatcacgacctccctggggcagaccgcagaacttcattgtaaagtctcagggaaccctccaccaacaatccgatggtttaaaaacgacgcgcctgtcgttcaggagccacggcggctgtcatttcgcagcactatctacggatcccgactccggattcgaaaccttgacacaactgatactgggtattttcaatgcgtagccactaacggtaaggaggtggtcagcagcactggagtgctatttgtaaaattcggtcctccgcccactgcttcccctggctactccgacgagtacgaggaagacgggttttgtcaaccctaccgcggaattgcctgtgctcgttttatagggaatagaaccgtgtacatggagagtctacacatgcagggggagattgagaatcaaattacagccgcctttactatgatcggaacctccagccacctgagtgataaatgtagccagttcgccatcccatcgctttgtcattacgcattcccatattgcgacgagacaagtagcgtgccaaaacctcgggacctttgccgggacgagtgcgagatcctggagaatgtattatgccagacagagtacatttttgcccgcagcaatcctatgatcctcatgcgtctgaaactgcctaattgcgaagacttgccccaacctgagtcaccggaagctgccaactgcatacggatcggtattccaatggcagaccccattaacaagaaccacaagtgctacaactcaaccggcgtcgactaccgaggcacagtctccgtcactaagagcggccgtcagtgtcaaccatggaactcacagtaccctcacacacatactttcaccgctctcagatttccggagctgaacggcggacattcttattgccggaatcctggaaaccagaaagaagccccatggtgcttcactttggatgaaaattttaagagtgacctatgcgatatccctgcgtgcggaaagtag

SEQ ID NO: 131950 - DNA, 2823 bp, synthetic construct
  misc_feature 1..2823: note = Description of Artificial Sequence: Synthetic coding sequence
  source 1..2823: mol_type = other DNA
cgggccaggggttgcagcgctcgccgaagagggaccagacctccattgctggccctccttgcagctctcctcctggcagcccggggtgccgctgcacaagaaaccgagctaagtgtttctgctgaactggtaccaacgtcctcctggaacatctcatctgaactaaacaaagattcctatcttacactcgacgagccaatgaataatataacgacatccctgggtcaaacagccgagcttcattgtaaggtgagcggcaaccccccacctacgatccggtggttcaagaatgatgcccccgttgtacaggagcctaggcggctcagctttcgcagtacaatctatggctctcggttgcggattaggaacctcgacacaaccgacactggctacttccaatgtgtggcaactaacggaaaagaggttgtgtccagtactggagtgctcttcgtgaaatttggtcccccccctacagcgagtcccggctattctgacgagtacgaggaagatggcttttgccagccatataggggaatcgcttgtgcacgctttatcgggaatcgcaccgtctatatggagtccctgcacatgcaaggcgaaattgagaaccagattacagccgcgttcacaatgattggtaccagttcacacctctccgacaagtgctctcagtttgctatcccaagcctgtgtcactacgcctttccatactgcgatgagacatcctccgtaccaaagccacgggacctgtgcagggatgaatgtgagatattagagaacgttctctgtcagaccgaatatatttttgctcgatccaaccccatgatcctgatgcggttgaaacttccaaattgcgaggacctgccccaacccgaaagtcctgaggcggcaaactgtattcgcatcggaatccccatggcggacccaatcaataagaatcacaagtgctacaacagtacaggtgttgattatcgaggaaccgtgagtgtcaccaaatctgggcgccagtgccagccatggaattcacaatatccgcacacacacacctttactgctctccgatttccagagttaaacggaggacatagttattgccgcaatcctggcaaccagaaagaagccccatggtgtttcaccctcgatgaaaacttcaaatcagatctttgcgatatcccagcatgcgactcaaaagactcaaaggaaaagaacaaaatggaaatcttgtacatactggtaccctctgtcgccatcccattagccatagcccttctctttttcttcatctgcgtttgtagaaataaccagaaaagttcttccgcccctgtgcagagacaaccaaagcatgtaagaggccaaaacgtggagatgtctatgttgaacgcatacaagccaaaatcaaaagcaaaggagttaccgctgagcgccgtcaggttcatggaagaactgggagagtgtgcctttgggaagatttacaaaggtcacctctatctgcctggcatggatcacgctcaactggttgccatcaaaacgcttaaagactataataatccacagcagtggactgaattccagcaggaagccagtctgatggcagagttgcaccaccccaatatagtatgcctgcttggcgcagtcacccaggagcagcccgtgtgcatgctctttgaatacattaatcagggtgacctgcacgaatttctgattatgagatcccctcactcagatgttggctgcagttccgatgaggatggcacagtgaagtcatctcttgaccatggagacttcctgcacattgctatacagatcgcagctggcatggagtatcttagttctcactttttcgtgcacaaggatttagccgctcgaaatatcttgattggtgagcagctgcatgtgaaaatttcagatctagggctgtctagggaaatatattctgctgactactaccgcgttcagtccaagagtctgctgcctatacgctggatgccaccggaggccattatgtacggtaaatttagctcagactctgatatttggtctttcggtgtggttctctgggaaatattctcttttggcttgcagccgtactacggcttctcaaaccaggaggtcatcgagatggttcggaaacgccagcttctcccatgctcagaggattgccccccgagaatgtattccctaatgaccgagtgctggaatgaaattccaagtagacggcctcgctttaaggacatccacgtccgtctgcggagttgggagggcctgagcagccataccagctcaacaacaccctccggcggcaacgccaccacacagaccactagcttatcggcaagtcccgtgtctaatctttcaaatcccaggtatcccaactacatgttcccaagccagggcattaccccccagggacagatcgctggattcattggccccccaattccacagaaccagaggtttattcccataaacggctatccaattccgcccgggtatgctgctttcccagccgcccactaccaacccacaggtcctcctagagtgatccagcactgccctcccccaaaaagtaggtctccttctagcgcttcaggctcaacctcaaccggccatgtgacgagtctgccttcctctggctcaaaccaggaagcgaatattcctctactgccgcacatgtccatccccaatcaccccggggggatggggattactgtgttcggaaataagtctcagaagccatacaaaatcgatagtaagcaagcaagtctgctaggggacgcaaacattcacggccacaccgaaagtatgatttctgccgagctgtag

SEQ ID NO: 131951 - DNA, 1167 bp, synthetic construct
  misc_feature 1..1167: note = Description of Artificial Sequence: Synthetic coding sequence
  source 1..1167: mol_type = other DNA
atgctgtttgaatatataaaccagggagaccttcatgagttcctcatcatgcggtctccgcattccgacgtgggctgctcttcagatgaagatggcactgttaaaagtagcctcgatcacggagacttcctgcatatcgcaatccagattgcggccggtatggagtatctctccagccattttttcgtgcataaggatctggccgcacgaaacatcctcataggggagcagctacacgtgaaaatcagcgacctcgggcttagcagagaaatttatagcgcagattactaccgcgtgcagtctaagagcctcctgccaatcaggtggatgcccccggaggccataatgtacgggaagtttagctctgatagcgacatttggagctttggtgttgtgctttgggagattttctccttcgggttacagccgtactatggcttcagcaaccaggaagtgatagagatggtgcgcaaacggcaactgcttccttgcagcgaggattgtccgccccgcatgtattccctgatgaccgagtgctggaatgagattcctagtcggcggcctcggtttaaagacatccatgtaaggttacgatcctgggaaggattgagcagccacacgtcttcgacaacacccagcggcgggaacgctaccacccagacaacctctctttctgcctcacccgtgtccaacctctcaaatcccagatatcctaactatatgttcccttcgcagggcatcaccccccagggacagatcgcgggctttatcggcccacccatccctcagaaccagcggttcatacccatcaacgggtacccgatccctcccggctatgccgcattcccggccgcgcactatcagcctacaggccccccgcgggtcatccagcattgccccccccccaagagtaggtcgccatcttcagcttcgggctctacgtctactggtcatgttacctctctgccctcctccggatctaatcaagaggccaacatcccactcctcccacatatgtctatccccaatcacccaggaggcatgggcattactgtgttcggaaataagtcacaaaaaccttacaagatagattcaaagcaggcctcacttcttggtgacgctaacattcacgggcacaccgagtctatgatttccgctgaactgtag

SEQ ID NO: 131952 - DNA, 2832 bp, synthetic construct
  misc_feature 1..2832: note = Description of Artificial Sequence: Synthetic coding sequence
  source 1..2832: mol_type = other DNA
atggccaggggaagtgccctgccacgccggccgctgctgtgtatccccgcagtatgggcagccgctgccctcctcctgagtgtcagccggacatccggggaggtggaagtgttggatccaaacgatcctctcggtccacttgatggccaggacggacccatccccacccttaaaggttattttctcaatttcttagagcccgtaaacaacataacgatcgtgcagggtcagacagccattctgcactgtaaagtggccggaaacccgcccccaaatgtgcgctggcttaaaaatgatgcccccgtggtgcaagaaccccgtcgcatcatcataagaaagaccgagtatggaagcaggctccgcatccaagatctggatacgactgacactgggtactaccagtgtgtggccacaaacgggatgaaaaccattaccgccactggggtcctttttgtcaggctgggccctacccacagcccaaaccacaactttcaagatgattatcatgaggacggattttgtcagccataccgcggtatcgcctgtgctcgttttataggcaatagaaccatatatgtggactccttgcagatgcagggggaaatagaaaaccggataacggccgcttttacgatgatcgggacatcaactcacctgtcagaccagtgtagccaattcgctataccgtcattttgccatttcgtctttcctttgtgcgatgccaggtcccggacccccaaacctagggagctgtgccgagatgagtgcgaggttctggagtctgatttatgcaggcaagaatacaccattgcacgcagcaaccctctcattctgatgcgcctgcaattacctaaatgtgaggctctccccatgcccgagagtcctgacgcagccaactgcatgcggattgggatcccggccgaaagacttggccgctaccaccagtgttacaacggaagcggaatggattacagaggcaccgcctccaccaccaaatctggacatcaatgtcaaccatgggccctccagcacccccattctcaccacctgtcttccaccgattttcccgagctcggtggtgggcatgcatactgccggaacccagggggccagatggagggaccttggtgtttcacacaaaataaaaatgtgcgaatggagttgtgcgatgtccctagctgctcaccacgcgactcctctaaaatggggattctgtacatcctggtccctagtattgccataccactggttattgcctgcctgttcttcctggtgtgcatgtgccgtaacaaacagaaggcaagtgcgagtactcctcaacgccgccaattgatggcatctcctagccaggacatggagatgccattaatcaaccagcacaaacaggccaaactcaaagaaatctccttgtctgccgtgcgattcatggaggagttgggagaagacaggtttggcaaggtgtataaggggcatctcttcggccccgcccctggggagcagacgcaggcggtggccatcaaaacactcaaggataaggcggagggccctctgagggaagagttccgccacgaggcaatgctgcgagcccggctgcagcaccccaacgtggtgtgtttattgggagtagttacaaaagaccagccactttctatgattttttcttattgttcccacggagatctccacgaattcctagtcatgagaagcccgcattctgacgtgggatctacggatgatgaccggactgtgaagtcagccctggagcctccagatttcgtgcatctggtcgcccagatcgccgccggaatggaatacctgtccagccaccatgtcgttcacaaggatcttgcaacaagaaatgtgctggtatatgacaagctgaacgtgaagatttccgacctgggactcttcagagaggtttatgctgccgattattataaactgctggggaacagcttactacccattagatggatggcccccgaggccataatgtacggaaagttctctatcgactctgatatttggagttatggagttgttctgtgggaggtatttagctatgggctccagccatactgcggttactctaaccaggatgtggtggaaatgataaggaaccgtcaagtgcttccgtgtcccgacgactgcccagcctgggtgtacgccctgatgatcgagtgctggaatgaattcccgagtcggagacctaggttcaaggatatccatagtcggctaagggcctggggaaatctgtctaattacaattcttcagcacagactagtggggcttccaataccacccagacatcatccctatcaacctcaccagtgagcaacgttagtaacgctcggtatgtcgggccaaagcagaaagccccccccttcccacaacctcagttcatacccatgaaagggcagatcagacccatggtgcctccaccgcagctctatgttccagtaaacggataccagcctgtgcctgcttacggggcctatctgcccaacttctatcctgtgcagattcctatgcagatggccccccagcaagtccccccacagatggtgcccaagccctcgtctcaccacagcggatcaggctccaccagcaccggctacgttacaactgcacctagcaacacttctatggccgacagagccgctcttttgtctgagggcgctgatgacacacagaatgcccctgaagatggggcgcagagcaccgtgcaggaagcggaagaagaagaagaaggaagtgtccccgaaactgaactcctcggagactgcgacaccctgcaggtggatgaggcccaggttcagctggaggcctag

SEQ ID NO: 131953 - DNA, 1239 bp, synthetic construct
  misc_feature 1..1239: note = Description of Artificial Sequence: Synthetic coding sequence
  source 1..1239: mol_type = other DNA
atgggccaggaccaaacaaagcagcagatagagaagggcttgcagctttaccaatccaatcaaacggagaaggcgcttcaagtgtggaccaaagttctggagaagtcctctgatttaatgggccgcttccgagtcctgggctgccttgtgactgcacacagcgaaatggggcggtacaaggaaatgctgaagttcgcagttgttcagattgacactgccagggaattggaggacgcagatttcctgctagagtcttaccttaacctggcaaggtccaatgaaaagttatgtgaattccataagaccatctcatactgcaagacttgtctaggtttgccaggcacaagggcaggggcacagcttggcgggcaagtttccctgtctatgggaaacgcatttctaggcttgagcgtgttccagaaggcccttgaatccttcgagaaagccctgcgatatgcccataataatgacgacgctatgttggagtgtcgagtttgctgcagcctgggatcattctatgcacaggtgaaggactatgagaaggctctattttttccctgcaaagcagcagaactggtcaacaattacgggaagggctggagcctgaagtaccgggctatgagtcaataccacatggcagtggcctataggcttctgggacggcttgggtccgccatggagtgttgcgaagaatccatgaagatagcacttcagcacggtgacaggccgctgcaggccctctgcctgttgtgtttcgccgacattcaccgttctcggggagatctcgaaactgcatttccacgatatgactctgccatgtctattatgacggagattggaaatagactgggccaggtgcaggccctcctgggagtcgctaaatgctgggtggctcggaaggctctggataaggcccttgacgccattgaacgggcccaagacctggcagaggaagtggggaacaagttatcccagcttaagctacactgcctaagcgagagcatctatcgttctaaagggctgcagagagagcttagagcccacgtggtgcgatttcacgagtgtgtagaggagactgaactctattgtggtctctgcggagaaagtattggagagaagaactctaggttgcaggccctgccatgcagccatattttccatctacggtgcctgcagaataatgggacacgctcttgtcctaattgtcgaagatccagcatgaagccaggatttgtgtag

SEQ ID NO: 131954 - DNA, 1062 bp, synthetic construct
  misc_feature 1..1062: note = Description of Artificial Sequence: Synthetic coding sequence
  source 1..1062: mol_type = other DNA
atgggtcaggaccagacaaagcaacaaatcgagaaaggcctacaactatatcagtctaatcagactgagaaggccctgcaggtctggacaaaggttctggagaagtcatcagacttaatgggaagatttcgagtcctgggatgtctcgttaccgcccactctgaaatggggcgctacaaagagatgctcaaattcgccgtggtccagatcgacaccgcccgggagctggaagatgccgactttttactcgaaagctacctaaatctggctcgttcaaacgagaaattgtgcgagttccacaaaactatcagctactgcaagacctgcctgggacttccaggaactagggcaggtgctcagctcggtgggcaggtgtcgctgtctatggggaacgcttttctcggcctgtctgtcttccagaaagcgttggaatcttttgagaaagccctccgttacgcacacaataacgacgacgccatgctggagtgccgggtctgttgttcattgggcagtttctatgcacaggtgaaggactacgagaaagcccttttctttccttgtaaggcagctgagctggtcaataactatgggaagggttggtctctgaagtaccgggccatgtctcagtaccacatggcggttgcctaccgccttttgggccgcctgggtagcgccatggaatgttgtgaagagtccatgaagatcgccctacagcatggggaccgtcctctgcaggctctgtgtcttctctgtttcgcagatatccaccggagcaggggcgatctggaactgtctcagctaaagctgcactgcctctcagagtcaatctaccgctccaaaggattgcagcgcgaattgcgggcccatgtggtgagattccatgaatgtgtggaggagaccgagctgtactgtggcctgtgcggggaaagcatcggcgagaagaactcacgactccaggcgctaccctgcagccacatctttcatctccgctgtctgcagaacaacggaaccaggagctgccccaactgccgccgctcgtctatgaagcctggctttgtgtag

SEQ ID NO: 131955 - DNA, 2010 bp, synthetic construct
  misc_feature 1..2010: note = Description of Artificial Sequence: Synthetic coding sequence
  source 1..2010: mol_type = other DNA
atgggcacggccttagtgtaccacgaagatatgaccgctactagacttctgtgggatgatccggagtgtgagattgagcgtcctgaaagacttaccgctgccctggacagactgcgtcagcgaggtctcgaacaacgctgtctaagattgagcgcaagagaagcaagtgaagaagagcttgggctcgtccacagtccagaatatgtaagtctggtacgcgagacccaggtgctaggcaaagaggagcttcaggccctaagtgggcagttcgatgccatttactttcacccctccacatttcactgcgcacgtctcgcagccggagccggactccagctcgtggatgccgtgctcaccggcgccgtacaaaacggcttggctctggtccggccacccggacaccacggccagagagccgcagctaacggattttgcgtgttcaataatgtcgctatcgcagccgcccatgccaaacagaagcatgggttgcaccggatcctagtggtggattgggacgtgcaccatggtcagggcatccagtacctgttcgaggacgatccgagcgtcttgtacttttcatggcacaggtacgagcatggcaggttctggcccttccttcgtgagtcagatgctgacgctgttggaaggggccaaggcctgggatttaccgtcaatctcccatggaaccaagtaggtatgggcaacgcagactacgtcgcagcattcctgcacctcctgctgcctcttgcttttgagtttgatcctgagctggtcctggtatccgccggctttgattccgccataggagaccccgagggccagatgcaggccacccctgaatgtttcgcacatctgactcagctgctccaggtccttgcgggtggacgtgtctgcgcagttctagaaggcggctaccacctggaaagtctcgcagagtcagtatgtatgaccgtacagacactgttgggggaccccgctcctcctctttccggcccgatggcaccttgccaaagcgccctcgagagtatacagtccgctcgggccgcgcaggcaccgcactggaagtctttgcagcaacaggatgtgaccgcagttcctatgtcaccctcatcccactcacctgaaggtcgacccccccctctgttacctggtggcccagtgtgtaaagccgctgcttctgccccctcaagcttactggaccagccgtgcctttgcccggccccttccgtgcgcaccgctgtggctttaacaaccccagatataacactggtgctgccccctgatgtaattcagcaggaggcctctgccctgcgcgaggaaacggaggcgtgggcaagaccccacgagagcctagctagggaggaggcgctcacggcattagggaagctgctgtatttgctagacgggatgctcgatgggcaagtgaatagcggtatcgcggccacaccggcctctgcagcggccgcaacactcgacgtcgctgtgaggcgaggattatcccacggtgcgcagcggttgctttgcgtggccttagggcaactggataggcccccagacttagcacacgacggacgctcattgtggctgaatatcaggggaaaagaggccgcggctctgtcaatgttccacgtctctaccccactgcccgttatgaccgggggctttctaagctgcatcttggggctagtcctgcctctggcttacggcttccagcctgacttggtactcgtggccttgggtccgggtcacggcctgcaaggtcctcacgccgctttgcttgcagcaatgctcaggggcttggccggggggagagtgcttgccttgcttgaggaaaactcaaccccccagctcgccgggatcctggctcgggtgctcaacggggaggcgcctccatctctaggcccaagcagtgtggcgtcaccggaagatgtgcaggcccttatgtatttgcgcgggcagttagaaccccagtggaagatgctgcagtgtcatccacatctcgtcgcatag

SEQ ID NO: 131956 - DNA, 1206 bp, synthetic construct
  misc_feature 1..1206: note = Description of Artificial Sequence: Synthetic coding sequence
  source 1..1206: mol_type = other DNA
atgcaacgttgctggcagggggacccccgagtgaggccgacctttcaagaaattacttccgagacagaagatttgtgcgagaagccggacgacgaggttaaggagacagcacacgatctggatgtaaaatctcccccggaaccacgatccgaagtggtacctgctagactgaagcgagcttcggccccgaccttcgataacgactacagtttatctgaactgctttcacagctcgactccggggtatcccaggccgtcgaggggcccgaggaactgagccgatcttcctccgagtctaaattgcccagctcaggatcaggcaagcgcctttccggtgttagttctgtggacagcgccttttcctcccgtggatctctgagtctgtccttcgaacgagaacctagcacaagcgacctggggacgaccgatgtgcagaaaaaaaaactcgtggatgccatcgtgtccggggacacatccaaactgatgaagatcctgcagcctcaggacgtcgatctggcacttgactcgggcgcctctttgctgcacctggctgtggaggcaggacaagaagaatgtgcgaagtggcttttgttaaataatgccaaccctaacctgtccaatcggagaggaagtacccctctacacatggcagtggaaaggcgagttaggggcgttgttgaactgctgctggcccgaaagatcagcgttaacgctaaggacgaggaccagtggactgcattgcacttcgcagctcaaaatggcgacgagtcaagtacaaggctactgctagagaagaatgcatccgtgaacgaagtggatttcgaggggagaacccctatgcacgttgcttgtcagcacgggcaggaaaatatcgttaggattcttctccgaaggggcgtcgatgtgtcactgcagggcaaggatgcttggcactgcacgacattagcaggccccccggcgcaccggcaagccgcaggccaggctgccggcggtgagtgcgagcgacctgacgccggctgggaagacgccattgcacccggaagaaccgcccgggctcttccaaggggtcctcaccctcaccggcctgtgcttcggcgccaaaggttacagccggctgggaccgatacaccagctcgtcccagacgccgcggcactcgagccctgccgggatgctcttgtattggcgctctcgcccgcaggccttag

SEQ ID NO: 131957 - DNA, 2355 bp, synthetic construct
  misc_feature 1..2355: note = Description of Artificial Sequence: Synthetic coding sequence
  source 1..2355: mol_type = other DNA
atggagggggatggaggaacaccttgggcgctggctcttcttcgcacatttgatgcaggggaatttacaggatgggagaaagtgggtagcggtgggttcggacaagtgtacaaagtgaggcatgttcattggaaaacctggctggcaattaaatgctctccatcgctgcatgtcgacgatcgcgagcgtatggagctcctcgaagaggctaagaagatggagatggcgaagtttcgctatatccttccagtgtatggaatttgccgcgagccagtgggcctggtcatggaatatatggaaaccggctctctggaaaagcttctggcaagcgagccactgccatgggatctgaggttccgaattattcacgaaaccgcagtcgggatgaactttttacactgcatggctccccctctgctccacctggatcttaaacccgccaacattttgctagatgctcactaccacgtaaagatctccgacttcggcctagccaaatgtaatggactgagccactctcatgatcttagtatggacggcctgttcggaaccattgcctatttgcccccagaaaggattcgcgagaaatcaaggttgtttgatactaaacacgatgtatattcctttgcaatcgtgatatggggggtattaacacagaaaaagccatttgccgacgaaaaaaatattctgcacatcatggtgaaagtggtcaagggccataggcccgaattaccacccgtgtgtagggccagacctcgagcgtgcagccatctcattagacttatgcaacggtgctggcagggagacccacgggtgcggccgacctttcaggaaatcacgagcgagacggaggacctgtgtgaaaaacctgacgatgaggttaaggagactgcccacgatttagatgtgaaaagccctcccgagcctaggtctgaggtagtaccggcaagacttaagagggcctccgccccaacatttgataacgactactccttaagtgagctcctgagtcagctcgactccggtgtgtcgcaggcagtagaaggcccggaggagctctcccgtagctcgagtgagtctaaattaccgtcgagcggcagtggaaagcgtctgtctggagtgagctcggtggattccgccttttcatcaaggggcagcttaagcttgtcttttgaacgggagcctagtacttccgatctgggcaccaccgacgttcagaaaaagaagttagtcgacgctattgtgagcggcgatactagcaaactgatgaagatcctccagccacaggatgtagacttggcattggactcaggcgcttctctgctgcacctagccgttgaggccgggcaagaggaatgtgctaagtggcttctacttaacaatgctaatcccaatttgtcgaataggcggggctccactcccctgcatatggccgtagagaggagggtgaggggggtggtcgaactgctcctcgctagaaagatatcagtcaatgcaaaggacgaggaccagtggacagcactgcacttcgccgcccagaacggcgacgagtcatccacacgcctgctgctggagaagaacgcctcagtgaacgaagtggacttcgagggaagaacccccatgcatgtggcctgtcaacacggtcaggaaaacatcgttcgcatcctgcttcgcaggggcgtcgacgtgtctctgcaggggaaggatgcatggcttcccctgcactacgcggcatggcagggacatctgcccatcgtcaaattgttggctaaacagcccggggtgtccgtgaatgcccaaacattggatggacgcactccgctgcatctggctgcccagagaggccattatagagtcgccaggattctcatcgatctctgttcagatgtgaacgtctgttccctgctagcacaaacacccctgcatgtggccgcagagactggacacacctcaacagcgcgcttgctcctgcacaggggggctgggaaagaagccatgactagtgacggctatactgctctccaccttgccgccagaaacgggcacctggcaactgtcaagttgcttgttgaggaaaaagcagacgttttggccagggggcccctgaatcagactgctttacacttggccgccgcgcatggtcactccgaagtcgtggaggagctggtgagcgcagacgttattgacttgtttgatgaacaaggactgtccgcattacatctggctgcacagggacgccatgcacagaccgtggagaccttgctgcgccacggagcacacataaacctacaatctctcaagtttcagggagggcacggacccgctgcgacgctgctgagacgttcaaagacctag

SEQ ID NO: 131958 - DNA, 2499 bp, synthetic construct
  misc_feature 1..2499: note = Description of Artificial Sequence: Synthetic coding sequence
  source 1..2499: mol_type = other DNA
atggaaggagatggagggacaccctgggccttagcactcttgaggacttttgatgccggggagtttaccgggtgggaaaaggtaggcagcggtggatttggccaggtgtacaaagttcgccacgttcactggaagacttggctggctataaagtgcagcccaagcctgcacgtcgatgatcgggagcgaatggagctgctggaagaggccaaaaaaatggagatggcgaaattcaggtatattttgccagtgtatggcatatgtcgggaaccagtcggtcttgttatggagtacatggagaccggctcactcgaaaagcttcttgcatctgagccacttccttgggacctgagattccggataattcacgagaccgccgttggtatgaactttctgcactgtatggcacccccgctgctgcaccttgatctgaagcctgcgaatatcctcctggacgcgcattatcacgtgaagatttccgactttggattggccaaatgtaatgggctctcccactcacacgacctttctatggacgggctgtttggcacaatcgcctacctccccccagagcggattagagagaagagtcggctgtttgacacaaagcatgatgtttacagctttgccatcgtgatctggggagtccttacccaaaagaaaccctttgcagatgagaagaatatcctgcatatcatggtaaaggtggtgaagggccatagaccggagctaccccccgtgtgcagggccagacccagggcctgttcacatctcatcagactgatgcagagatgctggcagggggatccacgcgtgaggccaacgttccagggtaacggactcaatggggaactgatccggcaagttttagccgcgcttctgcctgtgacaggacggtggcgatctccgggcgaagggttccggttggagtccgaggttatcattagggtgacttgccctctctcttctccccaggaaattaccagtgaaaccgaagacctttgcgaaaagccagatgacgaagtgaaggagactgcacatgacctggacgtaaaaagtcccccagagcctcgttctgaagtggtcccagctcgtctcaagagagcttccgctcctaccttcgacaatgactactccctgagcgagctcctctctcaacttgatagtggggtttctcaagcggttgaaggccccgaggaactgtctagatccagctctgaaagtaagttgccaagtagcggttccggaaagagactgagcggcgtgtcttcagtagactcggcttttagcagccgggggtcgctaagtctttcgttcgaaagggagcctagcaccagtgatctgggaaccacagatgtccaaaagaagaagctcgttgacgccattgtcagcggagacacaagtaaactcatgaaaatcttgcagcctcaggatgtcgatctagcactagattcaggagcctcactactgcacctggcggtcgaagccgggcaggaggagtgcgcgaaatggctcttactaaataacgccaacccaaatctgagcaaccggagggggagtaccccattgcatatggccgtggaaagaagagtccgaggcgtggtcgagcttctgctggccagaaaaatctctgtcaacgcgaaggacgaagaccaatggacagctctgcacttcgccgcgcagaatggagatgaaagcagcacccgattgctgctggagaaaaacgcttctgttaatgaggtggattttgagggccgaacccctatgcacgtggcctgccagcatggtcaggaaaatattgtcaggatccttctacgaaggggcgtcgatgtgagtttgcaagggaaggacgcctggctcccccttcattacgctgcgtggcagggacacttacccatcgtgaagctcctggcaaagcagcccggagtgtccgtgaacgcccagaccctggacggccgtacgcctttacacctggcggctcaaagaggccactacagagtggcccgaatcctcattgacctatgcagcgatgtcaatgtctgttcattactcgcgcaaactcctttgcacgttgccgcggagactggtcacacctctacagctcggctgttgctacaccgcggggccggcaaagaggccatgacctccgacggatatacggcactccacttggccgcccggaatggacacctggccactgttaagttattagtagaggagaaggctgatgtgctcgccagaggccccctgaatcagaccgctctgcatctggccgcggcccacggccatagtgaagttgtggaggaactggtgagcgctgacgtgatagacctcttcgacgagcaaggtctgtctgcgctgcatctcgctgcccaggggagacacgctcagacagtggagacactacttcggcacggagctcatataaaccttcagtctctgaaattccagggaggtcatggtcccgctgctactctgctgaggcgcagtaaaacgtag

SEQ ID NO: 131959 - DNA, 2166 bp, synthetic construct
  misc_feature 1..2166: note = Description of Artificial Sequence: Synthetic coding sequence
  source 1..2166: mol_type = other DNA
atggaactcctggaggaagccaagaagatggagatggctaagtttagatatatactgccggtctacggcatttgcagggaaccagtgggcctcgtcatggaatacatggagacaggctcgctggagaagttactcgcttcagagccactgccatgggacctgaggtttcgtatcatccatgaaacagcagtgggaatgaactttctgcactgtatggcaccacctctgctgcacctggatctgaaacctgccaatattttactggatgctcattaccatgtcaaaatctcggacttcgggttggccaaatgcaacggactctcacatagccacgacctctctatggatggcctatttggtacgattgcctacctccctcccgagcggattagggagaagtcccgcctgtttgacactaaacacgatgtttattctttcgcgattgtgatctggggcgtgctgacccagaagaaacctttcgccgatgaaaagaacattctgcacatcatggttaaagtggttaagggccatcgccctgagctgcccccagtttgtagagctcggccccgtgcatgctcccacctgatcagacttatgcaacgctgctggcaaggcgatcccagggtgagacccacattccaggagatcactagcgaaacagaggacctatgtgagaagcccgacgatgaggtgaaagaaaccgcccatgaccttgacgtgaagtcccctcctgaacctcgctccgaggttgtgcccgctcgattgaagagagcctccgctcctacttttgacaatgactatagcctttcggagttgctctcgcaattggatagcggggtctcccaggctgttgaagggcctgaagagttatcccgatccagctccgaatctaaactgccaagctcagggtccggtaagagactgtctggcgtgtctagtgtggactctgcgtttagcagccgtgggtctttgagcctgtccttcgagagagagccaagtacatctgatctcggcaccacagacgtgcagaagaagaaacttgtggacgctattgtttccggagacacatcgaagctgatgaaaatcctgcagccgcaggacgtggatttggcgttagattctggggcttcactgctgcacctcgcagtggaagcaggtcaggaggagtgtgctaagtggttgctcctgaacaacgccaaccccaacctgagcaataggcggggctcaacccccctacacatggccgtggaacgcagagtgagaggagtcgtggagcttctgctcgcccggaagattagcgtcaacgcaaaagatgaagatcagtggactgctcttcattttgccgctcagaacggcgatgaatcatcaacgcgattgttactggaaaagaatgctagcgttaatgaagtagacttcgagggacgaactcctatgcacgttgcatgtcagcacggccaggagaacatagttagaatactcttacgacgcggagtggacgtgtctcttcagggtaaagatgcctggctgcccctgcattatgcagcctggcagggacacctccccatcgttaagctcctcgccaaacagcctggagtctctgtgaacgcccagaccctggacgggaggacacccctccatctcgcggcacagagaggacactaccgcgtcgcgaggatcctgatcgatctttgcagcgacgttaacgtctgttctctgttggcccagactcctctacatgtggcagcagagactggccatacttctacggccaggttactcctccatagaggtgcagggaaggaagcaatgacgagtgacgggtatacagcactgcacctggctgctagaaacggccatctcgccactgtgaagttactagtcgaggaaaaggccgacgtgctcgcccgggggcccctgaatcaaactgcattgcatctggctgctgcccacggtcacagtgaggtggtggaagagctggtgtctgcagacgtgatcgatctgtttgatgagcaggggctttccgcgctccacttagccgcacagggaagacacgctcagactgtagagaccttgctaaggcatggagctcacattaatctgcagtctttgaagttccaaggcggtcacggtccagccgccactctactcaggaggagcaaaacctag

SEQ ID NO: 131960 - DNA, 2166 bp, synthetic construct
  misc_feature 1..2166: note = Description of Artificial Sequence: Synthetic coding sequence
  source 1..2166: mol_type = other DNA
atggaattgctggaggaggccaaaaaaatggaaatggccaagttccggtatatcctgccggtgtacggcatatgccgcgagccggtggggctcgtgatggaatacatggagaccggaagtctggagaagcttttggccagtgagccactcccctgggacctgaggttccgtataatccacgaaaccgcggtggggatgaattttcttcactgtatggcacctcccctgctgcatctcgacctcaaaccagctaacattctactcgacgctcattaccacgtcaagatctccgactttggcctggccaagtgcaatggcttgtctcactcccatgacttgtcaatggatggcctgtttggcacaatcgcgtatctccctcctgagcggattcgggaaaaatctcggctgtttgacactaaacatgatgtctactccttcgccattgttatctggggcgtattgactcaaaaaaagccttttgctgacgaaaagaatattctacatattatggtgaaggtcgtcaagggtcaccgtccagaattgcctcctgtgtgtagggccagaccaagggcctgcagccacctgatcagacttatgcaacgatgctggcagggcgaccctcgcgtcagaccaacattccaggaaattacttccgagacggaggatttatgtgagaaaccagatgatgaagtaaaggaaactgcacacgacctggacgtaaaatcacctccggagcctcggtctgaggtcgtgcccgcccggcttaagcgggccagcgcccctactttcgataacgactactctctctctgaactgctgtcacaactggacagcggcgtgagccaggccgtagagggccccgaagaattgagtcggagttcctcagagtcaaaattgccaagtagcggaagcggaaaaagactgtccggggtctctagcgtggatagcgctttctctagcagaggatcactctcactctccttcgagagagagccatctacatctgatctggggacaacagacgtgcagaaaaagaagttggtggacgcaattgtatcaggggatacttcaaagctcatgaagatcctacagccacaggatgtggacctggctttggacagcggcgcttctctgttgcatcttgcagttgaggcaggccaggaggagtgtgcaaagtggctgctgttgaacaatgctaatccaaacctgagcaacagaagagggtccacccccctccatatggcagttgaaaggcgagtcagaggggttgtggagctcctcctcgcgcggaagatttccgtgaatgctaaggacgaagaccaatggacagcactccattttgccgctcagaatggcgacgagtcttctaccagactactacttgagaaaaatgcatctgtcaacgaggtggattttgagggtcgaacacctatgcatgtggcttgccaacatggccaggagaatatagtccgtattcttctgaggcgcggcgtggacgttagtcttcagggaaaggatgcctggctgccactgcattatgccgcctggcagggccaccttccaatagttaaactgctggccaaacaacccggggtctccgtcaatgctcagacattggatggtcggacccccctgcacctggcagcgcagagaggccactatcgggtagcaagaatactgattgacctttgtagtgatgttaatgtctgttcactgctggcgcagacccctcttcacgtcgctgctgagacggggcataccagcaccgccagactcttgctgcatcggggggcgggaaaggaggccatgacatccgacggttacaccgcccttcacttagcagccaggaacggccacctggccactgtgaaacttctggtggaagagaaggcagacgtattggctagaggcccattgaaccaaacagctcttcatcttgctgctgctcacggtcacagcgaggtggtcgaagagttggtgagcgctgacgtgattgacctgtttgatgagcaggggttgagcgccctgcatctggcggcccaagggcggcacgcacagactgttgagactctactgcgacacggagcacacattaacctccaaagtctgaaattccaaggtggccatgggccagccgcaaccctactccgcaggtcgaagacatag

SEQ ID NO: 131961 - DNA, 3132 bp, synthetic construct
  misc_feature 1..3132: note = Description of Artificial Sequence: Synthetic coding sequence
  source 1..3132: mol_type = other DNA
atggctgcaagtttcccacccacgcttgggttatcatctgcccccgatgagatccagcatccacatatcaagttctctgagtggaaatttaagctgtttagagtccgctctttcgagaagacccccgaggaggcccagaaagagaagaaggactctttcgagggaaagccttcgctcgagcagtcccccgcagtgctggataaagccgatgggcagaagcccgtgcctacccagcccctactcaaagcacatccaaagttctcaaaaaagtttcatgacaatgagaaggcccgggggaaagcgattcaccaagcaaacctgcgccacctgtgccgaatttgcggaaattcgttcagagccgacgaacataatagacggtatcccgtccacggccccgtagacggtaaaaccctgggcctcctcaggaaaaaggaaaagcgagctacgtcgtggccagatctcatagcaaaagtgtttaggattgatgttaaagccgatgtggattctatacatcccacggaattctgtcacaattgttggtctattatgcatcgaaagttttcaagtgcgccttgtgaggtttattttccgcgcaatgtcacaatggaatggcatccacacacaccatcctgtgacatctgtaatacggccaggcgtggacttaagagaaaatccctccaaccaaacctgcagctctcgaagaaacttaaaacagtgctggaccaggcaagacaggctaggcagcacaaacggcgagcccaggccaggatcagctctaaagacgttatgaaaaaaattgccaactgcagcaagatacacctgagcacaaagctgctcgcagttgactttccagaacatttcgtcaaatccatctcgtgccaaatatgtgagcacattctggctgaccctgtggagacaaactgtaagcacgtgttttgccgcgtttgtatcctgaggtgcctgaaggttatgggttcttactgcccctcctgcaggtacccatgctttcctaccgacctagaaagtccagtcaaaagttttttgagcgtcctaaacagtctcatggtcaaatgcccagctaaggagtgcaacgaagaggtgtctcttgagaaatacaatcaccatatttcctcgcacaaagagagcaaagaaattttcgtacacatcaataaggggggcaggcctcgacagcacctgctctctctgacacgcagggcccagaagcatagactcagggagttgaagcttcaggtaaaggccttcgcggacaaggaggaaggtggcgacgtgaagtcggtttgcatgactctgttcctccttgctctaagggctagaaacgaacacagacaggcggacgaactggaggctattatgcaaggcaagggctctgggttgcagcctgctgtgtgtcttgctatccgcgtcaacaccttcctgtcctgcagccaataccacaagatgtatcgcaccgttaaggcaatcactggtagacagatcttccagcccctccatgctctgcgcaacgctgaaaaggtccttctgccggggtaccaccacttcgaatggcagccacctctcaagaacgtaagctcctcgacagacgttggaatcatcgatggcttgagcggactttcttcatccgttgacgactacccagttgacacaatcgccaagcggttccggtacgactcggctctagtgagtgctctgatggatatggaggaggacattcttgagggcatgcgctcgcaggacctagatgactatttgaacgggcctttcacagtagtcgtcaaggaaagttgcgacggcatgggagacgtaagtgaaaagcacggctctggaccagtcgtccctgaaaaggccgtgcgattcagtttcacaattatgaagattactatcgcccattcatctcagaacgtaaaagtctttgaagaggctaaaccaaattctgagttatgctgcaagccactatgcctgatgctggccgacgagtctgatcatgaaacgctcacagccatcctgagcccgctgatcgctgagcgcgaggctatgaaaagcagcgaactgatgttggaactgggcggaatcctgagaacctttaagtttatcttcagggggaccggttatgatgaaaagctggtgagggaggtcgagggcctggaggcaagcggaagtgtttatatctgcacactctgtgatgcaacgaggctggaggcgagtcagaatctggtgtttcactcaatcacacgctcacacgctgagaatttagagagatatgaagtttggcggagcaacccttatcacgaatccgtggaggaactgcgtgaccgggttaaaggagtgtccgccaaacccttcattgagaccgtaccatccatagatgcactacattgtgacataggaaacgcagctgaattttataaaatttttcagctcgagatcggtgaggtgtacaagaaccctaacgccagtaaagaggagcggaaacggtggcaggctactctggacaaacatctgaggaaaaaaatgaacctgaagcctatcatgagaatgaatggcaatttcgcgcggaagcttatgacaaaggagacagtagacgcggtgtgtgaactgattccatctgaggagcgtcatgaggctctccgcgaattaatggacctgtacctgaagatgaaaccagtttggcgcagtagttgcccggccaaggagtgccccgaatccctttgtcagtactctttcaacagtcagcggttcgcagagttgttatccaccaaatttaaataccgttatgagggaaaaatcaccaactatttccataagactcttgcccacgtgccagagattatcgaaagagacggcagcatcggcgcttgggctagcgaagggaatgagtctggtaataagttgtttaggcggttcaggaaaatgaacgccagacagagcaagtgttatgaaatggaagacgtgctgaagcaccattggttgtacacatctaagtacttacagaagtttatgaatgcccacaacgccctgaagaccagtggctttacaatgaaccctcaagctagcctgggcgacccactaggaattgaggattctttggagtctcaggattccatggagttctag

SEQ ID NO: 131962 - DNA, 1584 bp, synthetic construct
  misc_feature 1..1584: note = Description of Artificial Sequence: Synthetic coding sequence
  source 1..1584: mol_type = other DNA
atgtcactccagatggttactgtgtcaaataatatcgccttaatacaacccggttttagtctgatgaacttcgacggccaggtcttcttcttcggtcagaaaggctggccaaaacgctcttgccctaccggcgtctttcacttagatgtgaagcacaaccatgtcaaactcaaacctactatcttcagtaaggacagctgctaccttccaccgttacgctaccccgccacctgcaccttcaagggaagtctcgaatctgagaagcatcagtacattatacacggcggcaagaccccgaataacgaagttagtgacaaaatatatgtcatgtcgattgtctgtaaaaacaacaagaaagtgacatttcgttgcacagagaaagacctggttggggacgtgcccgaagcaagatatggccattccattaatgtggtctattctaggggaaaatcaatgggggtgctctttgggggtcggtcttacatgcctagtacccacaggactacagagaagtggaactccgtggcagattgtttgccttgcgtgtttctggtcgattttgagttcggttgtgcaacgagctatattttacccgaactccaagacggcctaagctttcacgtgtcgattgccaaaaacgacacgatctacatcctcggggggcactcactcgccaacaatatccgaccagcaaacctttatcgcattcgtgtggatttacccctgggatctccagctgtaaactgcacggtcctgccaggagggatttctgtaagctccgcaatacttacgcagaccaataatgacgaatttgtcatagtaggtggctaccaactggagaaccaaaagcggatgatttgcaacattatttcactcgaagataataaaatcgagattcgtgagatggagacacctgactggacaccagacattaaacactcaaaaatctggttcggatcaaatatggggaacgggacggtattcctgggcatcccgggcgataataagcaggtagtaagcgaagggttctatttttacatgctcaaatgtgccgaagacgatacaaacgaggagcagaccacttttaccaactctcaaacgtctacggaagatcctggcgactcgaccccttttgaggatagcgaagagttctgcttttcggccgaagccaactcgtttgatggggatgatgaatttgacacttacaacgaggatgatgaggaggacgaatctgagaccgggtactggattacttgctgtcctacttgcgatgtcgatatcaacacctgggtgcctttctatagcactgagctgaacaagcccgcgatgatttactgttcccatggtgacgggcactgggtccacgcgcagtgcatggatctcgcagagaggaccctgatccacttgtctgctggcagcaacaagtattattgcaacgaacatgtggagattgcgcgcgctcttcatacaccccagcgtgtgttgcctctcaaaaagccacccatgaagagcttgagaaagaagggttctgggaagatcctgacaccagccaagaaatctttcctacgacgcttgtttgactag

SEQ ID NO: 131963 - DNA, 216 bp, synthetic construct
  misc_feature 1..216: note = Description of Artificial Sequence: Synthetic coding sequence
  source 1..216: mol_type = other DNA
atgagcctgcagatggtgacagtgtccaataacatagcattgattcagcctgggtttagtctcatgaacttcgatggccaggtctttttcttcggccagaaaggttggccgaaacgatcttgtccgacgggcgtctttcacctcgatgtcaagcacaatcacgtgaagctcaagcccacaattttttcaaaggacagttgctatctgccaccatag

SEQ ID NO: 131964 - DNA, 453 bp, synthetic construct
  misc_feature 1..453: note = Description of Artificial Sequence: Synthetic coding sequence
  source 1..453: mol_type = other DNA
atgtccctccagatggtcaccgtgtccaataacatagccctcattcagccaggttttagcctgatgaacttcgacggccaagtattcttctttggtcaaaaaggctggccgaagcggtcctgtcccacaggcgtcttccacctggacgtcaaacacaatcatgtgaagttaaaacccacaatattctctaaagactcctgctacctcccccctctgcggtatccagcgacgtgtactttcaagggaagcctcgagtccgagaaacatcagtacatcattcatggcggaaagacgcccaacaacgaggtttctgataagatttatgtgatgtctatcgtttgcaaaaacaacaagaaagtcaccttcaggtgtacggaaaaggacctggtgggagatgtgccagaggcacggtatgggcattcaataaacgtcgtctattccagggggaagtag

SEQ ID NO: 131965 - skipped

SEQ ID NO: 131966 - DNA, 1503 bp, synthetic construct
  misc_feature 1..1503: note = Description of Artificial Sequence: Synthetic coding sequence
  source 1..1503: mol_type = other DNA
atggatcacacagagggttccccggccgaagagcctcccgcgcacgcaccctctcctggaaagtttggggagcgccctcctcctaaaagactcacccgtgaagccatgcgaaactacctcaaggaacgaggagatcagaccgtactgatcctgcatgccaaagtcgcccagaagtcctatggaaatgagaagaggtttttctgcccgccgccctgtgtatacctgatgggaagcggttggaagaagaagaaagaacaaatggaacgggacgggtgctcagaacaggaaagccagccgtgcgcctttattgggataggaaacagtgatcaggaaatgcagcagctgaatttggaaggaaagaactattgtaccgctaaaactctgtacatatccgattctgataagaggaaacactttatgctgagcgttaagatgttctacggaaatagtgacgacataggagtgttcttgtccaaacggattaaggtgatctcaaagccctcgaagaaaaaacagtccctgaagaatgccgacctgtgtatcgcatctggtactaaggtggctctcttcaatcgcctgagatctcagacagtgtcaactaggtatctgcacgttgaaggtggcaacttccacgcctcatcacagcaatggggtgcatttttcatccatctcctggatgatgatgagtcagagggcgaggagtttactgttagagatggctatattcactacggccagacagtgaaactcgtttgctccgtcacaggaatggcccttccacggctcatcatccggaaggtggataaacagaccgccctgctggatgcagacgacccagtgtctcaattgcacaagtgcgccttctatctcaaggatactgagcgtatgtatctttgtctttcccaggaaagaatcatacagttccaggccactccctgtccaaaggagccaaataaggaaatgatcaacgacggtgcttcgtggacaatcattagtaccgacaaagccgagtataccttttacgaggggatgggaccagtgttggctcctgtgacgccagttccagtggtggaatccttgcagctcaatggtggcggcgacgtggccatgttagaactgacagggcagaacttcactccgaatctaagagtttggttcggcgacgtggaagctgaaacaatgtacaggtgtggggagtccatgctgtgtgtggtgcccgacatatcagcattcagagaggggtggcgctgggtacgacagccagtgcaggttccagtcactcttgttaggaacgacgggattatttatagtacttctctcactttcacctacacccctgagccagggccccgtccccactgtagcgccgcaggcgcaatcctgagagccaactccagccaggtcccccccaacgagtccaacacaaatagcgaggggtcctacacaaacgcctccacaaactcaacgagcgtaaccagcagcactgccactgtggtctcctag

SEQ ID NO: 131967 - DNA, 1461 bp, synthetic construct
  misc_feature 1..1461: note = Description of Artificial Sequence: Synthetic coding sequence
  source 1..1461: mol_type = other DNA
atggcctggataaagcggaaattcggagaaaggccgccaccgaagcgccttacaagggaggccatgaggaactatctgaaggagcgtggtgatcagaccgtattaatactgcacgctaaggtcgcccaaaagtcatatggtaacgagaaacggttcttctgtcctcccccctgtgtgtatctcatgggatcaggatggaagaaaaagaaagagcagatggaacgggacggctgtagcgaacaagaatcacagccctgtgcatttattggaatcggaaactctgatcaagaaatgcagcagcttaatctggaagggaagaactactgcactgctaaaaccctttacatatctgacagcgataagaggaaacatttcatgttgagcgttaagatgttttatgggaactccgacgatatcggggtctttctgtccaagcgcatcaaagtaatctccaagccctccaaaaaaaagcagagtcttaaaaacgcagatctgtgtattgccagcggaacgaaggtcgccctgtttaatcggctgaggtcgcagaccgtcagtacgcggtatttgcatgtcgaaggcgggaactttcatgcttctagtcagcagtggggcgccttctttatacatttgctcgatgacgacgagtctgagggtgaagagtttacagttagagatggctatattcattatggccagactgtcaaattagtctgctccgtgaccggcatggcactgcctaggctgattattagaaaagtagataagcaaaccgcgttacttgacgccgacgaccccgtctcccagctgcacaagtgcgctttttatctcaaggataccgaaagaatgtacctttgtctttcccaagaacgcatcattcagttccaggctacaccctgtcctaaagagccgaataaagagatgattaacgatggggcaagttggaccataatctccactgataaagctgagtacactttttatgagggtatgggtcctgtcctagcccctgtaacaccagtccccgttgtcgaatcactccagctgaacgggggcggagacgtggccatgctcgagttgactggccagaattttacccccaacttgcgtgtatggtttggtgacgtggaggcggagacaatgtacaggtgcggtgaatcaatgctgtgcgttgtccccgacatctcagcctttcgggagggctggcgctgggtgagacagccggtacaggtacctgtgaccttggtgcgcaatgatggcattatttacagcactagtctcacgtttacatacactcctgagccaggcccgaggccccactgctcagcagccggtgctatcttgcgggccaacagtagccaggtcccaccaaacgaatcaaacactaactctgagggttcttacacaaacgccagcacaaactccacctcagttactagcagcacggcgaccgtggtttcatag

SEQ ID NO: 131968 - DNA, 1458 bp, synthetic construct
  misc_feature 1..1458: note = Description of Artificial Sequence: Synthetic coding sequence
  source 1..1458: mol_type = other DNA
atgggagggtgccgaaagtttggtgaacggcctccacctaaaaggcttacacgcgaggctatgcgaaactatttgaaagagcggggcgaccagactgtgcttatcttgcacgctaaagtggcccagaaatcctatggcaatgagaaaaggttcttttgcccgccgccctgcgtctacctcatggggagcggatggaaaaaaaagaaagagcaaatggaacgcgatgggtgctccgaacaggaaagtcaaccctgcgcatttattgggattgggaactccgaccaggagatgcagcagctcaatttagagggcaaaaattactgcacagccaagacactgtatattagcgatagcgacaaacgtaagcactttatgctaagcgttaaaatgttttacgggaatagtgacgatattggggttttcttgagcaaaagaatcaaggtaatatcaaaacccagtaagaaaaaacaatctttgaagaatgcagacctgtgcatcgcgtctggtacgaaagttgcattgttcaacaggttgcgatcgcagaccgtgagtacaagatatttacatgtggagggggggaatttccatgccagctcccaacaatggggtgcattcttcattcacctgctcgatgatgacgagtcagagggagaggagtttacagtaagggacggctatattcattacggtcaaacggtgaaactagtttgctccgtgacaggcatggccctccccaggctaattattaggaaagtcgacaaacagactgctcttctcgatgctgatgatcctgtgagccaacttcacaagtgtgctttctaccttaaagatacggagcggatgtatttgtgcttaagtcaagagcgtattattcaattccaggctaccccatgccccaaagagcccaacaaggagatgataaatgacggcgcgtcttggacaattatctccactgacaaagctgagtacacattctacgagggaatgggccctgttttggcacctgtgacccccgtacctgtagtggagtcgctgcagttgaacggcggtggagatgtagcaatgttggagttaacggggcagaacttcactcccaatctcagagtgtggtttggagatgtggaggccgaaactatgtatcgctgtggagaatccatgctgtgcgttgtgccagatataagcgcctttcgagaggggtggcgttgggtgcggcagcctgtacaggtgcccgtgaccctcgttaggaacgatggaattatttatagcacttctttgacgttcacatacactcctgagcctggcccccgcccacattgctctgctgccggtgcaattcttagagctaactcgtcccaggttccccctaatgaaagtaacacaaactcagaaggctcatacaccaacgcaagcacaaactctacaagcgtgacatcctccactgccactgttgtatcttag

SEQ ID NO: 131969 - DNA, 1464 bp, synthetic construct
  misc_feature 1..1464: note = Description of Artificial Sequence: Synthetic coding sequence
  source 1..1464: mol_type = other DNA
atggctccggtggtcaccgggaagtttggagaacgtccaccaccaaaaagattaaccagagaggcaatgagaaactatctcaaagagcggggggaccaaaccgtgctcattcttcatgctaaggtagcacagaaatcttatgggaatgaaaagagatttttctgtccacctccctgtgtgtatctgatgggtagtgggtggaagaagaaaaaagagcaaatggagagagacggctgttcagaacaagagtcccaaccttgcgcgttcattggtattggcaactccgatcaggagatgcaacagctcaatctagaggggaagaactattgcactgcgaagacactttacatcagcgatagtgacaagagaaaacattttatgctgtcagttaaaatgttttatggcaattcagacgacattggagtcttcctgagcaaacggatcaaggttattagtaagcctagcaagaagaagcagagtctgaagaacgcagacctctgcattgcctctggcacgaaagtggctctgttcaatcgactgaggtctcaaacagtgtcaactaggtacttgcatgtggaaggtggaaactttcacgcgtccagtcagcagtggggcgcattttttattcaccttctcgatgatgacgaaagcgaaggcgaggagtttactgtgcgtgatggctacatacactatggtcagaccgtgaaactcgtctgctccgtcacaggaatggcactgccaaggctaatcattcgcaaggtcgataaacagaccgctctgcttgacgccgatgacccggtaagccaactgcacaaatgcgcattttacctgaaagatacagaaagaatgtatctttgcttgagccaagaaaggattatccagttccaggccactccttgccccaaggagcccaacaaggaaatgatcaatgatggagcaagctggacaattatcagtacagacaaggccgaatatacattctatgaaggtatgggaccggttctcgcccctgtgactccggtccccgtagtggaaagtctgcaactgaatggaggcggcgacgtcgctatgctcgagctcacggggcagaactttacaccaaacctgcgcgtctggtttggcgacgtagaagcagaaaccatgtacaggtgcggagagagcatgctgtgtgttgtgcccgatattagtgcgttccgggagggatggagatgggtacgccagcccgttcaggtgccggtcaccttggtccgcaatgatgggatcatctactcgacatctctgacattcacctacactcccgagcctggcccaaggccccactgcagtgctgcaggagcgatactgcgcgctaattcttctcaggtccctccaaacgaatccaacaccaacagcgagggctcctacaccaatgcaagcactaattcaacaagtgtcacctcttcgacagcaacagtggtctcatag

SEQ ID NO: 131970 - DNA, 1461 bp, synthetic construct
  misc_feature 1..1461: note = Description of Artificial Sequence: Synthetic coding sequence
  source 1..1461: mol_type = other DNA
atggcttggatcaaaagaaaattcggagaacgccccccccctaaaaggctcacccgggaggcaatgcggaattatttgaaagaacggggagaccagactgtgctgattttgcacgcaaaggttgctcagaaaagctacggaaacgagaagcgttttttctgcccaccaccctgcgtttatctgatgggaagtgggtggaaaaagaagaaggagcagatggaaagagacggctgctccgagcaagagtcgcagccttgcgcatttattggcattggcaatagcgaccaggaaatgcaacagcttaatctggaggggaaaaactactgtaccgcgaaaactctttacatatcagactctgacaagcgtaaacacttcatgcttagtgtcaaaatgttctacggcaattccgacgatatcggcgtgttcctctctaaaagaattaaggtaatcagcaagccctcgaaaaagaaacagtcactcaagaatgccgacctgtgtattgcctccggaaccaaggttgcccttttcaatagactacgttcacagaccgtctcaacacgctacctgcacgttgaaggcggaaacttccatgcaagcagccagcagtggggtgccttcttcatccaccttctcgatgatgacgagagtgagggcgaggagtttaccgtgcgcgacggctacattcattatgggcagaccgtcaagctggtgtgctccgtgaccgggatggctttgccgcgactcatcatacgaaaggttgataagcagacagctctcttggacgccgatgaccccgtctcacagctgcataagtgtgcattctacctcaaggacactgaacgaatgtatctgtgtttgtcccaggaaaggatcattcagtttcaagctacaccgtgccctaaggaacctaataaagagatgatcaatgatggtgctagctggacaattatatcaactgacaaagcggagtacactttttatgaagggatggggcctgtcctggcccccgtgaccccagtgcccgttgtggagagcctccagctgaacggtggcggagacgttgcaatgctcgagctgacaggccagaacttcactccaaacctgcgcgtgtggttcggcgatgtggaggctgaaaccatgtatcgctgcggtgagagtatgttgtgtgtggtacctgacatcagcgccttcagagaggggtggaggtgggtgcgccagcctgttcaagtgcccgtcacactggtgaggaacgatggaatcatttatagtaccagtttgacattcacatacacacctgagcctggcccaagaccacactgcagcgccgctggcgccatccttcgggcaaacagcagccaggtgcctcctaacgagtccaatactaactcagaagggtcatacacaaatgcctctaccaattctacaagtgtgacttctagcactgccactgtggtgagctag

SEQ ID NO: 131971 - DNA, 1503 bp, synthetic construct
  misc_feature 1..1503: note = Description of Artificial Sequence: Synthetic coding sequence
  source 1..1503: mol_type = other DNA
atggatcacactgaaggatcacccgcagaagagcctcccgctcatgccccctcccccggaaaattcggagagcggccccccccaaagagattgactagggaggccatgcgcaattatttaaaagagagaggagaccagaccgtgttaatactccacgctaaggtcgcccaaaagtcctacggtaacgagaaaagattcttttgtcctccaccatgcgtctacttgatgggttctggttggaaaaaaaagaaggagcaaatggagagagacgggtgcagtgagcaagaatcccagccttgtgcttttatcggcataggcaacagcgatcaagagatgcagcagctgaatctagaaggtaagaactactgtactgctaagaccttatacatatccgacagcgataaaaggaaacactttatgttgtctgtgaagatgttctacggaaattccgatgatattggtgtgttcctcagcaagcggataaaagtgatctctaaacctagcaaaaagaaacagtccttgaagaatgctgacctgtgtatcgcctccgggaccaaagtagcgctgttcaataggctacggagccagaccgtgagcacccgctatctgcacgtggaaggtggaaacttccatgcatcctcacagcaatggggcgctttttttattcacctgttggatgatgacgagtcagagggcgaagaattcacggtaagggatggatacattcattacggccagacggtcaaactcgtttgctctgtaacaggtatggccctgccacgcctcattatacgaaaagtggacaaacagactgctctgctcgacgccgacgatcccgtctcacagctgcataaatgtgccttctacctcaaagatactgagcgcatgtacctctgcttgtcacaggagcgtattatacagtttcaagctacaccatgcccgaaagaaccaaacaaggagatgattaacgatggcgcctcctggacgattattagtaccgacaaggcagaatacacattctatgaaggcatgggaccggttctggctcctgtgacaccagttcccgtcgtggagagcctccagctcaacggtgggggcgatgtggccatgctcgaattgaccgggcagaatttcacacctaacctcagggtgtggttcggcgacgtggaagcggagactatgtataggtgtggggaaagcatgctttgcgtcgtgccagatatctcggcttttcgcgaaggatggcgctgggtgcgccagccagtgcaggtccccgttaccttggtccgcaatgatggaatcatttactccacatccctgacgtttacctatacccccgagccgggtccaaggccacattgcagtgcagccggcgccattctacgcgcgaattcctctcaggtaccgccaaacgagtctaacaccaatagtgagggaagttataccaacgcctcaactaattcaacctccgtgacatcaagcactgctactgtggtctcctag

SEQ ID NO: 131972 - DNA, 432 bp, synthetic construct
  misc_feature 1..432: note = Description of Artificial Sequence: Synthetic coding sequence
  source 1..432: mol_type = other DNA
atgaggaactatttgaaggagagaggggatcagacagtactgattttgcatgctaaagtcgcacagaagtcctatgggaatgaaaagcgcttcttctgcccccccccatgcgtctatctgatggggagtggctggaaaaagaagaaagagcagatggaaagggacgggtgttcagagcaggaaagccagccatgtgccttcattggtataggcaactctgaccaggaaatgcaacaactgaatctggagggcaagaattactgtacagccaagaccctgtatataagtgatagcgacaagcgaaaacacttcatgctgagtgtaaagatgttctatggcaactccgatgacattggggtctttctttctaagagaatcaaggtgatcagcaagccaagtaagaagaagcaatctctcaaaaatgcagactag

SEQ ID NO: 131973 - DNA, 87 bp, synthetic construct
  misc_feature 1..87: note = Description of Artificial Sequence: Synthetic coding sequence
  source 1..87: mol_type = other DNA
atggcgtggattaagaggaagttcggcgagcggccacccccaaagagactgacgcgtgaagctatgagaaactatctgaaagagtag

SEQ ID NO: 131974 - DNA, 294 bp, synthetic construct
  misc_feature 1..294: note = Description of Artificial Sequence: Synthetic coding sequence
  source 1..294: mol_type = other DNA
atggcttggattaaacgcaaattcggagaaagacccccacccaagaggctgactagggaagctatgagaaactatctgaaagaacgtggagaccagaccgtcctgatcttgcatgcaaaagtcgctcaaaagagctacggaaacgagaagcgattcttctgtccacccccctgcgtgtacttgatgggatctggatggaaaaagaaaaaggaacagatggagcgggacggctgctcagagcaagagagtcagccttgcgctttcatcggcattggaaactctgaccaggaatag

SEQ ID NO: 131975 - DNA, 1398 bp, synthetic construct
  misc_feature 1..1398: note = Description of Artificial Sequence: Synthetic coding sequence
  source 1..1398: mol_type = other DNA
atgcgaaactatctgaaggaaagaggcgaccaaaccgtgctaatacttcatgcaaaggtggctcagaagagctacggtaacgaaaaaaggttcttttgtcctccaccatgcgtgtacctgatggggtccggatggaagaagaagaaggaacaaatggagcgagacggctgctccgagcaggaatctcagccttgcgcatttataggcatcggaaattctgatcaggagatgcagcagcttaatctggagggcaaaaactactgtactgcaaagacattatacatttccgatagcgacaagagaaaacatttcatgctgtcagtcaaaatgttctatggaaattccgacgacatcggagtctttctaagtaagagaattaaagtgatcagcaaaccttctaaaaagaaacagtctctgaagaatgccgacttatgcatcgcttcaggcactaaagtcgcactgtttaaccgactgaggagtcaaacagtctccactcggtatcttcatgtggagggaggcaattttcatgccagttcacagcagtggggagccttctttatccatctgctggacgatgacgaaagcgagggtgaagagtttacagttagagatggatacatccactatggtcagaccgtgaaactggtatgctcggtcaccggcatggcacttcctaggttgatcattcgaaaagtcgataagcagaccgccctcctggatgcagatgacccagtgtctcagctccataagtgcgctttctatctgaaagacacagagcgtatgtatctgtgtctctcccaggagcgcattatccagttccaggcaacgccctgtcctaaagaaccaaacaaggagatgatcaatgatggagcaagctggaccatcatcagcactgacaaggccgaatacacattttacgagggaatggggccagtgctcgctccagtgacacccgtgcccgtggttgaatcgttgcagctcaatggcggaggtgacgttgcgatgctggagctgaccggccagaacttcacaccaaatctgcgcgtatggttcggggacgtggaagcggagaccatgtacaggtgcggagagagcatgctgtgcgtggtgccagatataagtgcatttagggaaggttggaggtgggtacggcaaccggtccaggttcccgtgaccttggttcggaacgacggaatcatctactctacgtctttgaccttcacttacacaccggaaccgggcccacgcccgcactgctccgcagcaggggccatcctgagagctaatagttctcaagttcctcccaacgagtctaacacaaattctgaaggttcctataccaatgctagtaccaatagtactagcgttacatcatccactgcgacagtggtgagctag

SEQ ID NO: 131976 - DNA, 474 bp, synthetic construct
  misc_feature 1..474: note = Description of Artificial Sequence: Synthetic coding sequence
  source 1..474: mol_type = other DNA
atgcggaactacttaaaagagcgcggcgatcagactgtcctgattctgcacgctaaggtggctcagaagagctatggaaacgaaaagagattcttttgtcctccaccatgcgtttacctgatgggttccggatggaagaagaaaaaggagcagatggaaagagacggatgttcagagcaagagagtcagccctgtgcttttatcggaattggtaattctgatcaggagatgcagcagctgaatctggaagggaaaaactattgtactgctaagactctatatatttccgatagcgacaagcggaaacatttcatgctgtcggtgaaaatgttttatggcaattcagacgacattggtgttttcttgtcaaagaggatcaaggttatttcaaaaccatcaaagaagaagcaatcactgaaaaacgctgacctgtgtattgcttcgggcacaaaggttgcactgtttaaccgctag

SEQ ID NO: 131977 - DNA, 150 bp, synthetic construct
  misc_feature 1..150: note = Description of Artificial Sequence: Synthetic coding sequence
  source 1..150: mol_type = other DNA
atggcctggatcaagcgcaaatttggggagcgtcccccacccaagcgactcacaagggaggcaatgcggaattatctgaaagagaggggcgatcagacagtactgatcctgcacgccaaagtggcgcagaagtcctatggaaatgagtag

SEQ ID NO: 131978 - DNA, 324 bp, synthetic construct
  misc_feature 1..324: note = Description of Artificial Sequence: Synthetic coding sequence
  source 1..324: mol_type = other DNA
atggcttggatcaagcgtaagtttggggagaggcctcctccaaagaggctgactagagaggctatgcgcaactatttgaaagaacggggagaccagacggtcttgatactgcatgccaaggttgcccagaaatcctacggtaacgagaagcgctttttttgcccaccaccttgcgtgtatttgatgggctctgggtggaaaaagaagaaggagcaaatggagcgggacggctgtagtgaacaggaatcccaaccttgtgcttttatagggatcggcaactcagatcaggagatgcaacagctcaacctcgagggcaaaaattag

SEQ ID NO: 131979 - DNA, 285 bp, synthetic construct
  misc_feature 1..285: note = Description of Artificial Sequence: Synthetic coding sequence
  source 1..285: mol_type = other DNA
atggcatggattaagcgaaagttcggtgagcgcccgccacctaaaagactcaccagggaggcgatgcggaactacctgaaggaacgcggcgatcagaccgtattaatcctgcatgccaaggtggcccagaagagctacggcaacgaaaagcgctttttttgccctcctccatgcgtgtacctgatgggcagtggatggaaaaagaagaaagagcagatggagcgggacgggtgctccgaacaggagagccaaccttgtgcctttataggcatcggaaacagctag

SEQ ID NO: 131980 - DNA, 537 bp, synthetic construct
  misc_feature 1..537: note = Description of Artificial Sequence: Synthetic coding sequence
  source 1..537: mol_type = other DNA
atggaccatactgaagggagccctgccgaggagccaccggcccacgcaccctcacccggtaaatttggcgaacggccaccgccgaagcgcctcacccgagaagcaatgcgcaattacctgaaggaacgtggggaccagactgttctgattctacacgcaaaagtggcacaaaaaagctacggcaacgagaagagattcttttgcccacccccttgcgtttatttgatgggctccggttggaagaagaagaaggagcagatggaaagggatggatgttcagagcaggagtcacaaccgtgcgctttcatcggtattgggaacagtgatcaggaaatgcagcaactgaacctggagggcaagaactactgtaccgctaaaacactgtatatctcagattctgacaaacggaagcatttcatgctgtccgtgaaaatgttctacggaaacagtgacgacatcggagttttcctgagtaagcgaataaaggttatcagcaaaccaagtaaaaaaaagcagagccttaaaaatgcggattag

SEQ ID NO: 131981 - DNA, 333 bp, synthetic construct
  misc_feature 1..333: note = Description of Artificial Sequence: Synthetic coding sequence
  source 1..333: mol_type = other DNA
atggcttggataaaaaggaagtttggagagcggcctccccccaaacggcttactagagaggctatgcgcaattacctgaaggaaaggggagaccaaactgtgttaatcctgcatgccaaagtcgctcagaagtcatatggaaacgaaaaacgatttttctgccccccaccctgcgtctacctgatgggcagcggatggaagaagaaaaaggagcagatggagcgggatgggtgctctgagcaggaaagccagccatgtgccttcattggcataggcaacagtgatcaagaaatgcagcagttgaatctggagggaaaaaattattgcacatag

SEQ ID NO: 131982 - DNA, 342 bp, synthetic construct
  misc_feature 1..342: note = Description of Artificial Sequence: Synthetic coding sequence
  source 1..342: mol_type = other DNA
atggcttggatcaagagaaagttcggcgaacgtccccctcctaaacggctgactcgcgaagccatgcgcaattatctcaaggagaggggtgaccagacggtgctgatcttacacgcgaaagtggctcagaagagttacggcaacgaaaaaaggttcttttgcccccctccctgcgtataccttatgggctctggctggaaaaagaaaaaagaacagatggagagggacggctgctctgaacaggaatcccagccctgtgcgtttattggcatcggcaattcagatcaggagatgcaacagctgaacttggagggcaaaaattactgcacagccaagacgtag

SEQ ID NO: 131983 - DNA, 147 bp, synthetic construct
  misc_feature 1..147: note = Description of Artificial Sequence: Synthetic coding sequence
  source 1..147: mol_type = other DNA
atggcttggataaagcgaaagttcggcgagaggcctcccccaaaaaggctgaccagggaagcaatgagaaactacctgaaggagaggggagaccaaacggtgctgattttacacgccaaagtggcccagaagagctacggaaactag

SEQ ID NO: 131984 - DNA, 570 bp, synthetic construct
  misc_feature 1..570: note = Description of Artificial Sequence: Synthetic coding sequence
  source 1..570: mol_type = other DNA
atgaggaactacctcaaggaacgtggcgaccagacggtcttaatactccatgcaaaagtcgcccagaagtcttacgggaacgaaaaacggttcttttgccctcccccgtgcgtttatctgatgggttcaggctggaagaagaaaaaggagcagatggagcgtgatggctgctcggaacaggaaagtcagccctgtgcattcataggaatcggcaactctgatcaagagatgcagcagcttaatctggaggggaaaaactactgcactgctaagaccctgtatatcagcgattccgacaaacgcaaacattttatgctcagcgtcaagatgttctacgggaactctgacgacataggagtgtttctgtctaagcgcatcaaagtgatcagcaaaccatcgaaaaaaaagcagagtctgaaaaatgccgatttatgcattgcgtccggcacgaaggttgccctttttaatcgtctaagatcacagactgtctccacaaggtatttgcacgtcgagggcggcaacttccacgcttcatctcagcagtggggggctttctttatccacctctag

SEQ ID NO: 131985 - DNA, 600 bp, synthetic construct
  misc_feature 1..600: note = Description of Artificial Sequence: Synthetic coding sequence
  source 1..600: mol_type = other DNA
atggcatccgtgtctgccctgacagaggaattagattccatcacttcggagttgcacgcggtagagatccaaatacaggaactgactgagcggcaacaagagctcattcagaagaagaaggtgttgactaaaaaaattaagcagtgtctggaagactctgatgccggtgccagtaacgaatacgattcttcaccagccgcttggaacaaggaagacttcccctggagcgggaaagtcaaagatattttacagaacgtgttcaaactcgagaagtttagaccactccagctcgagacaattaatgtcacgatggccggtaaggaggtattcttggtgatgccaacgggtggcggcaaatccctttgctaccagttacctgccctgtgttccgacgggttcactctggtgatctgccctctgattagtcttatggaggaccagctgatggtactaaaacagttgggtatcagcgcaactatgctgaacgccagtagtagtaaggagcacgtcaagtgggtgcatgccgagatggtaaacaaaaattctgaactgaaattgatttacgtgactccggaaaaaatcgccaagtcgaaaatgtag

SEQ ID NO: 131986 - DNA, 636 bp, synthetic construct
  misc_feature 1..636: note = Description of Artificial Sequence: Synthetic coding sequence
  source 1..636: mol_type = other DNA
atggccagtgtctccgcactgactgaggaactcgacagcattactagcgaactccacgccgttgaaatccagatacaggaactgacagagaggcaacaggagctgattcagaagaagaaggttctcactaagaagataaagcagtgtctcgaagatagtgacgcgggggcctccaacgagtatgactcctctccagctgcttggaataaggaagatttcccatggagtggcaaggtgaaagatatcctgcagaacgtattcaagctggaaaaattcaggcccttgcagttagagaccattaacgtgactatggccgggaaggaagttttcctcgtgatgcctacgggtggcggcaaatctctgtgttaccagctgccggcgttgtgtagtgacggatttactctggtcatttgccccctgatctcactcatggaggatcaacttatggtcttaaagcagctgggtatttctgcaacaatgctcaatgcaagcagcagtaaggaacatgtaaaatgggtgcatgcagaaatggtgaataagaattctgagctgaagctgatatatgttaccccagagaaaatagctaagagcaagatgtttatgagccgacttgagaaggcatatgaggcccggtag

SEQ ID NO: 131987 - DNA, 1950 bp, synthetic construct
  misc_feature 1..1950: note = Description of Artificial Sequence: Synthetic coding sequence
  source 1..1950: mol_type = other DNA
atggcttccgtgtccgccttgacagaggagctcgactccatcactagcgaactgcacgcagtcgaaatacagatccaagaattaacggaaaggcagcaggagctgattcagaagaaaaaggttctcacaaagaaaattaagcaatgcttggaggactctgacgctggcgcctcgaacgagtacgatagtagtccagctgcttggaacaaggaggacttcccgtggtcgggcaaggtgaaagacatcctgcagaacgtcttcaagcttgaaaaattcagaccactgcagcttgagaccataaacgtgacaatggccggtaaagaagtctttctggtcatgcctaccggaggggggaagtccctgtgctaccagctgcctgctttatgtagtgatggctttaccctggtgatctgcccgcttatctctctgatggaggatcagctgatggtgctgaagcagctgggaatttcagccacaatgttgaacgccagtagcagcaaggagcacgtcaagtgggtccacgccgagatggtcaataagaactccgagctaaagctgatctatgtgacaccagaaaaaatcgccaagagcaagatgtttatgagtagactagaaaaagcctacgaggcaaggcgatttacacgaatagccgtggatgaggtgcactgttgcagtcagtggggacacgactttcgccctgactacaaggccctgggaatacttaaacgccagtttcccaacgcctctttgatcggtctgacagccaccgccacaaatcacgtgctcacggatgctcagaaaatcctctgtatagagaagtgcttcacctttacagccagtttcaatcggcccaatctgtactacgaagtgagacagaagccatctaacaccgaggacttcatcgaggacattgtgaagctaatcaatggccgttacaagggacagtctggcattatttactgcttttctcagaaggacagcgagcaggtaaccgtgtcactgcaaaacctgggtatccacgcaggagcataccacgccaacctggagcccgaagacaagacaaccgtccaccgcaagtggagcgccaatgaaattcaggtggtcgtggctactgtcgcatttggaatggggatcgataagcccgacgtgaggttcgtcattcatcacagcatgtcaaagtctatggagaattactaccaggaaagtggacgggctggccgggatgatatgaaggccgattgtatcctttactacggcttcggggatatctttagaattagtagtatggtcgtcatggagaacgtgggccagcagaaactgtacgaaatggtctcctattgtcaaaacatctctaagtgcaggcgggtgctcatggcccaacatttcgatgaggtatggaacagtgaggcctgcaataaaatgtgcgacaactgttgtaaggattctgcatttgaacggaagaatattacagaatactgtcgggatctcatcaagatactaaaacaagccgaagagcttaacgagaaattaacacctttaaagttaatagactcttggatggggaaaggggccgcaaagctccgcgtggcaggagtagtcgctcccaccctgcccagagaagatctggaaaagattatagcacacttcttaatccagcaatatctgaaggaagattactcctttacagcgtacgcaaccataagctacctgaaaatagggccaaaagctaatctgttaaataacgaagctcacgccattaccatgcaagtgacaaaatctacgcaaaactcatttagggcagaatcatctcaaacatgccacagcgagcagggagacaaaaagatggaggaaaaaaattctggcaacttccagaagaaggccgccaacatgctccagcaaagcggtagtaaaaataccggcgcgaaaaagaggaaaattgacgacgcttag

SEQ ID NO: 131988 - DNA, 1950 bp, synthetic construct
  misc_feature 1..1950: note = Description of Artificial Sequence: Synthetic coding sequence
  source 1..1950: mol_type = other DNA
atggctagcgtgagtgctctgaccgaagaactggacagcattacctcggagttgcatgcggtggagattcagattcaggagcttactgaacgccagcaggaattgattcagaagaaaaaggttctgacaaagaaaataaagcagtgtttggaagactcagacgcaggcgcctccaacgaatacgattccagcccagcagcctggaataaagaggatttcccatggagcggcaaagtgaaagatatactccagaacgtgttcaagctcgaaaagttcagaccactgcagctggaaacaatcaatgtgaccatggcaggcaaggaagtgttcctggttatgccaaccggagggggaaagagcttatgctaccagcttcctgcattgtgctcagatggatttacactcgtaatctgtccgctcattagccttatggaggaccagctgatggttctgaagcaactcggcatttcggcaaccatgttgaacgcatcctcttcaaaggaacacgtgaagtgggtgcatgccgagatggttaacaaaaactcggaactgaaactgatttatgttacaccagaaaagattgccaaatctaaaatgttcatgagccggctcgaaaaagcgtatgaggctaggcggttcacgaggatcgccgtggacgaagtgcattgctgttctcaatgggggcatgactttcgaccagattacaaggccctcggtatccttaagagacagtttccgaacgcatccctgattggccttaccgctacagctaccaatcatgtgctgacggacgctcaaaagattttgtgcatcgaaaagtgtttcaccttcacggcaagctttaataggccgaatctgtactatgaggtgcggcaaaaaccctcaaatacggaagactttatcgaggacattgtgaaactgattaatggaagatataagggacagtctggcatcatttattgtttttcccagaaggattccgagcaggtcaccgtgagtttgcagaacctagggattcatgctggagcatatcacgcaaatttggaacccgaggataagactactgtgcaccggaaatggtctgccaatgaaatacaggtcgtggttgcgacagttgcattcggaatggggatcgacaagccagatgtgagattcgtgattcaccacagcatgagcaagtcgatggagaactactaccaagaaagcgggagggcaggcagggatgatatgaaagcggattgtatcttatactatgggtttggggatatttttagaatctcatcaatggtggtcatggagaatgtaggccagcagaagctctatgagatggtctcttactgtcagaatatatctaagtgcagaagagtcttgatggcacagcacttcgacgaggtatggaattcagaggcatgtaacaagatgtgtgacaattgttgcaaagattctgcattcgaacgtaaaaacattactgagtactgtcgtgatcttattaaaatcttgaagcaggccgaagagctgaacgagaagctgaccccgctcaagctcatcgattcatggatgggcaagggagcagctaagctccgagtggcaggcgtggtggctcccactctgcccagggaagatttggagaagattattgctcactttctgatccaacagtatctgaaagaggactattcattcacagcatacgccactatatcctacttaaaaatagggcccaaggccaacttgctgaacaatgaagcccacgctataacaatgcaagtgactaagtccactcagaacagctttagagcagagtcaagccagacttgtcactcggagcagggagacaaaaagatggaagagaaaaacagtggtaattttcagaagaaagccgcaaatatgctgcaacagagtggaagcaaaaacactggggccaagaaaaggaaaatcgacgacgcctag

SEQ ID NO: 131989 - DNA, 321 bp, synthetic construct
  misc_feature 1..321: note = Description of Artificial Sequence: Synthetic coding sequence
  source 1..321: mol_type = other DNA
atggcctcagtcagcgccttgacagaagagctggactctattacatccgagttgcacgccgttgagattcagattcaggaactgaccgagcggcagcaggagctcatacagaagaagaaggttcttacaaaaaaaataaaacagtgccttgaagatagtgacgccggagcctcaaatgagtacgactccagccctgcagcctggaataaagaggacttcccatggagcgggaaggtgaaggatatactgcaaaatgtgttcaagttagagaagttccgacctttgcaactcgaaactatcaatgtaactatggccggctag

SEQ ID NO: 131990 - DNA, 294 bp, synthetic construct
  misc_feature 1..294: note = Description of Artificial Sequence: Synthetic coding sequence
  source 1..294: mol_type = other DNA
atggccagtgtgtctgcactgactgaagagttggatagtattacttctgaactgcatgctgtggaaattcaaatacaagaactgaccgagcggcagcaggaactgatacaaaaaaaaaaggtgcttactaagaaaattaagcagtgccttgaggattcagacgcaggagcatctaatgaatatgatagctcccccgcagcctggaacaaggaagactttccttggtccggcaaggttaaggacatccttcaaaacgtgtttaagcttgagaaatttcggccattgcaactgtag

SEQ ID NO: 131991 - DNA, 219 bp, synthetic construct
  misc_feature 1..219: note = Description of Artificial Sequence: Synthetic coding sequence
  source 1..219: mol_type = other DNA
atggccagcgtgtcagcgctaactgaagaactggatagtatcacatccgagctgcatgccgttgagatccagatccaggaactcaccgagcgccagcaggagctgattcagaaaaagaaggtactcaccaagaagataaagcagtgcctggaggattccgatgcgggcgcgagcaatgagtatgactccagtcctgccgcatggaataaggaagactag

SEQ ID NO: 131992 - DNA, 396 bp, synthetic construct
  misc_feature 1..396: note = Description of Artificial Sequence: Synthetic coding sequence
  source 1..396: mol_type = other DNA
atggcctccgtttccgcgctcactgaagagttagatagcatcacttctgaactgcacgcggtcgaaatccagatacaggagctaacggaaagacagcaggagctcatccagaaaaaaaaggtactcaccaagaagatcaagcagtgcttagaagactcagatgctggcgcctctaacgaatatgactcctccccagctgcctggaataaggaagactttccgtggagtggcaaggttaaggacatcttgcagaatgtgttcaaactggagaaattccggccattgcaactcgaaacaataaatgtgaccatggccggcaaagaagtgttcttggtgatgcccactggaggcggaaaatccctttgctatcagttgcccgctttatgcagtgattag

SEQ ID NO: 131993 - DNA, 2976 bp, synthetic construct
  misc_feature 1..2976: note = Description of Artificial Sequence: Synthetic coding sequence
  source 1..2976: mol_type = other DNA
atgagctcccaccacacgaccttcccttttgatcctgaaaggcgggtcagaagcacattgaagaaggtatttggttttgactctttcaagacacctctacaagagtccgcaacaatggctgttgtgaaaggtaataaagacgtgttcgtgtgtatgcccacaggggccggcaagtccctctgttaccagctgcctgctctgctagctaaaggcatcacaattgtggtatctccactcatagccctgatccaggatcaggtggaccacctgctcacactgaaggtacgggtcagtagtctgaactccaagctgtcggcccaggagaggaaggagctcttagctgatctcgagcgagagaaaccgcagaccaagatactgtatattacacctgaaatggctgcgtccagctctttccagccaacattaaactctctcgtcagccggcacctcctctcctatttagtagtggacgaggcacactgtgtctctcagtggggccacgattttaggcccgactacctgcgcttaggcgccctcagatccagactcggccatgctccttgcgtcgccctcacggccacagctactccccaggtgcaggaggacgtgttcgcagcactgcacctgaagaagccagtcgcgatctttaagaccccctgtttcagagcaaacttattttacgacgtccagttcaaagagctcatctctgacccttatgggaacctcaaagacttctgtctcaaagcattggggcaagaggccgacaaaggtttgtctggctgtgggattgtgtactgccgcacaagagaggcatgcgagcagttggctattgaactgagctgcagaggcgtcaatgccaaggcgtaccatgccggccttaaggcgtccgagcggaccctggtccaaaatgattggatggaggaaaaggtaccggtgatagtcgccaccatatctttcgggatgggagtggacaaggcaaatgtgagatttgtggctcattggaatatcgcaaagagcatggccggatattaccaagagtccggtcgagccggacgcgatgggaagccttcctggtgtaggctatattatagccggaatgatagagaccaagtgagcttcctaattcgaaaagaggtcgctaagctgcaggagaaacgaggtaacaaggccagtgataaagcaacaataatggctttcgatgcgctggtgacattctgcgaagaactgggctgccggcacgccgccattgctaagtactttggagatgctttgccggcctgtgctaagggttgtgatcactgccagaatcctactgccgttcggcggcgccttgaagcgttggagcggagtagcagctggtcaaagacatgtatcggcccaagtcaggggaatggcttcgaccccgagttatacgagggagggcggaaagggtacggggattttagtaggtatgacgagggctctggagggtcaggagatgaggggagagacgaagctcacaaacgggagtggaacctcttctaccaaaagcaaatgcagcttaggaaaggcaaagaccctaagattgaggaattcgtgccacctgacgagaactgtccattaaaagaagctagctctaggaggataccccggctcacagttaaagctagggaacattgcctcaggctcttagaggaggctctgagcagcaacaggcaatccacgaggacggcggatgaggccgatctgcgcgccaaggcggtagagctcgagcacgagaccttcagaaatgccaaggtggctaacctatacaaagccagtgtcctgaagaaggtggcagatatccatcgtgctagcaaagacggccagccttatgatatgggaggctctgccaaaagctgttctgcacaggcagagcctccagagccgaacgagtatgatattcctcctgctagccacgtgtatagccttaagcctaaacgggtgggggctggcttccctaagggctcctgccccttccagactgccacagaactcatggagaccacgagaattagagaacaggcgccacagccagagagagggggggaacacgaacccccatctcggccatgcggattgctggacgaggatgggtccgagcctctccccggaccccgaggggaggtgcctggcggatccgcccactacggcgggcccagtcccgaaaagaaagctaaaagctccagcggtggcagctccctggcgaaggggcgtgcctcgaaaaaacagcaattgttagccacagctgcccacaaagattcgcagagtatcgcaaggtttttttgtcggcgggtggagtcccccgccctgctggcaagcgcgcctgaggccgaaggcgcatgtccatcatgtgagggcgtgcaaggacccccgatggccccagaaaagtacacaggtgaggaggatggcgcaggaggtcattcccctgctcctccccagactgaagaatgcctgagagagcgcccttctacttgccctccccgggatcagggtaccccagaggtgcaacctacaccggccaaggatacctggaagggtaagcggcccagatcacaacaggaaaatccagagagtcaaccgcagaaaaggcctaggccatcggctaagccttcagtggttgctgaagtgaagggatctgtgtctgcctcggaacagggcacgctgaacccaacggctcaggatccgttccaactgtccgcccccggagtatccctgaaagaggctgccaacgtcgtggtcaagtgtctgaccccgttttataaggagggcaaattcgcatccaaggagttgtttaaggggttcgccaggcacctgtcccacttactgactcaaaagacatcgccaggacggagtgtcaaagaagaggcccagaatctaattcggcacttcttccatggtcgtgcccgatgtgaaagcgaggcagattggcacggtttgtgcggccctcagcgatag

SEQ ID NO: 131994 - DNA, 1308 bp, synthetic construct
  misc_feature 1..1308: note = Description of Artificial Sequence: Synthetic coding sequence
  source 1..1308: mol_type = other DNA
atgtctagccaccacacaacctttcccttcgatcctgagaggagagtccgttccacacttaagaaggtgttcggtttcgattcatttaagactccgttgcaggagtctgccactatggccgtggtcaagggcaataaagatgtgtttgtatgcatgccaacaggagcaggtaagagcctgtgctatcagcttccagctcttctcgcaaaagggatcaccatcgttgtgtcccctctgatcgcacttatacaggaccaggtggatcacctccttactctcaaggttcgcgtttcatccctcaactctaagctgtccgcccaagagaggaaggagctgttagctgacctagagagagagaagcctcagacaaagatcttgtatatcactcctgaaatggctgccagtagttctttccagcctactctaaatagcctcgtatccagacacttactctcctacctggtagtagatgaggcccattgtgtgtcccaatgggggcatgatttcaggccagattatttgagactgggtgcactccgtagtagactcgggcacgcaccttgtgtggcgctgacggctacagctacgccccaagttcaagaggatgtgttcgcagccttgcacctgaagaaacccgtcgcaatcttcaagacaccctgtttcagagcaaaccttttttacgatgtccagtttaaggagctcattagcgatccctatggcaacctcaaggacttctgccttaaggcccttggccaggaggcagataagggtctctcagggtgtggcattgtgtactgtaggactagggaagcctgcgagcaactggcaatagagctgtcgtgtagaggtgtgaatgcaaaagcgtaccacgcaggactcaaggcttctgagcgcacattggtacagaacgattggatggaggagaaggtacctgtgattgtggccacaatcagtttcggcatgggcgtagataaagccaatgtgagattcgtagcccactggaacattgctaagagtatggctggctattatcaggaatcggggagggctgggcgcgatggcaaaccctcgtggtgtaggctgtactattctagaaacgatagagatcaagtgtcttttctcatcagaaaggaggtggccaagttgcaagagaagagagggaataaagcttcagataaagccacaataatggcctttgatgccctggtcactttctgtgaggagctcgggagatgggggcggggacacggcaaatccctgcgtgctgcatggtgctcccaggtcgtcagtcgacatgccgagctgtag

SEQ ID NO: 131995 - DNA, 1233 bp, synthetic construct
  misc_feature 1..1233: note = Description of Artificial Sequence: Synthetic coding sequence
  source 1..1233: mol_type = other DNA
atgtcctctcaccataccacattcccgtttgatcctgaaagacgggtcaggagcaccctcaaaaaagtgttcgggttcgacagctttaagacgcccctgcaggaaagcgctactatggcagtcgtgaagggcaataaagacgtattcgtgtgtatgcctacaggggccggcaagtccctttgctatcagctgccagcactgttagcgaaaggtatcaccatcgtggtttcccccttgatcgctctaatacaggaccaggtggatcacctgctaactttgaaggtccgtgtgagctctttgaattcaaaattatccgcacaggagcgaaaggagctgttagcagatctcgaacgggaaaaacctcagactaagattctctacatcaccccagaaatggcagccagtagttcttttcagcctaccttgaacagcctcgtgtcccgacaccttctgtcatacctggtggttgatgaggcgcattgtgtaagccagtgggggcatgattttcgtccggattatctgcgcctgggagccctgaggagcagactaggccacgccccgtgcgtggcactgacggctacagccacaccccaggtgcaggaagatgtattcgccgccctgcacctcaagaaacctgtggctatttttaagacgccttgtttcagggccaatctcttttacgacgtccagtttaaagaactgatcagcgacccctacggaaacctgaaggacttctgcctcaaggccctgggccaggaagccgacaagggcctgtctggatgcggcatcgtgtattgtagaaccagagaggcatgtgagcagctggcaatcgaactttcttgcaggggcgtaaacgccaaggcctaccatgccggactgaaggcaagtgaacggaccctggtacagaacgactggatggaggagaaagtcccagtaatcgtcgccaccattagctttggtatgggagtcgacaaagccaatgtacgcttcgtggcccactggaatattgccaaatcaatggctgggtattatcaggagtccggccgagccggacgagacggaaaaccatcgtggtgcagactatattattcgaggaatgaccgcgatcaagtgagttttctcatccgcaaggaagtcgctaaactgcaggagaagcggggaaataaggcctctgacaaggccaccataatggcttttgatgccctggtcacattctgcgaggaactgggatag

SEQ ID NO: 131996 - DNA, 3057 bp, synthetic construct
  misc_feature 1..3057: note = Description of Artificial Sequence: Synthetic coding sequence
  source 1..3057: mol_type = other DNA
atgtcttcccatcacaccacatttcccttcgaccctgaaagacgggtgagaagtactctcaagaaggtctttgggtttgatagctttaagactccgctgcaggagagcgctacaatggctgtggtaaaaggcaacaaggatgtgtttgtgtgcatgcctacgggagccgggaagagtctttgctaccagttgcctgcgcttcttgctaagggcatcactatcgtagtttctcccttaattgctcttatacaggatcaggtcgatcacctccttacattaaaagtgagagtgtcttctctgaacagcaaactgagcgctcaggagcgaaaggaattattggccgatctggagagggagaagccacagaccaaaattctgtatataactcctgaaatggcagcttcatcctcttttcagcctacactgaactctcttgtatcaaggcacctcctgtcatatctcgtcgtggacgaagcccactgtgtttctcagtggggccacgattttcgtccagactacctccgtctgggcgccctaaggtcaaggctgggccacgcaccgtgcgtcgctctgacagctaccgccactccccaagtgcaggaggacgtcttcgcggcccttcatctcaagaaacctgtggccatatttaagacaccgtgctttcgcgcaaacttattttacgacgtgcagtttaaggagttaatatcagacccctacgggaacttgaaggacttttgtctcaaggcattgggacaggaagccgataagggtctctcaggatgcggcattgtctactgcagaacccgggaggcctgtgagcagctggcaatcgaactgtcatgccggggcgtaaatgccaaggcctaccatgccgggctgaaggcatcagagcgaacactagtacagaatgactggatggaagagaaggttccggtcatcgtcgccaccattagcttcgggatgggcgttgacaaagccaatgtaagattcgtggctcactggaatatcgcgaagagcatggctgggtactatcaagagagtggacgtgccggccgtgatgggaaaccctcttggtgccggctatattatagccgcaatgatcgagaccaggtcagttttcttataaggaaagaggttgccaaactacaggaaaagagggggaataaggcttcagacaaagcaactattatggcattcgatgcactagtgacgttttgtgaggagcttggctgccgccacgccgccatcgcaaaatacttcggtgatgcgcttcctgcctgtgccaaaggatgtgaccattgtcagaaccccacggccgtcaggaggcggctcgaggcgcttgaacggagctcttcatggtctaagacttgcatcgggccatcccagggcaatgggtttgaccccgagctctacgaagggggacggaagggatacggcgactttagccgatatgacgaaggaagcgggggatcaggggatgagggtagggatgaagcccataagcgtgaatggaatctgttctaccagaagcaaatgcagctcaggaagggcaaagatcctaagatcgaggaatttgtgcctcccgacgaaaattgccccctgaaagaagcaagttctcgacgaatccccagactgactgttaaggcccgagagcactgcctgcgcctcctggaggaggctctcagcagcaaccggcagagcacccgaaccgccgatgaggcagacctccgagcgaaggcagtagagcttgagcacgaaacttttaggaacgccaaagtggcaaatttatataaagctagtgtcctgaagaaggtggcagacattcaccgggcatcaaaagatggccagccctatgacatgggtggctcggcaaagagctgtagcgcacaagctgaacctcctgagcctaatgaatacgatattcctcccgcgagccacgtgtattccttaaagccaaagagagttggtgccggctttcccaaagggtcctgtccattccagaccgcgaccgaactcatggagacgacgcggattagggaacaggctccccagcctgagaggggcggggagcatgaacctcccagccggccttgcggcctcctggacgaagatggcagtgaacccttgcctggcccacgaggagaggtgccaggaggttccgcacactacggcggtccttcccctgagaagaaggcgaagtcgtcctcgggaggctcaagcttggctaaaggcagggccagcaagaagcagcaactgctggccaccgccgcgcataaggactcccaatctatcgcgaggtttttttgtagaagagtcgaatcccccgccctgctcgcctccgcaccggaagccgaaggcgcatgccctagttgcgagggcgtgcaagggcctcctatggctcccgaaaagtatacaggcgaggaagatggagccgggggccattcgcctgccccaccgcaaaccgaagaatgcctgcgggaacgaccgtcaacatgcccgcccagggatcagggcacccctgaagtccagcctactcccgccaaggacacttggaagggcaagagaccaaggtcgcagcaggagaaccccgagagtcaaccccaaaagcggcccaggccttccgcgaaaccgagcgttgtggcagaggtgaagggctctgtgagtgcctctgaacagggaaccctgaaccccactgcccaagatccatttcaactatccgcacctggggtctcgctcaaagaagccgccaacgttgtggtaaagtgcctgacacccttctacaaagagggcaaatttgcctctaaagagctgttcaaaggattcgctcgacacctctcacacctccttactcaaaaaaccagccccggacgatcggtcaaagaggaggcacagaatctgattcggcacttcttccacggacgagccagatgtgagagcgggccccacgggtgggttttctgggacacatgtagaggccaaaaggtcgaaggaggaggagcagctgccggacggaggggacggaagtcaggtccttctccctcctcgaagtctggctag

SEQ ID NO: 131997 - DNA, 1761 bp, synthetic construct
  misc_feature 1..1761: note = Description of Artificial Sequence: Synthetic coding sequence
  source 1..1761: mol_type = other DNA
atgttcctggttagatgcagacacgcagcaatcgcaaagtatttcggcgacgctctgcctgcctgcgcgaaggggtgtgatcactgtcagaatcccacagccgtgaggcggcgtttggaggcactggagagatcaagttcctggagcaagacctgcataggaccatcccaaggcaatggattcgatcccgaactttacgaaggcggacgcaagggttatggcgacttctcacgatacgatgagggatctgggggatccggggacgaaggtagagacgaggcccataaacgtgagtggaacctgttttatcagaaacagatgcaactgcgcaagggaaaagatcccaaaattgaggaattcgtgcctcccgatgagaactgtccgctgaaagaggcttcatcccgccgcatacccagactcaccgtcaaggcgcgtgagcactgcctgaggctactggaggaagcgctttctagcaataggcaatccacccggaccgccgacgaggctgacctgagggccaaagctgtcgagctggagcacgaaaccttcagaaatgcgaaagtggctaacctctacaaagcatccgtcctcaaaaaggtggctgatatccacagggcaagtaaagacgggcagccctatgacatgggcggctccgccaagtcttgctctgcacaggccgaacctcccgaaccgaatgagtacgatattcctcccgcaagtcatgtttattccctgaagcctaaacgtgtcggcgctgggttccctaagggcagttgccctttccagacagctaccgagctgatggaaactactagaataagagaacaagccccgcagcccgaaagaggcggtgaacacgaacccccctcccgcccctgcggacttctggacgaagacgggagcgaaccactgccggggcctcgaggtgaggtgcctggaggctccgctcactatggtggccccagcccagagaaaaaggcaaagtcatcgtccggagggtctagccttgccaagggtcgtgcaagcaagaagcagcagctcttggctacagccgcccataaagattcgcaatccatagccaggtttttctgtagacgagtggaaagccctgcccttctcgcctctgcccccgaggccgaaggcgcctgccccagctgcgagggcgtccagggaccgcccatggctccagagaagtatacgggtgaggaagatggcgccggcggacactccccagccccaccacagacagaggaatgccttcgcgagaggccctcaacgtgtccacctagggatcagggcacccccgaggtccagcccacacccgccaaagacacctggaaaggcaagaggccgcggtctcaacaagaaaacccagaatctcaaccccaaaagagaccacgcccatctgccaaaccatcagtggtagctgaggtgaagggatccgttagtgcctccgagcaagggaccctgaatcccacggcccaggacccctttcagctctcagcccctggtgtgagtttgaaagaagcggccaacgtggtcgttaaatgtttaacgcctttttacaaggaaggcaagtttgccagcaaggaattatttaaagggtttgcccgacatctgagccacctgctcacacaaaaaacctcccccggccggagcgtgaaggaggaggcccagaacctgattcgccatttcttccacggcagagcccggtgtgagtccgaggcagattggcacggcctgtgtggacctcagaggtag

SEQ ID NO: 131998 - DNA, 1200 bp, synthetic construct
  misc_feature 1..1200: note = Description of Artificial Sequence: Synthetic coding sequence
  source 1..1200: mol_type = other DNA
atggcgcaaagggctttcccaaacccttacgcagattataacaagtcactcgcggagggatacttcgatgccgcgggacggctcactcccgagttttcgcagagactgaccaacaagatcagagaactgttgcaacagatggaaagaggcttaaagtccgcagacccccgggatgggaccggctatacggggtgggctgggatcgccgttctctacctgcacctgtacgacgtatttggggacccagcttacctgcaattggcccacgggtacgtgaagcaaagcctgaattgccttacaaagagaagcatcacattcttgtgcggtgacgccgggcccttggctgtggccgctgtcctctatcataagatgaacaacgaaaaacaggccgaggattgcatcacgcggctcattcacttaaacaagatagaccctcacgcccctaatgagatgctgtatggccgcatcggctacatctacgccctcctgttcgtgaacaagaattttggagtggagaaaattccccaaagccacatccagcagatttgcgaaacaatcctgactagtggagaaaatttggcacggaagcgcaactttaccgccaagtccccgctcatgtacgaatggtaccaggaatactatgtgggtgcagctcacggcttggccggcatctactattacctgatgcagccgtcattacaagtgtcacagggaaaactgcattctttggtgaagcctagtgttgattatgtgtgccagctgaagttcccctctggcaattaccctccgtgtattggcgacaatcgagatttgctggtacattggtgccatggggccccgggcgtgatttacatgctcattcaagcatataaagtctttcgagaggagaagtacctttgtgatgcttaccagtgtgccgacgtcatatggcagtacggcctgctcaagaaaggttacggcctctgccacggatctgccggcaacgcatatgcgttcctcacactctataatctgactcaggacatgaaatatttgtaccgggcatgtaaattcgcagaatggtgtttggagtacggtgaacatggatgcaggacaccagacacccccttcagtctttttgagggcatggccgggactatatactttctggccgatctgctggtgccgactaaagctcgctttcccgcattcgaactgtag

SEQ ID NO: 131999 - DNA, 528 bp, synthetic construct
  misc_feature 1..528: note = Description of Artificial Sequence: Synthetic coding sequence
  source 1..528: mol_type = other DNA
atgctgcccccaatggcccttccttcagtgagctggatgctccttagctgcctgatcctgctctgtcaggtgcagggagaagagacgcagaaagaacttccttctccaaggatttcctgccccaagggcagtaaggcttacggtagtccatgctacgcattgtttttatctcccaaaagctggatggatgcggacctggcatgtcagaaaagacctagtggcaagctcgtgagcgtgctgtcaggggcagagggcagcttcgtgtcatcattggtgaggtctatcagcaatagttattcctacatctggattggtctgcacgacccaacccagggcagcgagccggatggggacgggtgggaatggtcatccacggatgtcatgaactactttgcgtgggagaagaacccctctactatactgaatccagggcattgcggttccctgtcccggagcacaggcttcttgaagtggaaggattacaattgtgacgctaagttgccgtatgtctgtaagtttaaggactag

SEQ ID NO: 132000 - DNA, 528 bp, synthetic construct
  misc_feature 1..528: note = Description of Artificial Sequence: Synthetic coding sequence
  source 1..528: mol_type = other DNA
atgctgcctcctatggccctgccttctgtgagttggatgctcctgtcttgtctcattcttctgtgtcaggttcagggcgaggagacccagaaggaactgccttcccctagaatcagttgccccaaaggtagcaaggcctacggatccccatgttatgctttattcctgtcccccaagtcatggatggatgctgacctggcctgccaaaagcgcccatctggcaagcttgtctcggtgctttccggggcagaaggaagtttcgtctcaagtttagtccgttcaatcagcaattcctattcctatatttggattgggctacacgatccaacgcagggcagtgaaccagacggtgatggatgggaatggtccagcaccgatgtcatgaactacttcgcatgggaaaagaacccaagtacgatcctgaatcctggacactgtgggagcctgtctcgtagcaccggcttcttaaaatggaaggattataactgtgatgctaaactgccttacgtttgcaagtttaaagattag

SEQ ID NO: 132001 - DNA, 390 bp, synthetic construct
  misc_feature 1..390: note = Description of Artificial Sequence: Synthetic coding sequence
  source 1..390: mol_type = other DNA
atgttgccacccatggccttacccagcgtctcatggatgctgctctcctgcctcattctgctgtgtcaagtacagggagaggaaactcaaaaagagttgccaagtccccgtatctcctgccctaaaggctcaaaagcctatgggagtccctgctacgctctatttcttagccccaagtcctggatggatgctgatgggtcggaaccagacggtgatggatgggagtggtcttctaccgatgttatgaattactttgcctgggaaaagaacccttccacaattctcaaccccggtcattgcggaagtctgtcccgttcgaccggattcttaaagtggaaggactataattgtgatgctaagctcccttacgtctgcaagtttaaagattag

SEQ ID NO: 132002 - DNA, 477 bp, synthetic construct
  misc_feature 1..477: note = Description of Artificial Sequence: Synthetic coding sequence
  source 1..477: mol_type = other DNA
atggccagtaggtccatgcgtctgctgctgttactctcctgtcttgccaaaactggagtgctgggagacatcataatgcggccaagctgtgccccagggtggttttatcacaagagtaattgctacggctattttagaaagctacggaactggtcggatgctgagttagagtgccagagttacggtaatggcgctcatctggcctcaatcctgtctctcaaggaggcctctaccatagccgagtacatcagcggataccagcgcagccagcctatctggatcggcttgcatgaccctcagaagcgacagcagtggcagtggattgacggcgcaatgtacttgtacagatcttggtcgggcaagtccatgggcggaaataagcactgtgcagaaatgagttcaaacaataacttcttaacctggtcctcaaatgagtgtaacaaaagacaacactttttgtgcaagtacaggccctag

SEQ ID NO: 132003 - DNA, 477 bp, synthetic construct
  misc_feature 1..477: note = Description of Artificial Sequence: Synthetic coding sequence
  source 1..477: mol_type = other DNA
atggccagcagatctatgcgattactccttctgctgtcctgcctggctaagacaggggtgctgggcgacataatcatgagaccctcatgtgcgcctgggtggttttatcataaatctaattgttatggctactttcgtaaattgaggaattggagcgatgccgagctcgaatgccagagctacggtaacggcgcgcacctggcttccattttatctttaaaagaagcttcaacgatcgcggagtatatttccggttatcagcgatctcagcccatatggataggcctgcatgacccacagaaacggcaacagtggcagtggattgatggcgcaatgtacttataccggtcttggagcggaaagagtatgggggggaacaagcactgcgcggagatgagcagtaacaataatttcttgacctggtcatctaatgaatgtaacaagcggcagcactttctgtgcaaatatcggccctag

SEQ ID NO: 132004 - DNA, 405 bp, synthetic construct
  misc_feature 1..405: note = Description of Artificial Sequence: Synthetic coding sequence
  source 1..405: mol_type = other DNA
atggctagccgatccatgcggctccttcttctgctctcttgtctagctaagacaggcgtcctcggcgatattattatgcgcccctcgtgcgcccccggctggttctatcacaagagcaattgctacggatattttagaaagctgcggaactggtccgatgccgaggtccgtaaccttcttcccgcatggcctggtctatctagagccaaagatcaaccagagccacagatttctttcgactcaggtagttccgttctgcccggccattacgaggagaagcctttgtggctcgttaagtggagggaagagggatgtgtattcaacagttttaatagtgtgtccatcgcagaggccggcgccgtctgccagacactggatggactccaggcccacacagacacatag

SEQ ID NO: 132005 - DNA, 375 bp, synthetic construct
  misc_feature 1..375: note = Description of Artificial Sequence: Synthetic coding sequence
  source 1..375: mol_type = other DNA
atggcgtcccggtccatgcgtctgctgctgctcttgagctgtctcgcaaaaactggcgtattgggggatatcattatgcggccctcctgtgcaccgggatggttctaccacaagtcaaattgctacgggtatttccgaaagttaaggaactggagtgacgctgagcttgaatgccaaagttatggcaatggagcccatctagcgtcgatcctgagcttaaaggaagcctcgacaatagcagagtatatctcaggataccagcggagccagcctatctggattgggcttcatgacccccagaagcagccactgaactcctgtctgttctttttgtggccgtgggagggcctgccagtggagtcactgctggggtag

SEQ ID NO: 132006 - DNA, 900 bp, synthetic construct
  misc_feature 1..900: note = Description of Artificial Sequence: Synthetic coding sequence
  source 1..900: mol_type = other DNA
atgtcaagtatcaaaattgagtgtgttctccccgagaattgccgctgcggcgagtcacccgtatgggaagaagtgagtaattctctactgttcgtggatattcctgctaaaaaagtctgtcgatgggactctttcacaaaacaggtgcagagagtcaccatggatgcgccagtgagctctgtggctctgcggcagtcaggggggtacgttgcgactatcggcaccaagttttgtgctctgaattggaaggagcagtctgccgtggttctcgccacagtcgacaacgacaagaagaacaataggttcaatgatggaaaagtcgatcccgcaggaaggtatttcgccggaaccatggcggaggaaactgccccagccgtcttggagagacaccagggcgcgctctatagtctcttcccggatcaccacgtaaaaaaatactttgaccaggtggacatttctaacggtctagactggtcactggatcataaaattttctactacatagacagtctatcatactctgtagatgcttttgattacgatctccagacgggccagatctccaacagacggtctgtctacaagttagaaaaggaagagcagatcccagacgggatgtgcatcgatgccgaggggaaactgtgggtcgcctgttataacggaggacgcgtgattcggttggatcctgtcacagggaagaggctacagacggtgaagttgcctgtagacaagacaacctcttgttgcttcggcgggaagaattattctgaaatgtatgtaacttgcgcgcgagacgggatggatcccgaaggactccttcggcagcctgaggctggagggatctttaaaattacaggattgggcgtgaaaggtatcgctccatactcatatgctggctag

SEQ ID NO: 132007 - DNA, 900 bp, synthetic construct
  misc_feature 1..900: note = Description of Artificial Sequence: Synthetic coding sequence
  source 1..900: mol_type = other DNA
atgtccagtattaaaatagaatgtgtcctgccagaaaattgcaggtgcggagaaagccctgtgtgggaagaagtcagcaactccctcttatttgtggacattccagctaagaaggtgtgccggtgggattcattcaccaaacaagtccagagagttacaatggatgcccccgtctcctccgtggctcttaggcagtccggaggttacgttgctacgattggaaccaaattctgtgcgctgaattggaaagaacagtctgccgttgttcttgccactgtcgataacgacaagaagaacaaccgattcaacgacggaaaggttgatccagcgggccgttacttcgccggcacgatggcagaagagacggctcccgcagtactcgaaaggcatcagggcgccttgtactctctcttccccgatcaccacgttaagaaatactttgaccaggtcgatatctcaaacggattggattggagcctcgaccacaaaatattttactatatcgacagcctttcttatagcgtggacgcctttgattacgacctgcaaaccggccagatcagcaatcggcggtctgtttacaaattggagaaggaagagcagatccctgacggcatgtgcatcgatgcagagggcaagttgtgggtagcatgttataatggaggacgcgtgataaggctcgaccccgtcaccgggaaacgattgcagactgtgaaactacctgtcgataaaactacctcttgttgttttggtgggaaaaattactctgagatgtacgtaacttgcgctcgcgacggtatggatccagaagggctgctgcgccagcccgaggcaggcggtatctttaaaatcacaggattaggagtgaagggcatcgccccatactcatacgcagggtag

SEQ ID NO: 132008 - DNA, 900 bp, synthetic construct
  misc_feature 1..900: note = Description of Artificial Sequence: Synthetic coding sequence
  source 1..900: mol_type = other DNA
atgtcgtcaataaaaatcgagtgcgtactgccagaaaattgccgttgcggcgaaagcccagtgtgggaggaagtttccaattctctcctgtttgtcgacatcccagccaagaaggtgtgcaggtgggacagctttactaagcaggtgcagagagtaacgatggacgctccagtgtctagtgtcgctctgcgccagagcggagggtatgtcgctacgattggaacgaagttctgtgccctgaactggaaggagcagtcagccgtcgtgctggcaaccgtcgacaacgacaagaagaataatagatttaatgatggtaaagtggacccagccggcaggtatttcgctggcaccatggctgaggagacagcacctgccgtcttagaacgccaccagggggctctgtatagcctcttccccgatcaccacgtgaaaaaatattttgatcaggttgacatctctaatggcctcgactggtccttggatcataagatcttttactacattgactcactgtcttactccgtggatgccttcgattacgacctgcagacaggccaaatcagtaaccggcgtagcgtttataaactggaaaaagaggagcagattccagacggcatgtgcattgacgctgagggcaagctgtgggttgcttgttacaacggagggagggtcattagactggatcctgtgacgggcaagcgactccagaccgttaagctgcccgtggacaagacaacgtcttgttgctttggaggcaagaactattccgagatgtacgtcacttgtgcacgggatggcatggaccccgagggcttgctgagacagccagaggcaggaggtatttttaaaattaccggtctaggagtgaaaggcattgcgccctactcatatgctggatag

SEQ ID NO: 132009 - DNA, 684 bp, synthetic construct
  misc_feature 1..684: note = Description of Artificial Sequence: Synthetic coding sequence
  source 1..684: mol_type = other DNA
atgagcagcatcaagatagagtgtgtgcttccagaaaactgtcggtgtggtgaatcgcccgtgtgggaagaagtttcaaattctttacttttcgtggacatacccgcaaaaaaagtttgccgttgggattctttcaccaaacaagtacagcgagtaaccatggacgcacccgtgtccagtgtggccctgcggcagagcggaggctacgttgccactatcgggaccaaattctgtgccttaaactggaaagagcaatctgccgtggtcctagccacagtggataacgacaaaaaaaataatagatttaacgatggcaaggtcgatccagcaggacgttattttgcagccaatagacgcagtgtttacaagctcgaaaaggaagagcagatcccagatggcatgtgcattgatgcagaaggaaaattgtgggtggcatgctataacggcggccgagttatcagactggacccggtgacaggaaagagactccagaccgtgaagttgccagtggataagaccaccagttgctgctttggcgggaaaaattatagtgagatgtacgtgacctgtgcccgcgacggcatggatcctgagggcctgctgaggcaacctgaagcaggcgggatctttaaaatcactggtttaggagttaaaggcatcgcaccttactcttacgccggatag

SEQ ID NO: 132010 - DNA, 3876 bp, synthetic construct
  misc_feature 1..3876: note = Description of Artificial Sequence: Synthetic coding sequence
  source 1..3876: mol_type = other DNA
atgtcaagcgccgtgggccctcggggcccacgccctcccacagtcccccccccaatgcaggagctgccagacctgtcccacctcactgaagaagagaggaatatcattatggcagtcatggaccgacaaaaggaggaggaggaaaaagaggaagcgatgctgaaatgtgtggtgcgggatatggctaaaccggcagcatgtaagaccccacggaatgctgagaaccaaccacaccagccgtcacctaggctgcatcaacaattcgagtcttataaggagcaagtgagaaagatcggagaggaggcgagacggtaccagggcgaacataaagacgacgccccaacttgcgggatctgccacaaaactaaatttgccgacggctgtggccacctgtgctcatattgtcgaactaagttttgcgctcggtgcggcggccgcgtgtctctgaggagtaataatgaagacaagtatgttatgtgggtgtgtaacctttgcagaaaacagcaagagatactgaccaaatccggtgcctggttcttcggcagcgggccccaacagacgtcccaggacggaacattgagcgataccgcaaccggtgctgggtctgaggtgcctcgtgagaagaaagcgaggctgcaggagcggtcccgttcccagactcctctgtccaccgcggcagctagtagccaagacgccgctcccccatcagctccacccgaccggtcaaaaggagccgagccttcccagcaggccctgggtcccgagcaaaagcaggcgagctctaggagtcgctccgagccaccacgcgagcggaaaaagaccccaggcctgtcagagcagaacggcaaaggggccctgaagagtgagagaaagcgggtgcctaagacttctgctcagccagttgaaggcgccgttgaggagagggagcgcaaagagaggcgagagagcagaaggctggaaaaagggagatctcaggactacccagacacgcctgagaaacgggacgaaggaaaggctgctgatgaggagaaacagcgtaaggaagaggactatcagacacggtaccggagcgatcctaaccttgccaggtatcctgttaaacctccccccgaagaacaacagatgcgcatgcacgccagagtcagtagagcgagacatgaaagaagacatagcgatgtggccctgcccagaacagaagccggcgcagctcttccagagggaaaggcaggaaaacgagcccctgccgctgccagagctagccctccggattcccctcgcgcatactcagccgagcgcactgcagagacaagagcgcccggcgcaaagcaactgactaatcactccccacccgcgcctagacatggaccagtgcctgccgaagctcccgaattaaaggcccaagaaccgctcagaaagcagtcacgcttggatccgtcttccgcagtactaatgaggaaagccaaacgggagaaggtggaaacaatgctgcgaaatgactccctgtcgtctgaccagtctgaatccgtgcgcccctccccacccaaacctcaccgcagcaaacggggcggcaagaaacggcagatgtccgttagctcttccgaggaagagggtgtaagtaccccagagtacacatcgtgcgaggatgttgaactcgaaagcgagtcagttagcgaaaaaggcgacttagactattactggcttgaccctgctacttggcattcccgggaaacctcacctatcagcagccatcctgtcacctggcagccctcaaaggagggcgataggcttataggacgagtaatattaaataagcgcacaactatgcctaaagacagtggtgcactgttaggcctcaaagtggtcggggggaaaatgaccgatctcggccgtctgggcgctttcatcactaaggtgaagaaaggttccctggcagacgtggtaggacacctgcgagctggtgatgaagtgctcgagtggaatggcaagcccctgccaggggctacaaacgaggaggtgtataatattatcctggaaagtaagagcgaaccgcaggtcgagataattgtatctagaccgatcggcgatatccccagaattcctgaaagcagtcatcctccactcgagtcaagttcaagctcctttgaaagccagaagatggagagaccttctatttcagtgatctctccgacaagccctggagctctgaaagatgcaccccaagtcctcccagggcagcttagtgttaagctctggtacgataaggtcggccaccagttgattgtgaatgtgttgcaggctacggacctgccagctcgggtcgatgggaggccccggaacccatatgtcaaaatgtacttcctgccggacagatcagacaagagtaagcgccggaccaagacagtgaaaaaaattcttgaacctaagtggaatcagacctttgtttatagtcacgtgcatcggagggacttcagggaacgcatgctggagataacggtctgggatcagcctcgagtgcaggaagaagagtccgaattcctcggcgagattctcattgagctggaaacggcactgctcgatgacgagcctcattggtacaagctgcaaacccatgacgaatcctccctccctctgcctcagccttcacctttcatgccgcggaggcacatacatggcgagagtagttctaagaagctgcagagatctcaacgcatctccgactccgacatctcagattacgaggtcgacgacggaataggtgtagtcccaccaggctaccgctcctctgcccgagaatcgaagagcaccacactgacagtgccagaacagcagcgcacaacgcaccaccggagcaggtcggtttctccccacagagggaacgaccagggaaagcctaggagccggctaccaaatgtgcccctccagaggtctttggacgagatccatcctactcgacgtagccgcagtcccactcgtcaccatgacgcctcacgatcaccggtggaccatagaacacgcgatgtcgactctcagtacctgagcgagcaggatagaatgcatcgtcagaggagcccaacacagtcaccacctgcggacacctccttcagcagcagaagaggaagacagctgcctcaagtgcccgtgcgtagtggctctatcgaacaagagtccggacataaaaagctgaagtctaccattcagagaagcactgagaccggcatggcagctgaaatgaggaagatggtacgacagccatccagagaatcaaccgatggatctattaattcttactccagcgagggaaacttaatcttccccggagttcgcctaggggccgattcccagttttccgatttcctggatggactgggcccagcccagctagtggggcgccagacactggccacccctgcgatgggggacatccagataggcatggaggacaaaaaaggccaattggaggtcgaggtgatcagggcccggtcattgacacagaaacccggatcgaagagcacccccgccccatatgtgaaagtgtatctgttggagaacggcgcttgtattgccaaaaaaaaaacccgcattgctaggaagaccttggatccactgtatcagcagagcttggtttttgacgaatcccctcagggcaaggttctgcaggtgatagtttggggagactacggtcgtatggaccacaaatgcttcatgggggtagcccaaatactgctagaagagctcgaccttagctctatggtcataggatggtataaactgtttcctccctcttcgctcgtcgatccaacactaaccccgttaaccagacgcgccagccagtcaagtctggagagctccactggacccccttgcataagaagctag

SEQ ID NO: 132011 - DNA, 4428 bp, synthetic construct
  misc_feature 1..4428: note = Description of Artificial Sequence: Synthetic coding sequence
  source 1..4428: mol_type = other DNA
atgagttccgccgtcggaccaagggggccacgcccgcccactgtccccccccctatgcaggagctgcctgacctgtctcacctgactgaagaggagcgcaatattattatggcggtgatggatcgccaaaaggaggaagaagaaaaagaagaagcaatgttaaagtgcgtggtgcgggacatggccaagcccgcagcttgcaagactccgagaaacgccgaaaaccagccacatcagccaagtccccgactgcatcagcagttcgagagttacaaggagcaagttcgaaagatcggggaagaggccagaaggtaccagggcgagcacaaagacgacgcaccaacctgcggcatctgtcataagaccaaattcgctgacggttgtgggcacctgtgctcctactgccgcaccaagttctgcgctcggtgtggtggccgcgtgtccctgagatccaacaacgaagatatctgcgttatgtgggtctgcaacctgtgcagaaaacagcaggaaatccttaccaagtccggcgcgtggttctttgggtccggcccgcagcaaacctcccaagacgggactttgagtgatacggcaactggagccggtagcgaggtgcctagagagaagaaagctcgactccaggaacgctccagaagtcagacccctctgtctacggctgccgcctcctcccaggacgccgctccaccgtccgcaccaccggataggtcaaaaggcgccgaaccttcccagcaagccctgggccctgagcagaagcaagcgtctagccggtcaagatcggaaccaccgagggaaagaaagaagactcctgggctttccgagcagaacggaaagggggcactaaaaagtgagcgtaaacgcgtgccaaaaaccagcgcacagcctgtcgagggagctgtggaggagcgagaaagaaaggagagaagagagtctcggcgactcgaaaaaggccgatcccaggactaccctgatacgccagagaaaagggacgaaggcaaggccgccgacgaggaaaaacaaagaaaagaagaggactatcagacaaggtacagaagcgatccaaatctggcacgctacccagtgaaacccccgccagaggagcagcagatgcgcatgcacgctagggtgagccgagcccgacatgagaggcgtcacagtgacgtagcactgcccagaacggaagccggagccgccttacccgagggaaaggcgggaaaaagagcgcccgccgccgcacgggcaagccctcccgattcccccagagcctattccgccgagcggaccgcagaaacccgggcgccaggagccaaacagctgactaatcatagcccccccgctcccaggcatggacctgttccagcagaggctcctgagctgaaggctcaagaaccactccgaaagcagagccggctggatccaagctctgccgtgctcatgaggaaggcaaaaagggagaaagtggaaacaatgctccgcaacgattcactcagctcggaccagtccgagtcagtgcgccctagtccacccaaacctcacaggtctaagcgcggcggcaagaagagacagatgtcagtgtccagttccgaagaagagggcgtgtctactcccgagtacactagctgcgaagacgttgaacttgaatctgagagtgtgtctgagaaaggcgacttggactactattggctggaccctgccacatggcactctcgggaaacgtctcccatttcctcgcatcccgtcacgtggcagccttctaaggaaggcgaccgcctgattgggagagtcatactgaacaaacggacaacgatgcctaaagacagcggggcactgctaggattaaaagtcgttggcggtaagatgaccgacttaggccggctgggtgcttttatcaccaaggtcaaaaagggatcgttagctgatgttgttggccaccttagggccggtgatgaggtcctcgaatggaacggcaagccgctcccaggtgcaacaaatgaagaagtttacaacatcatcctggaatctaagtcagagccgcaggtcgagatcattgtgagcaggccaataggtgacatcccacgtatcccagaatcatctcacccacccctcgaatcatcatcaagctcttttgaaagtcagaaaatggagcgcccatccatttccgtgataagccccacctcacccggcgcacttaaggatgctcctcaggtattgcctggccaactgtctgtaaaactgtggtatgacaaggttgggcaccaacttatcgtgaatgttctgcaggcaacagacctcccggcgcgggtcgacggacgcccaaggaatccatacgtgaaaatgtacttcctcccagaccgaagcgacaaatccaagagacgcacaaagacggtcaaaaaaatcctggagccaaagtggaaccagacctttgtgtacagtcacgtgcacaggcgcgattttcgcgaaagaatgctggagatcacggtctgggatcagcccagagtccaggaggaggagagcgagtttctcggtgagattctgatcgagctggagactgccctccttgacgacgaaccacactggtacaagctccagacgcacgacgaaagttcgctcccactgcctcagccctcacccttcatgccccgaagacacatccacggcgagtcctcaagtaagaagttgcagagaagccaacgaatttctgacagcgacatatctgactatgaagtggacgatggaatcggcgtggtgccccctggataccgctcgagtgcgcgggagagcaagagtacaaccttgaccgtgcctgaacaacagcgcacgacccatcaccgctctcgaagtgttagtccacacagaggaaacgatcagggtaaaccgcggagccggctcccaaatgtcccattgcaaaggtccctggatgagatccaccccacccgaaggtctagatcccctacccggcaccatgatgccagccggtccccagttgatcatcgaacccgtgacgtggatagccagtatcttagcgaacaggactctgagctcttgatgctccctcgggcaaagcgcggtaggtctgccgagtgtttgcatactaccaggatgcacaggcaaagatcccccacacagtcgccacccgcggatacaagttttagcagccgaagagggagacagctcccacaggtgcccgtcaggtcaggcagtatcgagcaagcctccctggtcgtcgaggaacgaactaggcagatgaagatgaaggttcataggtttaaacaaaccacaggaagtggcagtagccaggagttggatcgcgagcagtatagcaaatacaacattcacaaggaccagtataggagctgcgacaacgtgagtgccaagagttctgacagtgacgtttctgacgtctctgccatttcacgcacttctagtgccagcagactatcatccaccagctttatgtccgagcagagtgaaaggccgcgggggagaatccgacgcatgggcacttcaggacgctccatcatgaagagcacctctgtgtcaggcgaaatgtacacgctggagcacaacgacggttcgcagagcgatactgccgtgggtacggtgggcgccggagggaagaagcgcaggtccagcttaagcgcgaaagtggtagctatcgtgtcgagaagatcgcgcagcacctcgcagctctcccagactgaaagcgggcataaaaaacttaaatcgacaattcagcggtcgactgagacgggcatggccgccgaaatgcgtaaaatggttaggcagcccagccgggagagcactgacggctcaatcaatagttattcttcggagggaaacctcatattcccaggggttagactgggggctgactcccaatttagcgatttcctggacgggctgggtcctgcccaactggtgggtcggcagactttggcaacacccgccatgggagacatccagattggcatggaggacaaaaaaggtcagttggaggtcgaggtgattcgagcccgctctttaacccagaagcctggctctaagagcacccctgcaccctacgtgaaagtgtacttacttgagaacggcgcatgcatcgccaaaaagaaaacccgaattgctaggaagaccctggatccgctgtaccagcagagccttgttttcgacgagagtccccagggtaaagtcttacaggtcatcgtttggggtgattatggtcggatggaccataaatgtttcatgggcgtggcacagatactgctcgaagagctcgacctgtcttcaatggttattggctggtacaaactgtttcccccgtctagccttgtcgatcctacactaaccccgctgactcgcagggccagccagagcagcctcgaatcctccactgggcccccctgtatccgcagttag

SEQ ID NO: 132012 - DNA, 4116 bp, synthetic construct
  misc_feature 1..4116: note = Description of Artificial Sequence: Synthetic coding sequence
  source 1..4116: mol_type = other DNA
atgtccagtgccgtaggcccaagggggcctaggcctcctaccgtgcctccccctatgcaggaactccccgacctgagtcatctgaccgaagaggagcgaaacatcattatggccgtgatggatcgtcagaaagaggaggaggagaaggaggaagctatgttgaaatgcgttgtgagagacatggcaaagccggcggcatgtaaaactcccaggaacgctgagaaccagcctcatcaacccagtccccggttgcaccagcagtttgagagctacaaggagcaggtccgtaagataggagaggaagccagaagataccagggcgaacataaagacgatgcgcctacatgtggaatctgccataaaacaaagttcgccgacggatgcgggcatctgtgttcgtactgtcgaacaaagttttgtgctcgctgtggtggacgtgtgtcgttacggtcaaataacgagaacaagatagtcatgtgggtatgcaatctgtgcagaaagcaacaagagattttgactaagagtggtgcctggttctttggctcgggaccccaacagacatctcaggacggtaccctcagcgacactgcgacaggggcaggttcggaggtgccccgtgagaaaaaggcccggctacaggaacgaagtcggagtcaaacccctttgtcaaccgcagcagctagctcacaggacgcggctcccccatctgctccacccgacagaagtaaaggagccgaaccctctcagcaagctttggggcccgagcagaagcaggccagctctcgctctaggtcggagccaccaagagaaaggaagaagactcccggtctttccgagcaaaatggtaaaggagccctgaagtcagagaggaaacgggtcccaaagaccagtgcacagcctgtcgagggagccgtggaggaaagagaacggaaggagagacgagagagtcgccggctcgaaaaaggacgaagtcaggactacccagatacccccgaaaaaagggacgaaggaaaggccgctgatgaggagaagcagagaaaggaggaggactatcagacgcgctatcggtcagatcctaatctagcaagatatcccgttaagcccccccccgaagagcagcaaatgagaatgcacgcaagagtgtcacgagcgcgccacgagcgacggcactctgacgtggcgttgccaagaacagaggccggagcggcgttgcctgagggtaaggcaggcaaaagggcaccagcagcagcacgggcctcgcctcctgattctccacgggcctacagcgccgaacgtacggccgagacgagggcaccaggggctaaacaattaaccaatcatagccctcctgccccacggcatggcccagtgccagcggaagcccctgagctgaaggcacaggaacccctgcgaaaacagagccggttggacccaagctctgccgttctgatgcgaaaggctaagcgtgagaaagtggagacgatgctccgcaatgactccctatctagtgatcagagtgaaagcgtccgcccatcaccaccgaaaccacaccgttctaaaagaggcgggaaaaagaggcagatgtcggtatcaagctcggaagaggaaggggtgagtactcccgaatatacttcatgtgaagatgttgagttagagtcggagtctgtatctgaaaaaggcgatctcgactattactggctggatcctgcgacttggcactcccgggagactagccctattagttctcacccagtcacttggcagcccagcaaggaaggtgacagactgatcgggagagttattcttaataagcgcaccacaatgcccaaagactctggggcccttttgggcctcaaggtggtgggcggtaagatgacagatctgggccggctcggagcctttataaccaaagtcaagaaaggaagcctcgcagatgtagtgggacatctgcgcgccggagatgaagttttagagtggaatggaaagccacttcctggggctaccaacgaggaagtctacaatattattctggaatctaagtcagagccacaagttgaaatcatagttagcagacctattggcgacatcccaagaatccccgagagttctcatccgcctttggagtcctcaagttcgagctttgagagccaaaaaatggagcgcccaagcatctctgtcataagtccgacttcgccaggcgccctgaaagacgcgccacaagttttgcccgggcagctcagcgtgaaactgtggtacgacaaggtgggtcatcaattgatcgttaacgtcctgcaggccaccgatctccccgctagggtcgacggacggccacgaaacccatatgttaagatgtacttcctgcctgacaggtccgataaatccaagcgccgcactaaaaccgtgaaaaagatcctagagccgaagtggaatcaaaccttcgtctattcccacgttcaccggagggactttcgcgagaggatgctggagatcacagtttgggaccaaccacgcgtacaggaagaagaatccgaatttttgggcgagatcctgatcgaactggagacagcacttcttgatgacgagccacactggtacaaactgcagacccacgatgagtccagcctccccctgccacagccctcgccatttatgccaagacggcatatccatggggaatcctcaagtaaaaagctccagagatcacagcgaatatcagattccgacatttctgattacgaggtcgatgatggcatcggggtcgtccctccagttggttaccgaagttccgcccgagagtccaagtctactacacttaccgttcccgagcagcaacggaccacccatcatcgcagtaggagtgtaagtccacaccgcggaaatgaccagggtaaaccacgctcaagactgcccaatgtgccactgcaacggtctctcgacgagatccacccaacccgtcgttctcggagtcccacgcggcatcacgacgctagtcgctcaccagtagatcaccggactcgcgatgtcgattcccagtatttgagcgaacaggacagcgaactcctgatgttgcctagagccaaacgcggcagatcagccgagtgtttgcatactacatcggagctgcagccttttctggatcgggccaggagtgcttccaccaactgcctgaggcccgatacgagcctgcatagcccggaaagagagcgggggcgatggagccccagcctggatagacgacggccccccagcccaagaatccagatccaacacgcatcccctgagaatgatcgaatgcatcggcagcggtctcccacgcagtccccacccgccgataccagtttttcatctcggaggggccgccagcttccccaagtgccagtgcgcagtggcagtatcgagcaggagtccggccacaagaagctcaagtccaccattcagaggagtactgagaccggaatggcagccgagatgcgtaagatggttcgacagcctagtcgcgagtcgacggacggttccattaacagttactcatctgagggcaacttgatttttccaggagttaggctgggggcagacagccaattctctgactttctcgacggcctaggaccagcccagcttgttggaagacagaccctggcaaccccagctatgggagacatccagattggcatggaagacaaaaaaggccagctcgaggtcgaggtaatccgtgcgcggagcctcactcaaaaacctggctccaaaagtacgcccgccccctacgtgaaggtctatttactagaaaacggggcctgcatcgctaagaagaaaaccaggatagctcgaaaaacactggaccccctgtatcagcagtcactggtctttgatgaatcgcctcagggaaaagttcttcaggtgattgtgtggggggattatggccggatggaccacaaatgttttatgggtgtggctcagatcctattggaagaactggacttaagcagcatggtaattggctggtacaagctttttccaccaagctctttggttgatcctaccctcacaccacttacccgccgcgcaagccagagctctctcgagtctagtaccggccctccttgtatcaggagctag

SEQ ID NO: 132013 - DNA, 4626 bp, synthetic construct
  misc_feature 1..4626: note = Description of Artificial Sequence: Synthetic coding sequence
  source 1..4626: mol_type = other DNA
atgtccagtgccgtcgggccacggggccccagaccaccaaccgttcccccaccaatgcaggagctcccagatctttcccacctcaccgaggaagaacggaatatcattatggctgtcatggatcgccagaaagaggaggaggagaaggaagaagccatgctaaagtgtgtcgtgagagacatggcaaaaccagccgcttgcaagactcccagaaacgcagaaaatcaacctcatcaaccctcaccaagactgcaccagcaattcgagtcctacaaagaacaggtgcgcaagatcggcgaggaggcgagaagataccaaggcgaacataaggacgacgctccgacctgcgggatttgccataagacgaaattcgcagacggctgtgggcacctgtgctcctattgtcgcaccaagttctgcgcaagatgcggcggccgcgtctctctcagaagcaataacgaggataagtatgttatgtgggtgtgcaacttgtgtagaaaacagcaggaaattctgaccaagagtggggcatggttctttggctccggtccacagcagaccagtcaggacggcaccctgtcagataccgccacaggcgcagggtctgaggtgcctcgagagaagaaggccagattacaggagagatctaggagccagaccccgctctcaaccgccgcagcgtcgtctcaggatgctgcccccccttccgcccctcctgatagatcaaagggggctgaaccaagccagcaggcgctgggccccgagcagaagcaggcatcatcacgctccaggtctgaaccgcctagggaacggaagaaaacccctgggctgagtgagcagaacggaaaaggagcacttaaatctgagcggaagcgggtcccaaaaacttcggcacagccggtcgaaggggccgtagaggagagggagcggaaggaaagacgggaaagtcggagactggaaaaaggtagaagtcaggattacccagacactccagagaaaagggatgagggcaaggccgccgacgaggaaaagcagcggaaggaagaggactaccagactcggtataggagcgatccaaatctcgccagataccctgtgaagccacccccggaggaacaacaaatgaggatgcacgcacgcgtttcacgggccaggcacgaacgacgccactcggacgttgccctgccacggacagaagcgggagccgcacttccagaggggaaagcgggtaagcgagctcccgccgccgccagagcaagtccacccgatagccctcgggcctatagcgctgagaggactgctgagacacgcgctcctggtgcaaagcagctgaccaatcactccccaccggccccccgtcatggtccagtgccagcagaagccccagagttaaaggcccaagagcccctaaggaagcaaagccggctcgacccaagcagtgccgtactgatgcgaaaggccaagagggagaaggtagagactatgttaagaaatgactccctaagctcggatcaaagcgaaagcgtgcgaccaagtccccccaaaccacacaggtccaaaagagggggcaaaaagaggcagatgtctgtctctagttccgaagaagagggggtgagcacaccagagtatacatcatgcgaggacgtggaactggagagcgaatctgtgagtgagaagggggatctggattactattggctggatcccgcaacatggcactccagggagacatctccaattagttcccatcctgttacatggcagccttctaaagagggcgatcgcctcattgggagggtcatcttgaacaaacgtaccacaatgccaaaagacagcggtgctctgctgggtctgaaagtcgtgggtggcaagatgacagacttgggcagactgggtgcttttatcaccaaggtgaaaaaggggagcctggcggacgtggtgggtcacctcagagccggcgacgaagtgttggagtggaatggtaagccactgccaggcgcaaccaatgaagaagtgtacaatattatcctggagtctaagagtgaaccacaagtcgaaattattgtctcccggcctataggcgatatccctcggatccctgagagtagccaccccccactggagtcctcctcttcgtccttcgagtcccagaagatggaacggccaagcatttctgtgatctcacccaccagccccggcgccttaaaggacgcaccacaagtactgccaggccagctgagcgtcaagctttggtacgataaagtgggccaccagctgatcgtcaacgtgctccaagccaccgacctgcccgcgagggtggacggtagaccacgcaatccatatgtaaagatgtactttctcccagacagaagtgataagagtaagcgccgaacaaaaacggtcaaaaagattctggaacctaagtggaatcaaacctttgtttattctcatgtgcaccggagggacttccgagaaagaatgctggaaataaccgtctgggatcagcccagagtccaggaggaagaaagcgagtttcttggcgagatactcattgagctggagacggcattgctggatgatgagccgcactggtacaaactgcagactcacgacgaaagttccctgcctttgcctcagccttcccccttcatgcctcgacgacatatacacggagagtcgtcctcaaaaaaactccaaaggagccaacgaatcagcgattcagacatctctgattacgaggtggatgatgggattggcgtggtgccccctgtcggatatcgaagctccgcaagggagagcaagagcacgaccctgactgtgcccgagcagcagaggacgacccatcaccggtcccggtccgtgagccctcatagaggaaacgaccaggggaaaccgaggtcgcggctgcctaacgttcctctgcagcgatctctggacgagatccatcccactcgaaggtcacgttcacctacaaggcaccacgacgcatcacggtccccagtggatcacaggacaagagacgtggatagccaatatttgtctgagcaggattccgagttacttatgctgccaagggccaaacggggacggtccgccgaatgtttacacacgacacgtcacttggtccgacactataagactctgcccccgaaaatgccactgctccaatcgtcaagccactggaatatctacagcgagcttcagccatttctcgacagggcgagatcagctagcacgaactgtttacggcccgacacatccttgcattcacctgaacgggaacgtatgcatcgccagagaagtccaacccagtccccaccagccgacactagctttagctcccgtcgcgggcgccaactcccacaggtcccagtgcggtctggctccattgagcaagcttccctcgtcgtggaggaacggacaagacagatgaagatgaaagtgcacagatttaaacaaaccacaggcagtgggtcaagccaggaactggaccgcgagcagtactccaaatacaacatccacaaagatcagtatcggagttgtgacaacgtcagtgcaaaatcttctgattcagacgtgtcggatgtgtctgctattagtcggacgtcgtctgcgtccaggttgtcatccacttcattcatgtccgagcaaagcgagcggcctaggggaaggataagcagcttcaccccgaaaatgcagggcagaaggatgggcaccagcggacggtctattatgaaaagcacctcagtctccggcgagatgtatacactggagcataatgatgggtctcaatccgataccgccgtcggcaccgtcggtgctggaggcaagaagcggagaagtagtcttagcgcaaaggtagtcgctattgtatctagaaggagccggtccacaagccagctgtcacagactgaaagcgggcacaaaaaactgaagtcaaccattcagcgaagcaccgaaaccggcatggcagcagagatgcgtaagatggtgcgacagccaagccgcgaatctacagatgggagcatcaattcgtattcgtccgagggtaatctgatcttccccggtgtcagactgggagctgacagtcagttctctgactttttggatggtctgggacctgcacagttggtaggtcggcaaactcttgccaccccagccatgggtgacatacagatcgggatggaggacaagaaaggccagctggaagtcgaagtcattcgggctcggagcttgacacaaaagcccggctctaaatcaaccccagctccgtatgtcaaagtgtatttgctggagaatggagcctgcattgctaaaaagaagacgagaatcgctcgaaaaacgttggaccctctgtatcaacagtcgctcgtgtttgacgaatcccctcagggcaaagttctgcaggttatcgtgtggggcgattacggtagaatggatcataagtgcttcatgggagtggcccaaatcctgctcgaagaactggatttgtcaagcatggttataggctggtataagctctttcccccctcttcacttgtcgaccccactcttacacccctgacgagaagagcctcccagtcaagtctggagtcttccaccgggccgccgtgtatcagatcttag

SEQ ID NO: 132014 - DNA, 4446 bp, synthetic construct
  misc_feature 1..4446: note = Description of Artificial Sequence: Synthetic coding sequence
  source 1..4446: mol_type = other DNA
atgagtagcgctgtgggcccaaggggcccacggccaccgaccgtgccccccccaatgcaggagctacccgatctgtcccaccttacagaagaagaaagaaacataatcatggccgtcatggaccgccagaaggaggaagaagagaaggaagaagccatgttgaagtgcgtggtcagggacatggcaaaaccggcagcctgtaaaacaccgcgtaatgcagagaaccaacctcaccaaccttcccccaggttgcaccagcagtttgagagctataaggagcaggtgaggaaaatcggagaggaagcaagacgctaccagggtgaacacaaggacgacgcacctacatgtggcatctgccacaaaactaaattcgctgacgggtgcggccatctgtgttcttattgccgtactaagttctgcgctcggtgcggtgggagggtgtctttaaggagcaataatgaaaacaaaatagtgatgtgggtttgcaacttatgtcgaaagcagcaggaaatcctgaccaaaagtggagcctggttcttcggctcagggccccagcaaacgagtcaagatgggaccctgagtgacacggcgacgggagctggctcagaggttcctcgagaaaaaaaggcccggttacaagaaagaagtcgcagccaaacccctctttctacagctgcagcctcttctcaggacgcagccccaccaagcgcgcctccagaccgctccaagggtgccgagccctcccagcaggctctcggccctgaacaaaaacaggcatccagccgttcacgatccgagcccccccgggaacggaagaaaactccaggcctctccgagcaaaatggaaaaggagcacttaagagtgagagaaagcgggttcccaaaacctcagcccagcccgtggaaggcgcagtcgaggaaagggaaaggaaggagcgaagagaaagtaggcgcttagagaagggtaggtctcaggactatcctgataccccagagaaacgggatgaaggaaaggccgccgatgaagagaaacaacggaaggaggaagactatcaaacacggtacagatccgaccctaatctggcccggtatcccgtgaagccgccacccgaagagcagcagatgcgtatgcatgcacgcgtttcccgggctcggcacgagaggagacactcagacgttgcactacctcggactgaagccggagcggctcttccagaaggtaaagccgggaagagggctcccgccgcagcaagagccagcccgccagactcccctcgggcctattcagcagagcggaccgctgagaccagagcccctggtgcaaagcagctcacaaatcatagccctccagcaccaaggcatgggcctgtgcccgccgaagctcccgagctcaaagcacaggagccattgcgaaagcaaagtagactcgatccttcgtctgccgtcctcatgcgtaaggccaaaagagaaaaagtggagactatgctgcgcaatgattcactgagctctgaccagagcgaaagcgtgcgcccatctccccccaaaccacaccgatccaaaaggggggggaaaaaacgacagatgtccgtgagctcctccgaagaagagggggtgagtactcctgagtatacctcgtgtgaggacgtcgaactggagagtgaatctgtttctgaaaaaggggaccttgactattattggctggaccctgctacgtggcactcaagggaaacttctcccataagctcccaccctgtcacctggcagccctccaaagaaggcgacagactcataggccgcgtgattctcaataagagaacgaccatgccgaaggatagcggagctttgctgggattaaaggtcgtggggggtaagatgactgatctcggccggttaggtgctttcatcacgaaagttaaaaaagggtccctggcagacgtagtcggacacctgcgcgccggagacgaagtgctggagtggaacggcaagccccttcctggagccactaatgaggaggtgtacaatataatcctggagtccaagagcgaaccacaggtcgaaatcatcgtatcccggccgatcggggatattccacgtatccccgagagctcacatccaccactcgagagttcttcgtctagttttgagtcacagaaaatggagagacccagcattagtgttattagcccaacttccccaggggccctgaaggacgcaccacaagtgttgccaggacagttgagcgtcaaactctggtacgataaggtggggcaccagctcattgtgaatgtgttgcaagcgaccgacttgccggcccgggtggacggacgaccccgcaatccatacgtgaagatgtatttcctgcccgacagaagcgataaaagtaaacggagaaccaagactgtcaagaagatcctggaacctaagtggaaccaaaccttcgtttattcccacgtacatcgtagggattttcgggaaagaatgctggagatcacagtgtgggaccagcccagggttcaggaggaggaaagcgagtttttgggggagatcttgatcgagctggagactgcactcctcgatgacgaacctcattggtataaactgcaaacccacgatgagagctctctaccactgcctcaacccagtcctttcatgcctcgtcggcacatccacggggaatcaagtagcaaaaaactacagagatctcagcggatatctgattccgacatttctgactatgaggttgatgacggcattggcgtggtgccacctgttggataccgctcttctgctcgcgagtccaaatctactaccctgactgtccctgagcaacagcggactacccatcaccgctctagatctgtttcccctcatcgtggaaatgaccagggtaagcctcgctcacggctgccaaatgtgcctctgcaaaggtccctagacgagatacaccccactagacggtctaggagtcccactcgccaccatgatgccagccgctcccccgtggaccataggaccagggacgtagactctcagtacctctctgagcaggattccgaacttctgatgctccctcgggcgaagagaggtaggtccgctgagtgcctgcacactacctcagaactgcaaccttttttggatagggctcgctccgcttccacgaattgcctccggcccgatacaagccttcatagccccgaaagagaaagaatgcaccgccagcgctcgcctacgcagagcccacccgctgatactagcttctcctcgaggcgcggaaggcaactgcctcaggtgccagtgcggtccgggagcatcgagcaggcctcactggtcgtggaagagcggacccgacagatgaaaatgaaggtacatcggtttaagcagaccaccggatcaggaagctcccaggagcttgacagggaacagtactccaagtataacatccataaagaccagtaccgcagctgcgataacgtctccgcaaaatcgtcagactccgacgtgtcagacgtgtcggctatctcacggacaagctcagctagtagactgtcctcaacatcattcatgtccgagcagagcgagcggccccgcggccggatcagcagttttacccctaaaatgcagggtcggaggatgggcacatctggtcggagtattatgaagtcaacaagcgtcagcggcgaaatgtacacgcttgaacacaatgacggaagccagagcgacaccgcagtgggcacggttggtgccggcggtaaaaagcggcgcagctcacttagtgccaaagttgtcgctatcgtgtcccgccgaagccgcagcacaagccaactgtcccagactgaaagtggccacaaaaaattaaagagcaccatccagcgctcaacagagacagggatggcagcagagatgcggaaaatggtgagacaaccctcccgcgagtctactgacggatcaatcaacagttactctagtgagggaaatttgattttcccaggtgtgaggcttggcgccgatagtcagttctctgatttcctcgatggtctaggtcccgctcagctcgtgggaagacagacacttgcgacacctgccatggcaccatatgttaaggtctacttgctcgagaatggagcttgtattgccaaaaaaaaaacaaggatcgcccggaagactctggatccactgtaccagcagtcattagttttcgacgagtcgcctcaaggaaaagttctccaagtgatcgtctggggggattacggaagaatggatcataaatgctttatgggtgtggcacaaattcttctggaggaattagatctcagctccatggtcataggctggtacaagttgttccctccctcctctctagttgaccctacactgacaccacttactcggcgggcatctcagagctcccttgaaagcagcactggcccgccttgtattcgctcttag

SEQ ID NO: 132015 - DNA, 4446 bp, synthetic construct
  misc_feature 1..4446: note = Description of Artificial Sequence: Synthetic coding sequence
  source 1..4446: mol_type = other DNA
atgagcagcgcagtgggaccccgcggccctcgacccccaacagtgcctccaccaatgcaggaactgccggacctgtctcatctcacagaggaagagcgaaatatcatcatggcggtaatggaccggcagaaagaggaggaagaaaaggaggaagcgatgcttaaatgtgttgtgagagacatggctaaacctgccgcttgtaaaacacctcgtaatgctgagaatcaaccccatcagccttctccccgcttgcaccagcaatttgagagttataaggagcaagtcagaaaaattggggaggaggcgaggcggtaccagggtgagcacaaagatgatgctccaacttgtggcatttgccacaagaccaaatttgccgatgggtgcggacacctctgctcctattgtcgcaccaagttctgcgccagatgcggaggaagagtcagtctgaggtctaacaacgaggacaaggtagttatgtgggtttgtaacctgtgtcggaagcagcaggagattttaaccaaatccggagcatggttcttcgggagtggtcctcagcaaacaagccaggatggcactctatccgacactgcgacgggcgcaggtagtgaagtaccaagagaaaaaaaagcacgattacaggagaggagcagatcccagacacccttgtcgactgccgctgctagtagtcaggacgcagccccacccagcgcccctcctgataggtctaaaggtgccgagcctagccagcaagcgttaggccccgaacagaaacaggcttcaagccgatctaggtccgaacctccgagggaacggaaaaagacccctgggcttagcgaacagaatggaaagggcgccctgaagagtgagcgcaagcgtgttcccaagactagtgctcagcccgtcgagggcgccgtggaggagcgggagaggaaggagcgtagagagtctagaagattagagaagggcaggtctcaggactatccagatacacctgagaagcgagacgaaggaaaggccgcagacgaggaaaaacagcgcaaagaggaggattaccaaaccagatacaggtccgaccccaatctcgctaggtatccagttaaacctcctcccgaggaacaacagatgcggatgcacgccagggtgagtagagctaggcacgagcgtcgccattctgacgttgccctgccacgcacagaagctggagcggctctgccagagggcaaggccggtaaacgtgcccccgcagctgcccgggcctcgcctcccgacagcccaagggcttattccgccgagcgcactgccgagacacgagccccaggagctaagcagctgaccaatcattcaccgcctgcgcccaggcacggccctgtcccagcagaagcaccagagttaaaggcccaggaaccactccgtaagcaatcacgcctggatccctccagtgcagtgctgatgcgcaaggccaagcgtgaaaaggtggagactatgctccggaacgattccctgagctcagatcagtccgaatccgtccggccctccccccctaagccacaccgctccaagcgcgggggcaagaagcgccagatgtctgtatcatcctctgaagaagaaggcgtctcgacacctgagtacacatcgtgtgaagacgtcgaattggaatctgagtccgtgagcgagaagggagacctggactactactggttggatcccgcgacatggcattcacgggagaccagccccatttcttcacaccctgtgacttggcaacccagcaaggagggagaccgcctgatcggtagggtgattctgaataaaagaacaactatgccaaaggatagtggagccctgttggggctgaaggtagtgggaggcaaaatgaccgatttgggaaggttgggcgcattcatcacaaaagttaaaaagggcagtctggccgatgtggtgggacacctccgggcaggtgatgaggtacttgaatggaatgggaaacccctgcctggggcaaccaacgaagaggtgtacaatattattctcgagagcaagagcgaacctcaagtggaaatcattgttagccgccccatcggagatattccccgcatccctgaatcgtcacacccccctctagagagtagctcctcgtctttcgagagtcagaagatggagcgccccagcatctctgtgatttccccaactagccctggggctcttaaagatgccccacaggtcttgccaggtcagctctccgttaagctgtggtatgataaggtggggcaccagctgattgtcaacgtgctgcaagctactgacctccccgctagggtcgatggccgaccgcgaaatccttatgtaaagatgtactttttaccagacagatccgacaaaagtaagcggagaactaagacagtgaagaaaatattggaacccaagtggaaccagacctttgtctactcacacgttcatagacgagattttagagaacgtatgctcgaaataacagtgtgggaccagccacgcgtgcaagaagaggaaagcgagtttctaggggaaattctgatcgaactagaaaccgccctgctggacgatgagccgcattggtataagttgcaaacacacgatgagtcgagtctcccgttgccgcaaccttcaccgttcatgccaaggagacacatccacggggaatccagctccaaaaagttgcagcgatctcagaggattagtgacagcgacattagcgattacgaagtggacgatggaataggggtggtgcctcccgtgggctaccgcagtagtgctagggagtcaaagtcaactaccttgactgtgcccgagcagcagcgaacgacgcaccaccgttcgagatctgtgagccctcatagagggaacgaccagggaaagccacgaagcaggctgcccaatgtgccactacagcggagcctggatgaaatacaccccactagacgttctcgcagccctaccagacatcatgacgcttcccgtagccccgtagaccatcgcactagggacgtagactcacaatatctttcagaacaggactcggaactgttgatgctcccacgagcaaaaagaggccggtctgcagagtgccttcacactacctccgaattgcaacccttcctggacagggctagatctgcgtctaccaactgcctgcgaccagatacatctttacattccccagagcgggaacggatgcaccggcaacgcagtcctacccagtctccacccgctgacacttccttttcttctcggcggggacggcagctgcctcaggtgcctgtgaggtcaggaagcatcgagcaggcgagcctggtagttgaagaacgcactaggcagatgaagatgaaagtacatagatttaagcagacaacaggcagcgggagttcccaggagcttgaccgcgaacagtactcgaaatacaatatccacaaagatcagtatcgctcctgtgacaacgtcagtgcaaagagttccgactccgacgtcagtgacgttagtgctattagcagaacttccagcgctagccgcctttcgtccacatcatttatgtccgagcaaagcgaacggcccagaggccggatctccagtttcacgcctaaaatgcagggaagacgcatgggaaccagcggtaggagtatcatgaagtccacttcggtgagtggggaaatgtacaccctagagcataacgatggatcccagtctgacaccgctgtgggcactgtcggagcaggagggaaaaagcggaggtcttctctctccgctaaggtggtggccatagtatcccggaggagcagaagtacttctcagttaagccagacagagtctggccacaagaagctgaagagcaccattcagcggtctacggagacaggcatggccgcagaaatgagaaagatggtgagacagccatctcgagaaagtacagatggtagcatcaactcctactcgagcgagggtaatttgatcttccccggcgtgaggcttggggcggacagtcaatttagtgatttcttggatgggctcggtcctgcccagctcgtggggcgacagacgttggctactccggctatggctccctacgttaaggtctacctgttggagaacggagcttgtattgccaaaaagaagacccggatcgctaggaagactctggaccccttgtatcaacagagcctggtatttgacgagagccctcaggggaaggttctgcaggtaatcgtgtggggcgactatggcaggatggaccacaaatgtttcatgggtgtcgcacagatccttctagaagagctggatctttcatccatggtgatcgggtggtacaagctttttccaccatcaagcctggtggatcctaccctcactcctttgactaggagagcctcccagagtagtctggaatcatcaacgggacccccctgcattcgaagctag

SEQ ID NO: 132016 - DNA, 5079 bp, synthetic construct
  misc_feature 1..5079: note = Description of Artificial Sequence: Synthetic coding sequence
  source 1..5079: mol_type = other DNA
atgagcagcgccgtgggaccgaggggtcctcgtccacccacggttccccctccaatgcaggagctgccagatctttcccatcttacagaggaggagaggaatataattatggccgttatggaccgacaaaaagaagaggaggagaaggaggaagcaatgttgaagtgcgtggtgagggacatggctaagccagcagcttgtaagactccacggaacgccgaaaaccagcctcatcagccttctccccggctgcaccagcagttcgaatcatacaaagaacaggtgcggaagatcggtgaggaggcacgccgctaccagggagaacacaaggatgacgcgcctacttgtggtatttgtcacaagaccaaatttgctgacggatgtggccatctctgctcgtattgcaggacaaagttctgtgcacggtgtggggggagggtaagtttaagatctaacaatgaggataaagtggtcatgtgggtgtgcaatctctgtcggaaacagcaagagatcttgacaaagtcaggcgcctggttctttggctccggccctcaacagacttcccaagatggcaccctatccgacactgcaactggagcaggcagcgaggtgcctagggaaaagaaggccagactgcaggagcgttctcgcagtcagacacccctcagtacagccgctgcatcctcccaggacgccgccccccctagcgcccccccggaccgcagtaaaggcgctgaaccaagccagcaggcactgggccctgaacagaaacaggcctccagtagaagccgttctgaacccccccgagaaaggaaaaaaacccctggattgtcagaacagaacggaaagggggcgttgaagtccgagagaaaaagagtgccgaaaacatcagcgcaacctgtcgagggcgcagtggaagaaagggaaagaaaagaacggagagagtcaagacggcttgaaaagggccgctcccaggactaccctgacacaccagagaagagagacgaaggcaaggcagctgacgaagagaaacagaggaaagaagaggattatcagactaggtatcgaagtgacccaaacctggctagatatccagtgaagcctccccctgaagaacagcagatgaggatgcacgcaagagtgagtcgcgcccggcacgagcgtcgccattccgacgtagcactgccccggaccgaggccggcgctgccttaccggagggaaaagccggaaagagggctcccgccgcagctcgcgcatccccaccagactctccacgagcttacagtgccgagaggacagctgaaacccgtgctcccggggctaagcaactgactaaccactctcctccagctccaagacacggcccagtccccgctgaggcacctgaattaaaggcgcaggaaccgctgaggaagcagtctcggctggatcccagttcagcagttctgatgagaaaagcgaaaagggaaaaagttgagaccatgctgagaaacgatagcctgagctcggaccagtccgaaagcgtgaggccttcaccaccaaaaccccaccgcagcaaacgcggcggcaaaaagaggcaaatgtctgtttcttcttccgaggaggagggggtgtccacccccgaatacacctcatgcgaagacgtggaattggagagcgaaagcgtctcagagaaaggagacttggactactattggttggaccccgcaacatggcactccagagaaacctctcctattagttcacacccggtgacctggcagcctagcaaggagggtgacaggttgatagggcgcgttatcctcaacaaaaggaccacaatgcctaaggactcaggcgctctcctggggcttaaagttgtcgggggcaagatgacagacctagggcgccttggagccttcattactaaagtcaagaagggttcactcgctgacgttgtgggccatctgcgggccggcgatgaggtgttggaatggaacgggaagccacttcctggggcaacaaacgaggaagtgtataacatcattctggagtctaagtccgaaccacaggttgaaatcatcgtgagcaggcctattggggatatccctcgcattccggagagttcccacccgcctctcgaatcctcatcctctagctttgagtctcaaaagatggaaaggccgtctatttctgttatatccccgacgtctcccggggccctcaaggacgcccctcaggtgctgcctggacaactgtctgtgaaactgtggtatgacaaggtcggccaccagcttattgtaaacgtcctgcaggctacggacttgccagctcgagtggacgggcgcccccgtaacccctatgtcaagatgtatttcctacccgataggagcgacaaaagtaagcggcgcaccaagaccgtgaaaaagattctggagccgaaatggaatcaaaccttcgtctactcacacgtccaccggagggattttagagaacggatgctcgaaatcacagtttgggatcagccacgcgtacaggaggaggaaagcgagttccttggcgagattctgatcgagctggagaccgcccttctagatgacgaaccacattggtataaactccagacgcacgacgaatcctctctgccactgccacagccttcgccattcatgcccagacgccatattcacggcgagtcgtcttcaaaaaagctgcagcgttcacagagaattagtgactctgacatttccgactacgaagttgatgacggcattggagtggtgcccccagtgggctataggtcctctgcccgcgagtctaaatctactacactcacagtccccgagcagcaacgcacaacccatcaccgtagtaggagcgtgagtcctcacagaggaaatgatcagggaaagcctcggagcaggctgcctaacgtgcctttacagcggagcctggatgagatacaccctacgcgccgctcgaggtctccaacccgacaccacgatgcaagtcggagtcctgtggaccacaggacccgggatgtagactcccaatatctcagcgaacaagattccgaactccttatgcttccacgggctaaaaggggtaggtctgcagagtgcctgcataccaccaggcacctcgtcaggcactacaagacgctgccgcctaaaatgccccttttgcagtcaagctcgcactggaatatctactcatcaatcctgccagcccataccaagacaaagtcggtgacacgacaggatattagcctgcatcatgagtgttttaatagcaccgtcctccgatttactgatgagatcctcgtgtctgaactccagccttttctggaccgggctaggtcagcctctaccaattgtctgcgtccagatacttcattgcatagccctgagcgagaaagggggagatggtcccccagcctggatagacgacgccctccctcgccgcggatacagatccagcacgcttcgcccgagaacgatcggcactctagaaagtcggagagatcctccatccaaaagcaaacgagaaaaggtaccgcctctgatgctgagcgggtcttgccaacatgtttgagccgcagggggcacgccgcacctcgggccactgatcagcctgtcatccgcgggaagcacccagccagatcgcggagcagtgaacactctagcattagaacgctctgctctatgcaccatctggtccccggtgggtccgcccccccctcaccactgttaacacggatgcaccgacagcgatcccccacgcaatccccgcctgctgacacttccttctcctctcgcagagggaggcagctcccccaagtgccagtgaggagcgggtctatagagcaagcgagtctggtggtcgaggaaaggactcgacagatgaagatgaaagtccatcggttcaagcagacaacggggagtggctcttcccaggagctcgacagagaacagtacagtaagtataatatacataaggatcagtatagatcgtgcgataatgtgtccgctaagtccagtgattccgatgtttccgacgtcagcgcaatttcaagaactagttctgcgagtaggcttagcagtacctccttcatgtccgaacagtctgaaagaccgagagggcggataagctccttcactcctaaaatgcagggacggcgaatgggcacatccgggcggtctatcatgaaaagtacaagcgtttccggagagatgtacaccttggagcacaatgatgggagccagtcagataccgcggtcgggacagtcggggcaggtggtaaaaagcggcgcagtagcctctctgcgaaggttgtggcaattgtctcacggaggtccaggtctaccagtcagctaagccagactgaatctggccataaaaagttgaaatctaccatccagagaagcacagaaactggaatggctgctgaaatgaggaaaatggtgagacaaccgtcacgagaatccacggacgggagtatcaacagttatagctctgagggtaatctgattttccccggagtgcgcctcggggccgattcccagttctctgatttcctggacgggctgggccctgcccaacttgtgggcaggcaaaccctggcaaccccggcaatgggcgacattcagataggcatggaagacaagaaaggccagctcgaggtcgaggtgattagggcgagatccttgactcaaaagccgggaagtaagtctacacccgcaccgtacgtcaaagtgtacctgctggaaaatggcgcttgtatcgcaaaaaaaaagactcggatcgctcggaagacccttgaccccctgtatcagcaatctcttgtgttcgacgagagcccccagggcaaagtgctgcaggtgatcgtctggggggactacggccgtatggaccataaatgctttatgggcgttgcgcagatactgcttgaggagttggacttaagttccatggtcatcgggtggtataagctattcccgccaagttctttagtagacccaacgttgacacctttaacccgccgtgcctcccagagcagtctggaaagctctacaggtcccccgtgcatccgctcttag

SEQ ID NO: 132017 - DNA, 1497 bp, synthetic construct
  misc_feature 1..1497: note = Description of Artificial Sequence: Synthetic coding sequence
  source 1..1497: mol_type = other DNA
atgttacctagggctaaaagggggcgatcggcagagtgtctccacactacccgacattctcgcaaatcagagaggagtagcatacaaaaacagaccagaaaaggtaccgcgagcgatgcagagcgaatgcataggcagcgaagtccgactcagagtccccctgccgacactagtttttcaagccggcgcgggcgacagctccctcaggttccagtgcgctcaggatccattgaacaggaacaggagaagtataatagctcgaccaaagcctcgctggtggtggaagagcggaccaggcagatgaagatgaaagtgcaccgctttaagcaaaccactggtagtggcagctctcaggaactggaccgcgagcagtacagcaagtataatatacacaaagatcaatatagatcgtgtgataatgtgagtgccaaatcgtcagatagtgatgtcagcgatgtgagcgctattagcaggactagcagcgcttcccgcctctcttcgacgtctttcatgtctgagcaatccgagcgccccagaggccggatctcaagttttacgcctaaaatgcaaggaagacggatgggaacgtcgggtcgttccataatgaagagtacttcggtttcaggagagatgtacaccttggaacataacgacggttctcagtccgacaccgccgtggggacggtcggggctggaggaaaaaagcgcaggagctccctctccgcaaaagtcgtggcgatcgtgagccgtaggagtagatccacttcccagttgtcacagactgaatcagggcataagaaactgaaatcaaccattcaaaggtcaactgagacgggtatggccgcagaaatgagaaaaatggtgagacagcctagtcgggagagcacagatggtagcattaattcctacagcagcgagggcaaccttatcttcccgggagtcaggttaggcgccgactcgcaattctccgacttcctggacggtcttggacccgcgcagcttgtggggcggcaaaccctcgccaccccagcgatgggagatatccagatcggaatggaggataaaaagggacagttagaggtcgaggtgatccgcgcaaggtccctgacacagaagcctggatctaagagtactcctgcgccgtacgttaaagtttatctgcttgaaaacggagcatgcatcgcgaaaaaaaaaactagaatcgcaagaaaaacactggatcctttgtatcagcagtctctggttttcgatgaatcaccacagggcaaagtgttgcaggtgattgtatggggcgattacggccgtatggatcacaaatgttttatgggagtggcccagattctcctggaggagcttgacctgtcctccatggtcatcgggtggtataagctttttcctccttcttcgcttgtagaccccacactgaccccactgactagacgggccagtcagtcctccctggaatctagcaccgggcctccctgtatccgctcttag

SEQ ID NO: 132018 - DNA, 3039 bp, synthetic construct
  misc_feature 1..3039: note = Description of Artificial Sequence: Synthetic coding sequence
  source 1..3039: mol_type = other DNA
atgtgcgccccaggcatccatgttagcagtgaaggttgggaggaggtacggtcagtcgatagtgaggagggcactatcgaggcgcggcgagccgtagcgggcgatctcgactactactggctcgatccagcaacatggcacagtcgggaaactagtccaattagctcacatcctgttacatggcaaccgtctaaggaaggcgacaggctgattggtcgggttattctcaacaagcggacgaccatgcctaaagattcaggcgctctgcttggccttaaggtcgtgggggggaagatgaccgatcttgggcggctgggggcctttataacaaaggtgaaaaaggggtcactggcagatgtggtgggccacttgcgcgcgggcgacgaagttcttgaatggaacggaaagcctttaccaggcgctaccaacgaggaggtgtataatatcattctggaatctaaaagcgagccgcaggtggagatcatcgttagcagacctattggagacattcctcgaatccccgagtcaagccaccctccattggagtccagttcttctagcttcgagtctcagaaaatggaaagaccttccatttcagtgatctcacctacctcgccaggtgccttgaaagacgccccccaggtactacccggccagctaagtgtcaagctgtggtacgacaaagtgggacaccagttgatcgtaaatgtcctgcaggcgactgacttgcctgcacgggtggacggaagaccgagaaatccatacgtcaagatgtatttcctcccagaccggtctgataagtctaagcgccgaaccaagaccgtaaaaaaaatactcgagccaaaatggaatcaaacttttgtctattcacacgtgcaccgccgagattttcgcgagcgcatgctcgaaatcacagtttgggatcaaccaagagtgcaggaggaagagagtgagttcctgggagagatcctgatagagctggagactgctctgttggacgacgagcctcattggtacaagctacagacgcacgatgagtcaagcctgccattacctcagccttctcctttcatgccccgtaggcacatccacggggaatcgtcctctaagaagctacagaggtcgcagagaatcagtgacagtgatattagcgactatgaggtggatgatggaattggcgtggtgcccccaggatatcgatcatctgcaagagaatccaagtccacaaccctaactgttcctgaacagcaacgcacgacacaccaccggagccgctccgtgtcgccacaccggggaaatgaccaaggcaaaccccggagccggctcccaaacgtgccacttcaacggtcactggacgagatacacccgacacgccggagtagatcccctaccagacaccacgatgcctccagatctcctgtggatcatcgtacacgagatgtggattcccagtacctgtccgagcaagatagcgaattactgatgttgcctcgtgctaagcgcggaagatcagctgaatgtctgcacacgaccagtgagctacaaccctttctggatcgcgcccgtagtgccagcacaaactgccttcgtccagacacatccctccactcacctgagcgcgaacggcatagccgcaaatccgagcgcagcagcatccaaaaacagacgcggaaaggcacagccagtgacgctgagaggatgcatagacagcgctctccaacccaatccccacccgccgacacctccttcagctcaaggcgaggtcgccagcttccccaggtgcctgtaagatctgggagtatcgaacaggcaagccttgtggtggaagaacggacccgacagatgaagatgaaggtgcacagattcaagcagaccacagggagtggaagcagccaagaacttgaccgcgaacagtactccaagtacaacatccataaagaccagtaccgcagctgcgacaatgtctccgcaaagtcttctgattctgatgtgagcgatgtgtctgccatatcaaggacttcctcagcatcaagattgagcagtacctctttcatgtcagagcagtccgaaaggcctcggggtaggatcagctcatttaccccaaaaatgcaaggccgtaggatgggaacttcagggaggagtataatgaagtccacctccgtgagtggcgaaatgtatacgctggaacataacgacgggtcacaaagcgacactgccgtggggacggtcggcgctggcggcaagaagaggagaagtagcctgagcgccaaagtggttgcgattgtctcacgcagatcccgctctaccagccagctctcccagacagagagtggccataagaaactgaagtctactatccagcggtctacagagactgggatggccgcagagatgagaaagatggtgcgtcagccaagtcgtgagagtaccgatggctctatcaatagttattctagtgaaggaaatctgatcttcccaggagtcagactgggggccgactctcaattttctgacttcttggatgggctgggtccagcccagctcgtgggcagacagacacttgctacccctgctatgggggacattcagatcggaatggaggataaaaaaggacagctggaagtggaggtcatcagggcgagaagcctcactcagaagccaggctctaagtccacccctgcgccttacgtgaaagtgtacttgttggagaatggggcttgcatcgccaagaaaaagactcgcatcgcgcgaaaaaccctcgatccactgtatcagcagtctcttgtttttgacgagagtccacagggtaaggttctgcaggtcatcgtatggggcgactacggtagaatggaccataagtgcttcatgggcgtggcccaaattctcttggaggaattagatctgtcttctatggtgattggatggtacaaactgttcccacctagctcactcgtggatccaactctgactccgctcactcggcgggcctctcagagtagcttggagagtagcaccggaccgccttgtatccgttcatag

SEQ ID NO: 132019 - DNA, 660 bp, synthetic construct
  misc_feature 1..660: note = Description of Artificial Sequence: Synthetic coding sequence
  source 1..660: mol_type = other DNA
atggccgctgaaatgagaaaaatggtgcgacagccatcccgcgaatctaccgacgggtctattaattcttattcctccgaaggcaacctgatctttccaggggttcgtcttggagcagatagccagttctctgactttctcgacggccttggccctgcacagctagttgggagacaaactctggcaacaccagctatgggtgacattcagatcggcatggaggacaagaaaggccagcttgaagtagaggtgatcagggccaggtccttgactcagaagcctggctcaaagtcaacccctgcgccttatgtgaaagtgtatctgctcgagaatggggcttgcatagcgaagaaaaagaccagaatagctcggaaaacactcgaccctctgtatcagcagagcctggtgtttgacgagtctccccaggggaaggtgttgcaggttatcgtctggggagattacggccgcatggaccacaagtgtttcatgggggtggcccagatcttactcgaggaactggatctctcttccatggttattgggtggtataaactgttcccaccatcaagcttggtggatcctacgttgactccactgacccgacgagcctctcagtcatccctcgagagttccacgggtcctccgtgcatcaggtcctag

SEQ ID NO: 132020 - DNA, 2283 bp, synthetic construct
  misc_feature 1..2283: note = Description of Artificial Sequence: Synthetic coding sequence
  source 1..2283: mol_type = other DNA
atgccgaaagacagcggtgcgttgctcggcctgaaggtggtcggcggcaagatgaccgacctgggcagacttggtgcatttatcacaaaggttaaaaagggaagcctggcagacgtcgtcggacatctgcgcgccggggatgaagttctggagtggaacgggaagcccctccctggagctactaatgaggaggtctataatattatcttggaatctaagagcgagccacaggtggagattattgtgagtcgccctatcggtgacatcccaagaataccagaatcctcacaccctcctctagagagctcctccagctctttcgaaagtcagaagatggagcgaccttccatcagtgtcataagtccgacaagtccaggggcccttaaagatgctcctcaggtgttgccaggacaactgagcgtgaagctatggtatgacaaggtcgggcaccagctgattgtgaacgtcttacaggccacagacctgccggctcgcgtggacggccgccctcgcaatccttacgtcaagatgtattttttgccggatcgcagcgacaaatctaagaggaggacaaagactgtcaagaaaatcctggagccaaaatggaatcagactttcgtttacagccatgtacaccggagggatttcagggaaagaatgctggagatcactgtgtgggatcagccaagggtacaagaagaagagtcagagtttctaggggaaattctgatcgagctcgagacagcactactggatgacgaaccacattggtataaacttcagacccatgacgaatcttcattacccctgcctcaaccaagtcctttcatgccacgaagacatatacacggcgaaagctcttccaagaagttgcaacgcagccagagaattagcgatagcgacatctccgactacgaggtagacgatgggattggcgtggttcccccggtcgggtacagaagctctgcgagagaatccaagtccaccacactcaccgtaccggaacagcaacgcaccacccaccaccggtcacggtcggtgtcgccccataggggcaacgaccagggcaagccacggtcccgcctgccaaacgtcccacttcagagaagtttggatgagatccaccctacgcggcgaagtcgtagtcctaccagacaccacgatgcttcaagatcccctgtcgatcacagaaccagagacgtggatagccaatatctcagcgaacaggacagtgaactgctgatgctcccaagagcaaagagaggtaggagtgcagagtgcctacatacgacctcagaacttcaaccattcctagacagagccaggtcagcctccacgaattgcctgcgccccgatacctcactgcactccccagagcgggagcggcactctcgcaaatccgagaggtccagcattcagaagcagacgaggaagggcacagcctcagatgccgagcgcatgcaccgccagaggtcgcccactcagtctcccccagctgacaccagtttttcatccagacggggccggcaactgccgcaggtcccagtccgtagtggatctatcgaacaggaaagcggacataagaagctaaaatcaactatacagaggagtacagagaccggcatggcggcagagatgaggaagatggtacgccagccttctagagagagcactgacgggagcattaatagttactcctctgaaggcaatttgatctttcccggtgtcagactgggcgccgacagtcagttctccgattttctggatggtctcggacctgcgcagctggtcggacggcagacacttgctacacctgcaatgggcgatattcaaatcggcatggaagacaagaaaggccagctggaggtcgaagtaatcagagcgcggtcactgactcaaaaaccaggctccaagagcaccccagcaccttatgttaaggtatatctgttagaaaatggcgcctgcatcgcaaaaaaaaagacacggattgcccgtaagacacttgaccctctctaccaacagagcttggtctttgacgaaagcccccaagggaaagtattacaggtcattgtgtggggagattatggtcgtatggatcacaaatgttttatgggtgtggcacaaattctcctcgaagagctcgatctctcctcgatggtcatcggttggtataaacttttccctccaagctccttggtggacccgactctgacccccttaactagacgcgcctcacaatcctccctagagagtagcactggtcccccttgtatcagaagctag

SEQ ID NO: 132021 - DNA, 2481 bp, synthetic construct
  misc_feature 1..2481: note = Description of Artificial Sequence: Synthetic coding sequence
  source 1..2481: mol_type = other DNA
atgttcgccggattcttgcagtttctgctgctccacacactacattcaggtactggcgatctcgactactattggcttgaccccgcaacttggcattccagggaaacgtctcctatctcatcgcaccctgtcacatggcaaccgtcaaaagagggtgacaggctgatcggtcgcgtgatcctcaataaaaggaccactatgcccaaagactctggagccttgcttggcttgaaggtagtgggaggaaaaatgaccgacttggggcgtctgggcgcgttcattactaaagtgaaaaagggaagtctagctgacgtggtgggccatctgagagctggtgacgaggtccttgagtggaacggcaaacctctccccggagctacaaacgaggaggtgtataacatcattctggagtcaaaatctgaacctcaggtggaaattatcgtgtcaagacccattggcgatattccgcggataccagagagctcccatccaccattggaatcatcctcatcatccttcgaaagccaaaaaatggaaagaccgtctatcagcgtgattagccccacctcccccggtgccctgaaggacgccccccaagtgctccccgggcagctgtccgtaaagttgtggtatgataaggttggtcaccagctgattgtgaatgtgcttcaggcaaccgatctccccgctcgggtcgacggaagaccaaggaatccctatgtgaaaatgtacttcttaccagaccggtccgataagtccaagcggagaaccaaaaccgtgaagaagattctggagcctaagtggaatcaaacattcgtctactcccacgtgcaccggagggactttcgcgagcgaatgcttgaaattacggtgtgggaccagcccagggtccaggaagaggagagcgaattcttgggggagatcttaattgagttagagactgcccttttggacgatgagccacactggtataaactgcagacccacgatgaatcaagcctccctcttccccagccgagtccttttatgccacgccggcatattcatggggagtcttccagcaaaaaactgcagcgctcccagcgtatttctgatagcgacatttcagattacgaagtggacgacgggataggcgttgttccccccgtggggtatagatcctcggctcgtgaatctaagagcacaactctgaccgtgcctgaacaacagcgcactacgcatcaccgctctaggtcggtctctccccatcgtggcaacgaccagggcaaaccacgctcgagattgcccaatgttccattgcaacgttctcttgacgaaattcatccgacacgtcgcagccggtcacctacacgccaccatgatgccagccggtctccagtggaccacaggactagagatgtcgacagccagtacctctccgagcaggattccgagctgcttatgttgcctagagctaagagaggcaggagtgccgaatgtttgcataccacctccgaactgcagcctttcctcgatagagcaaggagcgcttcgaccaattgtcttcgtccggacactagcctgcattcacctgagcgagaacggcactcccggaagagcgagaggagctctattcagaaacagaccagaaaaggcaccgcgagcgacgcagaacgcatgcaccgccaacgaagccctacgcaaagtccacctgccgatacgagtttcagcagtagaaggggccgtcagctgcctcaggtgccggtcaggtccggaagtatcgaacaagagagcggtcataaaaagctgaagtctacaatacagcgcagcacagagaccggaatggccgcagaaatgcggaaaatggtgcgccagccttcccgcgagtccaccgacggttcaataaactcctacagcagcgagggcaatcttatttttcctggggtgcgtctcggagcggactcccagttttccgactttctcgatgggctcggtcccgctcaactcgtaggacgccagactctggcgaccccggcaatgggggacatacagatcggcatggaagataaaaagggacagcttgaagtcgaggttatcagagcacgaagccttacgcagaaaccaggcagcaagagtaccccagcaccttacgttaaagtttatctcctggaaaatggagcttgtatagccaaaaagaagacccgcattgcgcggaagactctcgaccctctgtatcagcagagtctcgtgtttgatgagagtcctcagggtaaggtgctgcaagttatcgtgtggggagattatggcagaatggaccataagtgtttcatgggcgtcgcacagatccttctcgaggaactggatctgagctctatggtcattggctggtataaattgttccctccctcatcactggtcgacccgaccctgaccccactgacccgccgcgcttcacagagcagcttggaatcgagcaccgggcctccctgtattcggtcgtag

SEQ ID NO: 132022 - DNA, 2454 bp, synthetic construct
  misc_feature 1..2454: note = Description of Artificial Sequence: Synthetic coding sequence
  source 1..2454: mol_type = other DNA
atgtgcgctccaggtatacatgtgtccagtgaaggatgggaggaagtgcggtcagtcgattcggaggaaggtactatcgaggcgcgcagggctgtagccggagacctggactactattggctcgatcccgcaacttggcactcccgggaaacgtcccccatcagcagtcatccagttacttggcagccatccaaggaaggtgatcgcttgattggaagggttatactgaataaaagaaccaccatgcccaaagacagcggggctctcctgggactgaaagtggtcgggggaaagatgactgatctggggcggctcggtgctttcataaccaaggtaaagaaaggatcccttgccgatgtggtgggccatctcagagctggggacgaagtcttggagtggaacgggaagcctttgcccggggctacgaatgaggaggtatataatatcatcctggaatcaaaaagcgagccgcaagtcgaaatcatcgtgtcaaggcccatcggagatatacccagaatcccggaatcatcgcacccgccgctggagtcaagtagttcaagttttgagagccaaaaaatggaacggcccagcattagtgtgatctccccgacctcccctggggctctgaaggacgcaccccaagttcttcctggacaactttcagtaaaactctggtatgataaagttggacaccaattaattgtcaacgtcctgcaagccaccgatttgcccgctcgagtggacggaaggcccagaaatccttacgtgaagatgtactttctgcctgataggagcgataagagcaaacgccgtacgaaaactgtcaaaaagattttagaaccaaaatggaaccagactttcgtgtatagccatgtacataggcgggattttagggagcgcatgttggagattactgtatgggaccagcctcgcgtgcaggaggaagagtctgagttcctgggagagatcctcatcgaacttgagaccgccctcctggatgatgaacctcactggtataagctgcagactcatgatgaaagctcactgccactgccgcagccatccccgttcatgccgaggagacatatccacggagaatccagtagtaagaaattgcagcgcagtcagcgaatttctgactcagacattagcgactacgaggttgacgacgggattggcgtggtgccgccagttggctacagatcaagcgccagggagtctaagtctaccaccctcacggtgcccgagcagcagcgtactactcatcaccgctcaagatccgtctcaccgcatcggggtaacgaccagggcaagccaaggtctcgtttaccgaacgtgcctctacagcggtcgctagatgagatccaccctacgcggaggtccagatcccccacacgacaccacgacgctagtcgatccccagtagatcaccgcacaagagatgtcgatagtcagtatttgtcagaacaggatagcgaactgctgatgcttccccgcgctaagaggggacgctccgcagagtgtcttcataccacctctgaattacaacctttcctggaccgcgcaaggagcgccagtaccaactgtctacggcccgatactagcctgcacagcccagagagagagcgcatgcaccgccagaggtcccccactcaatcgcctccagcagatacctccttttctagtcggaggggacggcagcttcctcaagtgcctgtccggtctgggtctatcgagcaagaatcaggccacaaaaagttaaaaagcacaatccagcgcagtaccgagacaggtatggctgccgaaatgcgcaagatggtccgacagccaagccgcgagtctacagacggtagcattaatagttactcctccgagggtaatcttattttccccggggtgcggcttggtgctgactcacagttctccgactttctggatggactggggcccgcccagttggtcggccgccagacactggccacaccagcaatgggggacattcagataggtatggaagataagaaaggccagttggaggtggaggtgatccgagccagatccttaacacagaaaccggggagtaagagtacaccagccccttatgtcaaagtgtacctgctcgagaacggagcatgcatcgccaagaagaaaacccggatcgctcggaaaactctggatcccctgtaccagcaatccttagtctttgacgaatcgccgcaggggaaggtcctgcaggtgatcgtctggggagactatggacgcatggatcacaaatgcttcatgggcgtggcgcagatattactggaagaacttgacctcagtagtatggtgattggatggtataaactattcccacctagtagtctcgtcgatcctaccctgactcctctgactagacgagcgtctcagagtagccttgaatcatctacaggccccccctgcattagatcctag

SEQ ID NO: 132023 - DNA, 3567 bp, synthetic construct
  misc_feature 1..3567: note = Description of Artificial Sequence: Synthetic coding sequence
  source 1..3567: mol_type = other DNA
atgcaattcgaaacgctgcgacaagtatgtaactctgtgttgagtcacttccatggagtcttcagctcaccccctaacatcctacagaacgagttatttgggcagacactcaataatgctcggaaacgcagtccctccgtttcccgagatcaaaaccggaggtacgaccaacgcgaggaacgagaggagtactcccagtatgcgacgtctgacaccgccatgcccaggagtccatctgattatgctgataggcggtcacaacatgagcctcagttctatgaggacagcgatcacctgtcataccgtgactcgaataggaggagccacaggcattccaaagaatatatcgtcgacgacgaagacgtcgagtctagggacgagtacgaacgccagcggcgtgaggaggagtatcagagtaggtaccgcagcgatccgaaccttgcgcgttatcccgtgaagccacagccatacgaggagcagatgcgaatccatgccgaggtgagccgggcaagacatgagcgtagacactcagacgtgtctctcgccaacgccgatcttgaggattctagaatctctatgttgaggatggaccgtccttcgagacagaggtcaatcagcgagaggagagcagcaatggagaaccaacgcagttactccatggagaggactcgtgaggctcagggaccctctagctacgcccagcgcaccacgaaccactcgccccctactccaagaagaagtcctttaccaatagaccgtcccgatctgcgacgcacagattccctgagaaaacagcaccacctagacccatcctccgccgtgcggaaaaccaaacgtgagaagatggagactatgcttcggaacgactctcttagcagcgaccagagtgaaagtgtaagacccccaccccctaaacctcacaaaagtaagaaggggggcaaaatgcgccagatttccttaagcagctcagaggaggaactggcttctacacctgagtacacatcatgcgatgatgtcgaaattgagagcgaatctgtgagtgaaaaaggtgatagtcagaaagggaaaaggaaaacgtccgaacaggctgtccttagcgactccaatactaggagtgaacgtcagaaagagatgatgtattttggggggcactcccttgaggaggatctggagtggtccgagccccaaatcaaagactccggtgtggatacgtgcagttctactaccctgaatgaggaacactcccattccgataaacatcccgttacctggcaaccaagcaaagacggggacagactgatcggaagaattttgttgaataaacgtttaaaggatgggtcagtgccccgtgactccggagctatgcttgggctcaaggtcgtgggcggcaagatgaccgagtctggtaggctctgcgccttcattacaaaggtcaagaaagggagcctggctgatactgtgggtcacctccgccccggtgatgaagtgctggagtggaacgggcgactgctccaaggcgcaacctttgaagaagtttacaacatcatcctcgagagcaaacctgaaccccaggtcgaactcgtggtgagtcgacctattggagacatacctagaattcccgactctactcacgcccagctggaaagcagctcatccagctttgagagccagaagatggatagaccgtcgattagtgttacatctcccatgtccccgggaatgctgcgagacgttcctcagttccttagcgggcagctttctattaagctgtggtttgacaaagtcggccaccagctgatcgtgacgattctgggagccaaggacctgcccagccgagaagacggcagaccgagaaacccttatgtgaaaatctacttccttcccgaccggtcggacaagaataaaagaagaactaagaccgtgaagaaaaccctcgagcctaaatggaatcaaacttttatatactccccagtccaccgacgcgaattccgagagcggatgctggaaattactctatgggaccaggctagggttcgcgaagaggagtctgagtttttgggggaaattctgattgaacttgaaacagcactactcgatgacgagcctcactggtacaagctgcagactcatgatgtttccagtctgcccttgccccaccctagcccttatatgcccaggcggcagctgcatggggagtcccctacaagaaggctgcagcggagtaagcgcatttcagatagcgaagtcagtgattacgattgcgacgacggcatcggcgtcgtctcggactataggcacgacgggcgggaccttcagagctcaactctcagcgtgccagagcaggtgatgagcagcaaccattgttcccccagcggctcccctcatagagttgatgtcattgggagaacccgttcctggtctcccagcgtcccgccacctcagagtaggaatgtggagcaagggctgcgtgggacacggactatgaccggacattacaacaccatttctcggatggacagacacagagttatggacgatcattacagcccagaccgggatcgggactgcgaggctgcggacagacagccttatcaccggagccggagcaccgaacagcggcccttactagagagaactacaacacggagccggtctacagaaagacctgatacgaacttaatgcggagcatgccttccctgatgactggaaggagtgccccccccagccctgccctgagtcggtcccatccccggacgggatctgtgcagacaagtccctctagcacgcctgtggccggtcgcaggggtcgtcagctcccacagctacctcccaaagggacattggacaggaaggccggaggcaagaagctgagatccaccgtgcagcgctcgaccgagaccgggctcgctgtggaaatgcggaactggatgactcgacaggcctccagagagagcaccgatgggtccatgaactcctactcatccgagggcaatctgatctttcctggcgtgagactggccagtgacagtcagttctccgatttcctggacggattgggccccgcacagctcgtggggagacaaaccctggcgactccagccatgggcgacatccaggtgggcatgatggacaagaaaggccaattggaggtcgaaataattcgggccagaggactggttgtaaaacccgggtcgaaaacgctgcccgctccgtacgtcaaggtgtaccttctggataacggcgtctgtattgctaaaaagaagacaaaggtggctagaaagacactcgaacctctctaccagcagctgctatctttcgaggagtccccacagggtaaggtgttacagatcattgtttggggggattacggccgaatggaccacaaatcattcatgggcgtcgcacagatactgctggacgaactggaactttccaatatggtcattggctggtttaaactttttcctccctcttcccttgttgatcctacactagcccctttaacgagacgggctagtcagagttctctagagagctctacaggcccgtcctatagtaggtcatag

SEQ ID NO: 132024 - DNA, 4161 bp, synthetic construct
  misc_feature 1..4161: note = Description of Artificial Sequence: Synthetic coding sequence
  source 1..4161: mol_type = other DNA
atgtctgctcctgtaggcccacggggcaggctggcccccattccagctgccagtcagccgcccttacagcccgagatgcctgatctctcccacctcacagaggaggaacggaagattatcctggctgttatggacaggcagaaaaaggaagtcaaagaagaacataaaccacagctaacgcagtggtttccattctctgggattactgaactagttaataatgttctgcagcctcagcagaagcaacagaatgagaaagagcctcagactaagttgcaccagcagttcgagatgtataaggagcaggtcaagaaaatgggggaggaatcacagcaacagcaggagcaaaaaggagatgcaccaacttgcgggatctgtcataagacaaaattcgccgatggatgtggccacaactgctcatactgtcagactaaattctgcgctcgctgtggggggagggtctcccttcgcagcaacaaggttatgtgggtctgcaatctctgtcgcaagcagcaggagattctgaccaagtctggggcttggttttataacagtgggtcgaacacgccgcagcagcccgatcagaaggttctgcggggcctgagaaatgaggaagctccccaggaaaagaagcctaagctgcatgaacagacacagttccagggcccatccggcgacctcagtgtcccagccgtggaaaagtcacggagccatggccttactcgtcagcactcaatcaaaaacggcagcggtgtgaagcaccatatcgcaagcgatattgcatctgaccggaagcgttctcctagcgtttcccgagaccaaaataggagatatgatcaaagagaggaacgcgaggagtattctcaatacgccacttccgatacagcaatgcccaggtcgccttcagactacgctgacagacgcagccaacatgagccccaattctatgaggacagcgaccacttgtcatatcgggacagcaacaggcgcagtcaccgccactccaaagaatacattgtggacgatgaggatgtggagtcccgggacgaatatgaacgccagcgccgagaggaggaataccagtcccggtacaggagcgaccctaatttagcacgctatccggttaagccacagccctacgaggaacagatgcggatccacgcggaggtgagtcgagcacgccatgagaggaggcattccgacgttagtctggccaatgcggaccttgaggacagtaggattagcatgttgagaatggacaggccctcccggcagcgaagtatatccgagcggagggccgctatggaaaatcagcggtcctattccatggaaaggactcgcgaagcgcaaggaccttcctcgtacgcccagcgaaccacaaatcactcgcccccaacccctagacgaagtccattgcctatcgataggccagatttgagaaggacagattctttgcggaagcagcaccacttggatccgtcctccgcagtcagaaaaaccaagagggagaagatggagaccatgttgcgtaatgactctctatccagtgaccagtcggaatctgtgaggccccccccacccaagccacataagagtaagaagggcggcaagatgagacagatctctctcagcagctcagaggaggaactggcctctactccagaatacaccagctgtgacgacgtagaaatcgaatctgagagcgttagcgagaagggggatatggactataattggctcgaccacacctcttggcactcatcagaagcctcccctatgtctctgcatcctgtcacgtggcaaccctcaaaagacggcgaccgactgataggcagaattctgctcaacaagcgcctgaaggacggcagtgtgcctagggactccggcgccatgctgggtcttaaggttgtcggtggcaagatgactgaatctggcaggttgtgcgcgttcattactaaggttaaaaaaggatctctcgccgacaccgtaggccatctccggcctggtgatgaggttctagagtggaatgggaggctcctacagggggcgactttcgaggaagtgtacaatattatcttggagtccaagcccgagcctcaggtggaactcgtagttagcagaccaataggtgacatacccagaatcccagactctacccacgcccaattagaatctagctcctcctcattcgagagtcaaaagatggaccgcccttcaattagtgtgacatcaccgatgtcacccggcatgctacgggacgtgccacagttcctctccggccaattaagtattaaattgtggtttgacaaggtgggacaccagctgattgtcactattcttggcgcaaaggatctcccatcgcgagaggacggtcgacctcgaaacccgtatgtgaagatttacttcttgcccgatcgcagtgacaagaataagcggcgaaccaaaacggtgaagaaaaccctggagcccaaatggaaccagaccttcatttatagtcccgtgcacaggcgcgaattccgtgagaggatgttggagatcaccctttgggaccaggctagggtaagggaggaagagagtgaatttctgggcgaaattctaatcgaactggagaccgctctgctggatgacgaaccccactggtacaaactgcagacccacgatgtatcctctctcccgctgccccatcccagcccttacatgcctcgccgtcagctgcacggagaaagcccgactagaaggctccagcgcagtaaacgtatttcggactccgaggtgagcgactacgactgcgatgacggaataggcgtggtcagtgactaccgtcacgacggccgggatttgcaatcttctacactaagcgtgcctgaacaggttatgtcttctaaccattgcagtccctccggctcaccccatcgtgtggacgtgattggacggacccggagctggtcccctagtgtaccaccaccacagtcaagaaatgtggaacaaggcctgagagggacccggactatgaccggacactacaataccatatctcgcatggaccgacacagggtcatggatgatcactactcgcccgatagagatagccacttcttgacgttgccaagatcccgttattcccagaccatcgatcaccaccaccgcgatggtcgtgattgcgaggcagccgacagacagccttatcataggtccagatctaccgagcagaggccactcttggagcgtacaaccactcgaagtcgcagtactgagagacctgacaccaacttaatgaggtcgatgccgtcccttatgaccgggagatctgcccctccatccccagccttgtctagaagtcatccgcggaccggctccgtgcaaactagcccctcttcgactccagtcgcgggacgaagaggccggcagctgccacagcttccgccaaaggggacactcgaccggaaagccggtgggaaaaagctgagaagtaccgtgcagcgtagcactgaaactggcttggcagtcgaaatgagaaactggatgacacgtcaggcctcccgggagtcaacagacggaagtatgaacagctactcttcagaaggaaatctcatatttccaggggttcgactcgcgagcgacagccagtttagtgattttctcgacggtttaggccctgctcagctggtcgggaggcaaaccctcgcaacaccagcaatgggggacattcaagtgggaatgatggacaaaaagggccagctcgaggtggaaatcattcgggctcgaggcctagtggtgaagccgggcagtaagactctacccgctccgtacgtgaaagtgtatcttctggacaacggcgtctgtatcgctaagaagaaaacaaaggtggccagaaagacgctagagcctttataccagcagttactgagcttcgaagagtcgccacagggcaaagtgctgcagatcatagtgtggggtgactacgggaggatggaccacaaatctttcatgggcgtggcccagatacttcttgacgaattggagctctccaacatggtgatcggctggtttaaactgtttccgccatcttctctcgtggaccctaccctggcccctctcactcggcgtgcatcacagagctctctcgaatcttctaccggaccctcctactcccggtcctag

SEQ ID NO: 132025 - DNA, 858 bp, synthetic construct
  misc_feature 1..858: note = Description of Artificial Sequence: Synthetic coding sequence
  source 1..858: mol_type = other DNA
atgggacgccagggtctcggcggggcgtcagccgcaggtaggagcatgcagcgttcccagtccaggagttcactgtcagccagttttgaagctcttgcaggctattttccatgcatgaacagccttgaagaagaggagggagaagcagggggaaagaaactccgaagcaccgtgcagaggtccactgaaactgggctggctgtcgaaatgaggaactggatgacccgccaggcatcacgtgagtcaaccgatggtagcatgaactcttattctagtgaggggaatctcatttttccaggtgtacgattagctagcgactcccagttctctgattttctagatggtctcggcccagctcaactggtgggccgccagaccctggcaacacctgccatgggggatatccaagtggggatgatggataagaagggacagctagaggtggagatcatacgtgctaggggactcgttgtcaaaccaggcagtaagacattaccagcgccctacgtgaaagtctatcttctggacaatggtgtttgcatcgcgaagaaaaagactaaggtggctaggaaaacattggaacccctctaccagcagttactttcctttgaagaatcaccacagggtaaggttctgcagattatagtgtggggagactatggacggatggaccacaaaagctttatgggcgtcgcacagattctcctggacgaactggaactctccaatatggtgatcggctggttcaaactgttcccaccttcgtcactcgtagatcctactcttgcgcctctgacgcgccgggcctctcagagcagccttgagtccagcacagggccgtcctacagtcgctcatag

SEQ ID NO: 132026 - DNA, 384 bp, synthetic construct
  misc_feature 1..384: note = Description of Artificial Sequence: Synthetic coding sequence
  source 1..384: mol_type = other DNA
atgactgagtccggacggctgtgcgcctttattaccaaggtgaagaaaggaagtctggctgacaccgtgggccatctccgacccggggatgaagttctagaatggaatggcagactcctgcagggtgccaccttcgaagaggtgtataacattatactggagtcaaaacctgagcctcaggttgaactggttgtttctcggcctattggggacattcctcggattcccgactctacccacgctcaattggagtccagtctgcccggactcgcctggtggttgacccgggtcattccagcactatgggaggccgaggccggaggtagccgcgggcaggagatcgagactatcctggccaatacagtcaaaccccgcttatactag

SEQ ID NO: 132027 - DNA, 4236 bp, synthetic construct
  misc_feature 1..4236: note = Description of Artificial Sequence: Synthetic coding sequence
  source 1..4236: mol_type = other DNA
atgtcagctccggtggggccgcgcggccggctggctccgattcccgccgcctcccaaccacccctgcaaccagagatgcccgacctgagccatttaacagaggaagaacgaaagataattctcgctgtgatggaccgtcagaaaaaggaagtgaaagaagagcacaagcctcagcttactcaatggtttcctttttctggaatcaccgagctggtgaataacgttcttcagcctcagcagaaacagcaaaatgagaaagagcctcagactaagctccatcagcagttcgagatgtataaagaacaggtgaaaaagatgggagaagagtcccaacaacaacaagagcagaagggagacgcccctacctgcggaatatgtcacaagactaagttcgctgacggctgcggccataactgcagctactgccagactaagttctgcgcccgttgcggaggccgcgtcagccttcgctccaataaggtgatgtgggtctgcaatctctgtcgcaaacagcaagagatccttacaaagtctggcgcctggttctataacagtggtagtaataccccgcagcaacccgatcaaaaggtcctgaggggtctgcggaacgaggaggccccacaggagaagaaacctaaactccatgaacagacacagtttcagggacccagcggcgatctgtctgtgccagcggttgagaagagtcgctcacatggcctgacgcgacagcattccatcaagaatggttccggcgtcaagcatcacattgcctccgatattgcctctgatagaaagagatccccctcagtcagcagagatcaaaatcgccgatatgaccaaagggaggaaagagaggagtactcccagtatgctaccagtgacacagctatgcctcgttccccttctgactacgccgacagacggagccaacacgagccccagttctatgaggatagtgaccacttgtcatacagagattctaacagacgcagtcatcgacactctaaagagtacattgtggatgatgaggatgtcgagtccagagatgagtatgagcgccagagaagggaggaggaataccagtctcgctaccgatccgaccccaacctggcccgataccccgtgaagcctcagccttatgaggaacaaatgagaatccacgctgaggtgagtcgcgccagacacgagcgcaggcactctgatgttagtcttgccaacgccgaccttgaggactctagaatcagtatgctgcggatggatcgcccgagcagacagagatccatatctgagagacgtgccgctatggaaaatcagcgatcttactccatggaaaggaccagggaagcacagggaccctctagctacgcccagcgcacaaccaaccacagcccccccactcctcggcgctcacctctccccatcgataggcctgatctacggaggactgacagcctgcggaaacagcaccacctggacccttcttctgctgttcggaaaactaaacgggagaaaatggaaacgatgctccgcaatgacagcttgagctcagaccaaagcgaatccgtgaggcctcctccccctaagcctcataagagtaaaaagggcggtaaaatgcgtcaaatatccctctccagtagcgaggaagagctggcctcaactcccgaatatacgagctgcgacgatgtggaaattgagtctgaatccgtttctgaaaaaggggatagtcagaagggaaagagaaagactagtgaacaggcagtgttatctgatagtaatactagaagcgagcgccaaaaagagatgatgtattttggaggccattctctggaagaggacttagagtggtcagagccccagataaaggactccggcgtggatacttgcagctcaaccactctgaatgaggagcattcccattccgataaacaccccgtcacatggcagcctagcaaagacggagataggctgattggccgcatcctgctgaacaaaagacttaaggatggctcagtaccaagagatagcggtgctatgctgggtttgaaggtggtggggggcaagatgacagaatccggacggttgtgcgccttcatcaccaaagtaaaaaaggggagccttgcagacactgttggacacttaagaccaggcgacgaagtcctcgaatggaacggaaggctgcttcagggcgcaacatttgaggaagtgtacaatatcattctggagagcaagcccgaacctcaagtagagctggttgtttcccggcctatcggcgatattccccgcattcccgactctacacacgctcagctcgaaagcagttcttctagctttgaatcacagaagatggataggccttccatcagtgtgacaagtcccatgagcccaggcatgcttcgcgacgtcccgcagttcctaagcggtcagctgagcataaaactctggtttgataaggtgggacatcagctcatcgtgaccatacttggtgcaaaggatctgccaagtcgggaagacggccgcccacggaacccttacgtgaagatttacttcctccccgaccggagcgacaagaacaaaaggcgcactaaaacagtgaagaagactctcgagccaaaatggaaccagaccttcatctatagtccagttcaccgccgcgagttccgtgagcgtatgctggaaatcacgctgtgggatcaggcaagggttagagaagaagagagcgaattcctgggcgaaatcttgatagagcttgaaaccgcactgttggacgacgagccccactggtataagctgcagacccatgacgtgagttctctgccactgcctcatccatcgccgtacatgccccgccggcagctccatggggagagtcccacccgcagactccagagatctaagcgcatctcagatagcgaagtgagtgattatgactgcgatgacgggatcggagtcgttagtgattaccgccatgacgggcgggatcttcagtcttccaccctctctgtcccggagcaggtgatgagcagcaatcactgcagccccagcgggtctccccaccgcgttgacgtgatcggacgtactcgctcttggtcaccttccgtgccgcccccccagagtcgaaacgtagaacaggggctgcgaggcacccgcactatgaccggacactacaatacaatctcccgtatggatagacatagggtaatggatgaccattacagtcctgatcgcgaccgcgactgtgaagcagccgacagacagccctatcaccgaagtagatctacagagcagcggcctctactggaaagaactacaacacgatctagatccacagagcggcctgacacaaacctcatgcgctccatgccttccctgatgactggacggtctgcccctcccagcccagccttatcaagaagccacccacgcactggctccgtgcagacatcaccttcctctactcctgtggctggccggaggggcagacagttgccccagcttccccccaagggaacccttgatagaaaagccgggggaaaaaaattgcgctcaaccgtacagcgctccactgaaacgggtctggccgtggagatgaggaactggatgacgcggcaggcctcacgggaaagcacagacggaagcatgaactcctactctagcgaaggcaacttgatctttcccggcgtcagactggccagcgactcacagttttcagattttttggatggactgggtcctgcacagctggttggtcgccagactttagccaccccagccatgggcgatattcaagttgggatgatggacaagaaaggtcagctggaagtggagattatccgcgcacgcggcctggtggtcaagcccggaagcaagaccttgcctgctccatatgttaaggtgtatttactcgataacggagtgtgtatcgccaaaaagaaaaccaaagtcgcacgaaagacacttgaacccctatatcagcagctcctctcatttgaggaaagtccccagggcaaggttctgcaaataattgtgtggggggattacggccgcatggaccataaatcctttatgggcgtggcccagatcctgttggatgaacttgaactttcaaatatggtaatcgggtggttcaaactctttccaccctcatccctggtggacccaaccctagctcccctaaccaggagagccagccagtcctcccttgagagctccaccggaccatcctattcccgatcatag

SEQ ID NO: 132028 - DNA, 4050 bp, synthetic construct
  misc_feature 1..4050: note = Description of Artificial Sequence: Synthetic coding sequence
  source 1..4050: mol_type = other DNA
atgtctgcacccgtcggccccaggggacgtttggcaccaattccggctgctagccagccccctctacagccagaaatgcccgacctgtcccatctcaccgaggaagagcggaagatcatactagcagttatggaccgtcaaaagaaggaagaagaaaaggagcaatctgtcctgaagaagctgcatcagcagtttgagatgtacaaggagcaggtgaaaaaaatgggtgaagagagccaacagcaacaagaacagaagggtgacgccccgacctgtggaatttgtcacaagacgaagttcgctgatgggtgcggtcacaactgtagctattgtcagactaaattttgcgcgcggtgcggcggccgagtaagcctaaggtcgaataaggtgatgtgggtctgtaatctgtgtcgcaagcagcaggagattctgacgaaaagcggggcttggttttataattccggatcaaacacccctcagcaacctgaccagaaggtcctcaggggcttaaggaacgaagaggccccgcaggagaaaaaaccgaagctccacgagcagactcagtttcaaggcccctccggcgatctgtccgttcccgctgtagagaaaagcagatctcacggcctcaccaggcagcattccatcaaaaatggctcaggtgtgaaacatcatattgcttcagacatcgcctcagaccgcaaaagatccccttccgtgtctagggaccaaaaccgacggtatgatcagcgcgaggaacgcgaagagtattcccagtacgccacgtcagataccgctatgccaaggtcacccagtgattatgcagatcggaggagtcaacatgagcctcagttctacgaagactcagaccacctctcctatagagactctaaccgcagaagccaccggcatagcaaggaatacatcgtggatgacgaggatgtggagagtagggacgagtacgaaagacagagacgcgaggaggagtatcagtcacggtatcggtctgatcctaatctcgctcggtaccccgtcaagccccagccatacgaagagcagatgcgaattcatgctgaggtcagtcgcgccagacacgaacggcggcactcagacgtgagcttagccaatgctgacttggaggattctcggatctccatgttgagaatggatcgtccgtccagacaaaggagtattagcgagcgccgggctgccatggagaaccagcgcagttattcgatggagcggacccgcgaggcgcagggtccatcatcttacgctcaacggaccacaaatcacagtccaccaacacccaggcggagtccgttgcctattgatcgtccggacttaagacggacagacagcctgcgcaagcagcatcacctcgatcccagctcggctgtgaggaaaacaaagcgcgagaagatggaaaccatgcttagaaatgacagccttagtagcgaccagagtgaatcggtgaggcctccgccaccgaagcctcataagagcaagaagggcggcaagatgaggcagattagcctctcctctagcgaggaggaactggccagcacccccgagtacaccagttgcgatgacgtggagatagagagcgagagtgtgtccgagaaaggcgatatggattacaattggctggaccacacctcttggcactcctctgaggcatctcccatgtcccttcacccagttacttggcagccatccaaggacggcgaccggttgattggacgaattctgctaaataaaagactcaaagacggcagcgtgcctagagattctggcgccatgcttggactcaaggtggtgggaggcaaaatgacagagtccggccgactgtgcgccttcataactaaagtgaagaagggaagcctggccgacaccgtagggcaccttagaccaggggatgaggtcctggaatggaatggcagactgctacagggggccacattcgaagaagtatataacattatactggagtcgaaacccgagccacaggtggagctcgtggtctctcgcccaattggagacattccccggatccccgacagcacacacgcccagcttgaatcaagctctagtagctttgagtctcaaaaaatggataggccgagcataagcgtgacaagcccaatgtccccaggcatgctccgggatgtccctcagtttttgtctggacagttaagctcacagtcgctgtcccggcgaacgactccattcgtgccaagggtgcagatcaaactttggttcgacaaggtggggcaccagttgatcgtgactattcttggggccaaagacctgccttcacgggaagacggacggccccgaaatccatacgtcaagatttacttcctgccagaccgaagcgacaagaacaaaaggcgaaccaagacagtgaagaagacattggaacccaagtggaaccaaacgtttatctacagcccagttcatagacgcgagtttcgagagaggatgctggagattacgctctgggatcaggcgcgagttagggaagaggagagcgaatttctcggtgaaattctgatagagttggaaaccgccctgctggacgacgaacctcactggtacaagctgcaaacccacgacgtctcctctctgcccttgccccaccctagtccctacatgccacgccgtcagctgcacggtgaaagccccacaaggagactgcagcggagtaaacggattagcgattccgaggtgagcgactacgactgtgacgacgggatcggagtagtcagcgactaccgacatgacggcagggatctacagtcaagcactctgtctgtacctgaacaggtaatgtcgagcaaccattgtagcccaagcggatccccacatagagtagacgttattggccggactagaagttggtctccatcggttccacccccacaatcacggaacgttgagcaggggttgaggggaactcggactatgactggccactataatacgatttcacgcatggaccgccatcgggtgatggacgatcactattcccccgaccgggaccgagactgcgaggcagccgacaggcagccataccaccggtcacgcagtaccgagcaacggccactgctggagcggaccacgacgaggtcccgatccaccgaacgccccgataccaacctgatgaggtccatgcctagcctgatgactggacgttccgcgccccccagccctgcgctgtcccggagtcatccgcgcacaggctcagtgcagacgtcacccagctcgacccccgtggccggcaggagagggaggcagttgcctcagctgcccccaaaagggacactagacagaaaggccggtggtaaaaagctcaggtctacagtgcaacgttctacggaaactgggctcgctgtggaaatgcggaactggatgaccaggcaggcatccagagagtctactgatggctccatgaattcctattcatctgaaggaaacctaattttccctggcgtgcgcttggcctcagacagtcagttctctgattttctagacggcctcgggcccgcccaactggtgggccgtcagactttagcaactcctgccatgggagacatccaggttgggatgatggataaaaagggccagctcgaggtggaaatcattagggcaaggggactcgtcgtcaagcccggttccaagacactgcccgctccatacgtcaaggtctatctgctggacaacggggtctgcatcgccaagaaaaaaacaaaggtggcccggaagactctggagccattgtatcaacaacttctaagtttcgaggaaagccctcaaggcaaagtgctgcagattatagtatggggagactatgggagaatggatcataaaagttttatgggcgtggcccagatacttctggatgaattagagttgagtaatatggtaatcggttggtttaagctcttccctcctagctcacttgttgatcctactcttgccccccttactcgtcgcgcgtcccagtcatccctcgagtcctctactgggcctagctacagcagatcctag

SEQ ID NO: 132029 - DNA, 3492 bp, synthetic construct
  misc_feature 1..3492: note = Description of Artificial Sequence: Synthetic coding sequence
  source 1..3492: mol_type = other DNA
atgcagttcgaaaccctcagacaggtgtgcaactcagttcttagccatttccatggtgtgttttcatctcctcccaatattctacagaacgaactgtttggccagaccttgaataacgccaggaaaagaagcccatctgttagccgtgaccagaacagacggtatgatcagcgggaggaacgcgaggaatactcacagtacgccactagtgatacagctatgccacgttctccctccgattatgcagacagacggtcccagcacgaaccacaattctatgaggattccgatcatttgagctaccgagactcaaaccggcggagccacagacactcaaaagaatatatagtggacgacgaagacgtggaaagccgggatgaatacgagcggcagcgcagagaggaagaatatcagagtagatatcgaagtgacccaaatctggccagatatcctgttaagccacaaccatacgaggagcagatgagaatccacgccgaagtatcaagagcccgacacgagagaaggcactctgacgtaagcctggccaacgcggatctagaagactctaggattagtatgctgcgtatggacaggccttcccgccagcgctctatttccgaaaggagagcagccatggagaaccagaggagttatagcatggagcggacacgcgaggcccagggcccaagcagctacgcccagcggacaacaaatcactctccccctacaccacggaggagcccattacccatagataggcccgaccttcggaggaccgatagtctcagaaaacagcatcacttggaccccagttcggcagtgcgaaagaccaagcgggagaagatggaaactatgctcaggaacgacagtctgtcttctgaccaaagtgagtctgtgaggccgcctcccccaaagcctcataaaagcaagaaagggggaaagatgcgtcagattagtctatccagctccgaggaggagctggcgagcacgcccgaatacacctcatgtgatgatgtggagatcgaatctgagtcagttagtgagaagggcgacatggactataactggctggatcacacctcctggcactctagcgaggcttccccaatgagcttgcaccctgttacttggcagcctagcaaagatggcgaccggctcatcggccgtatattactgaataagcggctaaaagacggttcggtaccacgggacagcggagcaatgcttggtctcaaggttgttgggggaaagatgactgagtccggacgcctgtgcgcgtttatcacgaaggtcaagaaggggagccttgctgatacagtgggtcatctgaggcccggtgatgaggtgctagagtggaacgggcgcctactccagggggccacttttgaggaggtgtacaatatcatcctagagtccaagccggagccgcaggtcgaactggtagtttcgaggcccattggtgatatccctagaattccagactccacgcatgcacagcttgaatcaagctcttccagctttgaatcacagaaaatggaccggccatccatctccgtcacatcccccatgtcccctggcatgctccgagatgtgccacagtttttaagcggtcagctttccatcaaattatggttcgacaaagtgggacatcagctgatcgtcaccatcctgggcgccaaagacctccccagtagggaagacgggcggccccggaacccttatgtgaaaatatacttcttacccgacagatcagataaaaacaagaggcgtaccaagactgtgaagaaaaccctggaacccaagtggaaccagactttcatttactcccccgtccataggagggagttcagagaaagaatgctagagattacgctctgggaccaggcaagggtgcgcgaagaggagagtgagtttctcggtgagatcttgatcgaactggaaactgctttgctggatgacgaaccacattggtacaagttgcagactcatgacgtgtcaagcctgccgttaccccacccctcaccatacatgccgagacgtcaactccacggtgagtcgccaacaagaagactccaacgtagcaaacgcataagcgattctgaggtgagtgactatgattgtgatgatggcattggcgtggtgagcgactataggcacgacgggagggacctgcaatcttctaccctgtccgtgcccgaacaggtcatgtcctcaaaccactgctcccccagtgggtccccccaccgggtcgacgtgatcgggaggactcgttcctggtcaccgtctgtgccacccccacagagcagaaatgtggagcagggtttgcgtggtacacgcacaatgaccgggcactacaacaccatctctaggatggatcgacaccgcgtcatggatgatcactattcccctgaccgggattctcactttcttacacttcccaggtctaggtatagccagaccatagaccatcaccacagagacgggcgagattgtgaagcagctgacagacaaccttaccatcgatctaggtctactgaacagcgccctcttcttgagcggactactacccgcagcaggtctactgaacgccctgacaccaatctcatgaggagtatgccttcgctcatgaccggacgtagtgccccacctagcccagccttgtcaagatcccatcctcgcacgggcagcgttcagaccagtccatcctcgacacctgtggccggccgcagaggccgacaactcccgcagcttcctcctaagggaactctggatcggaaagcaggtggaaaaaaactgcgtagcactgtccagaggtctacagagaccgggctcgccgtggaaatgcgtaattggatgacccgtcaagcctctagagagagtactgatggctccatgaacagctattcttctgaggggaacctaatcttcccgggcgtccgcctggcgtccgactcacagttctccgactttctcgatggccttggccccgcacaactggtggggcgccagacccttgccacacccgcaatgggagatattcaggtgggtatgatggacaaaaagggccaattggaagttgaaattataagagcacgagggctcgtggtcaagccgggctctaaaacactgcctgccccttacgttaaagtttacttgttggataacggggtatgcattgctaaaaagaagaccaaggtggcacgcaaaacgctagaacctctataccaacagctgctgtcctttgaggaatcacctcagggcaaggttctacagattatcgtttggggcgactacggaaggatggatcacaagtcttttatgggagtggcccagatacttctcgatgaactagaattatctaatatggtgatcggttggttcaaactctttcccccatcgagtctcgtcgaccccacactggccccccttacacggcgcgcctctcaaagtagcctcgaatcttccacagggccttcctattccaggtcttag

SEQ ID NO: 132030 - DNA, 927 bp, synthetic construct
  misc_feature 1..927: note = Description of Artificial Sequence: Synthetic coding sequence
  source 1..927: mol_type = other DNA
atgtttaatggagaacctggaccagcctctagtggcgccagtaggaatgtcgtcagaagctcatctatcagcggagaaatctgcgggtcccaacaagctggcgggggcgctggcacaaccaccgccaagaaacgaagatcttcattaggcgccaagatggtagccatcgtcggcctgacgcagtggagtaaaagcactcttcaactgccccagcctgagggagctaccaagaagcttcggagcaacatcagacgtagcactgaaaccgggattgcagtggagatgcgctcccgcgtcacccgacagggatcacgagaatcaactgatggatcaaccaatagtaatagcagtgatggaaccttcattttccccactacccgcctgggcgctgagtcccagttctcagacttcttagatgggctgggcccagcccagatagtggggcgccagacgctcgcgaccccaccaatgggagacgtgcatattgctataatggaccgcagcggtcagctggaagtagaagtgatagaggctcgcgggctcactccaaagccggggtctaagtcccttcccgccacgtatatcaaagtgtacctgctcgagaatggtgcctgcctggctaagaagaaaacgaagatgaccaaaaagacgtgcgaccccttataccagcaggcgttgctgttcgacgagggaccgcagggaaaggtactgcaggtcatcgtgtggggcgactatgggcgcatggatcacaagtgcttcatgggaatggcacaaattatgctggacgaattagatctctccgctgccgttacaggatggtacaagctattccctacttcctccgtggccgactcaactctaggttcactaactaggcgactgagtcagagtagccttgagagcgccacttccccctcttgtagttag

SEQ ID NO: 132031 - DNA, 927 bp, synthetic construct
  misc_feature 1..927: note = Description of Artificial Sequence: Synthetic coding sequence
  source 1..927: mol_type = other DNA
atgtttaacggagagcctggcccagccagttccggcgcttccagaaatgtcgtccggagcagcagcatctctggcgaaatttgcggatcccaacaagccggcggtggcgccggcacaacaactgcaaagaagaggcggagttctctgggagctaagatggtggctatcgtcggcttaacccaatggagcaagtctacactgcagctaccccagcctgaaggcgccaccaagaagctccgcagcaatattagacgctctacggaaaccggcatagcagtagaaatgcgttctcgagtgactcgccaaggcagcagagagtccaccgatggatcaacaaatagcaattctagcgatgggaccttcatttttccaaccacaagactgggcgccgaatctcagttttccgattttctagacggccttggccctgctcagattgtgggccggcagaccctagctactccacctatgggagacgtgcatattgctattatggataggtctggacagctcgaggtggaggttatagaggctaggggcctgacacctaagccgggcagcaagtccctgcccgctacatatattaaagtgtatctgctcgagaacggagcttgtctcgcgaaaaaaaagactaagatgaccaagaaaacatgtgaccccctctatcagcaagccctcttgtttgatgaaggtccacaaggtaaagtgttacaggtgatcgtttggggggattatgggaggatggaccacaagtgctttatggggatggcacagatcatgctggatgagctggatctatccgccgccgtaacggggtggtacaaactgtttcccacaagcagtgtggctgattcaaccctcggcagcctgacaagaagactcagccagtccagtcttgagtccgccacaagccctagctgctcttag

SEQ ID NO: 132032 - DNA, 810 bp, synthetic construct
  misc_feature 1..810: note = Description of Artificial Sequence: Synthetic coding sequence
  source 1..810: mol_type = other DNA
atggaacgaagccaatcccggttgtctttaagcgcaagtttcgaggcactggccatctatttcccctgtatgaatagcttcgatgacgaggatgctggcgactctcggcgtcttaagggggcaatacaacgatctaccgagaccggactcgccgtggagatgccatcgcgtacactccgacaagctagtcatgaatcaatcgaagattctatgaatagctatggctccgaggggaatttaaactacggcggggtctgtcttgctagtgacgcccagttctctgattttcttggttctatgggtcccgcccagtttgtagggaggcagacactggctacaacaccaatgggggacgtcgaaatagggctacaggagagaaacggacagctggaagtggatataatccaggcacggggtctaactgcaaagccaggctccaagactctgccggcagcgtatatcaaggcatatctcttggagaatgggatttgtatcgcaaagaagaaaactaaagtggcgcggaaatccttagaccccctgtacaaccaggtcctgctgtttcccgagagcccccagggaaaggtgctgcaggtaattgtctggggaaactatgggcggatggaacgcaaacagttcatgggcgtcgcgagagttttgctagaagagctagaccttactacactggccgtcggctggtataagctgttcccaaccagcagtatggtggatcctgccactggccctctgctgaggcaggcctcgcaactctcactcgaatctacagttggaccctgtggggagcgtagttag

SEQ ID NO: 132033 - DNA, 813 bp, synthetic construct
  misc_feature 1..813: note = Description of Artificial Sequence: Synthetic coding sequence
  source 1..813: mol_type = other DNA
atggaaagaagccagtctcggcttagcctctctgcctcttttgaagcactcgcaatttactttccttgtatgaattcattcgacgacgaggacgctgaaggagattcacggagactgaagggcgcaattcagcgatcaaccgagactggactcgccgtggagatgccttcacgcacgctccggcaagcctcacacgaatctatcgaagatagcatgaattcatacgggagcgaggggaacctgaattatggcggagtctgcttagcaagcgatgcccaattcagtgacttcctgggatccatgggccctgcacaatttgtcggaaggcagacgttggctaccacacccatgggggacgtggaaatcggccttcaagaaagaaacggccagctcgaggtggatatcatccaggccaggggtcttactgcaaaacctgggtccaaaacccttccggccgcctatataaaggcctaccttttggagaatggaatttgtatcgccaagaagaagactaaggttgcacgtaagagcctagatcccctttataaccaggtcctgctgttcccagagagcccgcaaggtaaggtcctgcaggtcatagtctggggaaattacggtcggatggagcggaagcagttcatgggggttgctcgggtgctgctcgaagaactcgatttgacaaccctggctgttgggtggtataaactcttccccactagctcaatggtcgaccctgccaccggccccctgcttagacaggcttcgcagctttcccttgagtccactgtggggccttgcggcgagagaagttag

SEQ ID NO: 132034 - DNA, 759 bp, synthetic construct
  misc_feature 1..759: note = Description of Artificial Sequence: Synthetic coding sequence
  source 1..759: mol_type = other DNA
atggaggacggtgtcgcgggtccacagttaggcgccgccgctgaggccgcagaggctgccgaggcacgggctaggcctggagttacacttaggcctttcgcaccactgtctggtgccgccgaagcagatgagggagggggagattggagctttattgactgcgaaatggaggaggttgatctgcaagacttgcccagtgccactatcgcatgtcacctcgacccacgagtgttcgtcgatggcctctgtcgtgcgaagtttgaatcccttttcagaacctatgacaaggacatcacattccagtacttcaagtctttcaagcgggtgcggattaatttcagcaaccccttttcagctgccgacgctcgccttcagctgcataagaccgaatttttgggaaaggaaatgaaactatatttcgcgcagacacttcacattgggtcctcacacttggcgccacctaaccccgacaaacagtttctgatatccccccccgcttccccccctgtgggatggaaacaggtggaagacgccacacctgtgattaattatgaccttctgtacgctataagtaaactggggccaggagaaaagtacgaactccatgccgctaccgatacaacccccagtgtggtagtgcatgtgtgtgaatcagaccaggaaaaggaagaagaagaggagatggagcggatgcgccgtccaaagcctaaaatcattcagactcgccgaccagagtatactcctattcatctaagttag

SEQ ID NO: 132035 - DNA, 594 bp, synthetic construct
  misc_feature 1..594: note = Description of Artificial Sequence: Synthetic coding sequence
  source 1..594: mol_type = other DNA
atgcacttccgaaactttaactacagttttagttcattgatcgcatgtgtggctaattcagatatattctccgaatcggagaccagggccaaattcgaatccctgttccgaacctatgataaggatattacatttcagtattttaagagcttcaaacgcgtccgcataaacttctctaatcccttctcagccgccgatgctcgcctgcaattacataaaacggagtttcttggaaaagagatgaaactgtatttcgcacagacccttcatatcggatcttcccacttggcaccccctaaccccgacaagcaattcttgatcagccctcctgcatcaccacctgttggctggaagcaggtggaagacgccactcccgtgatcaactacgatttgttgtacgccattagcaaactcggccccggcgagaaatatgagctgcacgccgctactgacacaactccatccgtagttgttcatgtgtgcgagtccgatcaggaaaaggaggaggaagaggaaatggagcgcatgcgccggccaaaacccaaaataatccagaccagaagacctgaatacaccccaattcatctgtcatag

SEQ ID NO: 132036 - DNA, 729 bp, synthetic construct
  misc_feature 1..729: note = Description of Artificial Sequence: Synthetic coding sequence
  source 1..729: mol_type = other DNA
atgcagggcgagcagggtcggcgtctctttagactgctgctgaacgacctgcctggcagggatcggcttccgtgttcatatccacaaccacacgtagagcaggcttctacctcagcgtctcccaggctgctagcggtcaacatacctgaggatacactcctgtcctatcctgagtcttcactgcccctgcaacggcattgtgccttccacaggttctccaaggccaaattcgaatcacttttccggacttatgacaaagacatcaccttccaatactttaagtctttcaagcgagtgcgcattaacttttctaatccgttttcagcagctgacgctagattacagcttcataaaaccgaattcctgggaaaagagatgaaactgtacttcgcgcagacccttcacataggctcgagtcatttggcacccccaaatcccgacaagcaattcttgatatctcccccggccagcccccccgtgggttggaaacaagtggaagacgccacccccgtaattaactatgatcttctctatgccatctctaagttaggcccaggggagaaatatgagctccacgccgctaccgacacgacacccagtgtagttgttcacgtatgcgaaagtgatcaggaaaaggaagaggaagaagaaatggagcggatgcgaagaccaaaaccgaaaatcatccagaccaggaggcctgaatatactcctattcacctgtcgtag

SEQ ID NO: 132037 - DNA, 354 bp, synthetic construct
  misc_feature 1..354: note = Description of Artificial Sequence: Synthetic coding sequence
  source 1..354: mol_type = other DNA
atgaaactgtacttcgcccaaacactgcacattggaagctctcatctggcccctcctaacccggacaagcaattcctcatcagccctccggcctcccctccggttgggtggaagcaagtagaggatgccacaccggtgatcaattacgatctgctgtatgccatctcaaagctgggaccaggagagaagtatgagttgcatgctgccaccgacacaacgccaagtgtcgtcgtgcacgtctgtgagagtgatcaggagaaagaagaggaagaggagatggagcgcatgaggcggccaaaacctaagatcattcagacgcgccgccctgaatacacaccaatacacttatcttag

SEQ ID NO: 132038 - DNA, 354 bp, synthetic construct
  misc_feature 1..354: note = Description of Artificial Sequence: Synthetic coding sequence
  source 1..354: mol_type = other DNA
atgaagctctacttcgctcagactctgcacataggctcttcccacctggcacctcccaaccccgataaacagtttcttatctcaccacccgcctccccccctgtgggctggaagcaggtcgaggatgctacgccggtgattaattacgacttactgtacgccatcagcaagctcgggccaggcgaaaaatatgaactacacgcagccaccgacactacccccagtgtggtggtccacgtttgtgaaagtgaccaagagaaagaagaggaggaggaaatggaacgtatgagaaggcctaagccaaagataatccaaacaagaaggcctgaatacactcccatccacctaagctag

SEQ ID NO: 132039 - DNA, 354 bp, synthetic construct
  misc_feature 1..354: note = Description of Artificial Sequence: Synthetic coding sequence
  source 1..354: mol_type = other DNA
atgaaactgtactttgcacagaccctgcacattggatccagtcacttagcaccaccaaaccctgacaaacagtttcttatttcgccacccgccagtccaccagtcggatggaaacaagtggaagatgcaaccccagtaattaactacgatctgctctacgccattagcaagctgggtccaggagaaaagtatgagctccatgcagcgactgatacaacaccttccgtggtagtgcacgtgtgcgagtcagaccaggagaaagaggaggaagaagaaatggagagaatgaggcgccccaagccaaagattatacagacccgccgccccgagtacacgccaattcatctcagttag

SEQ ID NO: 132040 - DNA, 732 bp, synthetic construct
  misc_feature 1..732: note = Description of Artificial Sequence: Synthetic coding sequence
  source 1..732: mol_type = other DNA
atgaggggggagtcgtacttcattggtatgcgatctcccggccagcaaggacacgtgcctgaggatggcgggttgttcttgctgtgctgtatcgatagagactgggctgtcacaagatgttttgctgaggaagcttttcaagctataaccgatttcaacgacctaccaaactccctttttgcgtgcaacgttcatcagtccgttttcgagggggaagaatctaaggaaaagttcgagggtctgtttagaacctatgacgattgcgtcacatttcagctgtttaaatccttcagaagggtgaggattaacttctccaatcccaagtccgccgccagggcgaggatcgaattgcacgaaacccagtttcggggtaagaagcttaaactgtatttcgctcaggtgcagacacctgagaccgacggtgacaagctgcacttggctcctccccagcctgcaaaacagttcctcatatctccaccctccagcccaccagtcggctggcagcccatcaacgatgccacccctgtcctgaactacgatctgctctatgccgtggctaagctgggacccggagagaaatacgaactacatgcaggaactgagagtacgccctccgtggttgtgcacgtctgcgactctgacatcgaagaggaggaggacccaaaaacgtccccgaagccaaaaattatacagacaagacgccccggcctcccgccttcagtgagtaactag

SEQ ID NO: 132041 - DNA, 594 bp, synthetic construct
  misc_feature 1..594: note = Description of Artificial Sequence: Synthetic coding sequence
  source 1..594: mol_type = other DNA
atgcctgcaccttctatggattgcgacgtgagtacgctggttgcctgtgtggtggacgtcgaggtcttcactaaccaggaggtcaaagagaaattcgaaggtctttttcgcacttacgatgactgtgttaccttccaactgttcaaatccttcagacgagtacggatcaacttcagtaacccgaaatcagccgcacgcgctagaattgagttacacgagacccagttccgcggcaagaagttgaagctctattttgcccaggtgcagacccccgaaacagatggtgataagttgcacctggcacccccccagccagcgaagcagtttttaattagccccccctctagcccacccgtcggctggcagcccattaacgacgctactccagtactgaattatgatctgctgtatgcagtggctaagttaggacccggtgaaaagtacgagctgcatgctggcacagaatccactccatctgtggtagtccacgtctgtgacagtgacattgaggaggaagaggacccgaagacaagccctaaacccaagattatccagaccaggcggccgggcctgcccccatccgtctccaattag

SEQ ID NO: 132042 - DNA, 732 bp, synthetic construct
  misc_feature 1..732: note = Description of Artificial Sequence: Synthetic coding sequence
  source 1..732: mol_type = other DNA
atgcggggagaatcctacttcatcggcatgcgatcacccggacagcaaggccacgttcctgaggatggcgggctcttcctgctctgttgtatcgacagggactgggcagtgacacggtgcttcgctgaagaagccttccaagcgatcaccgatttcaacgacctgcccaacagtctcttcgcctgcaatgttcaccagagtgttttcgaaggcgaggagtcaaaggagaagttcgaggggctgtttagaacatatgatgactgtgtgacctttcagctgttcaaaagctttagaagggttaggataaacttcagcaaccccaaaagcgctgctagagctcgaatcgagctgcacgaaactcaattccgggggaaaaagctcaaattgtactttgcacaggtccagacccccgagacggacggagacaagctgcaccttgctccaccccagcccgctaaacaattcctgatatctcctccatcttccccacccgttggttggcagcctattaacgacgccacgcctgtgcttaactatgaccttctatatgccgtggcaaagctgggccccggggaaaagtacgagttacacgctggaaccgaatctaccccgtcagtggtagtgcatgtctgcgactctgatatcgaagaggaagaggaccccaagactagtccaaagccgaagatcattcagacacgtaggcccggcttgccaccttctgtgagcaattag

SEQ ID NO: 132043 - DNA, 732 bp, synthetic construct
  misc_feature 1..732: note = Description of Artificial Sequence: Synthetic coding sequence
  source 1..732: mol_type = other DNA
atgaggggggaatcctactttatcggtatgagatcccctggccagcagggacatgtccccgaagatggaggcctgtttctcctgtgctgcatcgaccgcgactgggctgtcaccagatgcttcgctgaagaagcctttcaagcaatcacagacttcaacgacttgccaaactccctatttgcttgcaatgttcatcaaagtgtcttcgaaggagaagagtccaaagagaagtttgaaggcctgttcagaacttacgatgactgcgttacgtttcaactgtttaagtcgtttcgtcgggtgaggattaattttagcaatcccaaatctgccgctagggcgcgaattgagctgcatgagacacagtttcggggaaagaagttgaaactatactttgcacaggtgcagactcccgagacagacggggataagctgcatctcgcccctccccaaccagccaagcagtttctgatttccccccctagcagtcccccggtgggctggcaaccaattaatgacgctactcctgtcttgaactacgacttgctctatgcggtcgccaagttggggccaggtgaaaagtacgaattgcacgcaggaacagagtccactcccagtgtagtggtccatgtttgtgacagcgacattgaggaggaggaagaccccaagactagtccaaagccaaagattatccagactcgaagaccaggattgcccccaagcgtgagcaactag

SEQ ID NO: 132044 - DNA, 1596 bp, synthetic construct
  misc_feature 1..1596: note = Description of Artificial Sequence: Synthetic coding sequence
  source 1..1596: mol_type = other DNA
atggttgatgtggggaagtggcctatcttcacattgctgagcccacaagaaattgcctccattcgtaaagcttgtgtctttggcactagtgcgagcgaggccctgtacgtcaccgataatgatgaggtcttcgtgttcggccttaactactccaattgcttaggcactggcgataatcagtcaaccctagttccaaagaagctagagggcctgtgcggcaaaaaaattaagtccctgtcatatggatcagggccacacgtcctgttaagtaccgaggacggagtggtgtacgcctggggtcataatggttactcccaattgggaaatggaactaccaatcagggaattgcccctgtccaggtttgtactaacctcctgatcaaacaggttgtggaagtggcctgtggtagccatcactccatggccctggccgccgacggggaagtgttcgcgtggggttataataactgtggacaagtcgggagcggctcaacagcaaaccagcccaccccgagaaaggtcaccaactgccttcacatcaaaagggttgtagggatagcctgtggccagacaagctcaatggcggtcctagacaacggagaggtgtacggctggggttacaatggaaacgggcagttagggctgggcaataacggaaatcaattaaccccagtgcgagttgcagccctgcactcggtctgtgttaaccaaatcgtttgcggatatgctcatactctggccctgacagatgagggcctgctctatgcttggggagccaacacgtatggccagttgggaaccggaaacaaaaataatctgttgtccccagctcacatcatggtcgaaaaggagagggtggtggagattgcagcctgccacagcgcgcacaccagcgcagctaagacccagggcggacatgtctatatgtggggacagtgccggggtcagtcagtgattctgccccacctcactcacttttcctgcactgatgacgtctttgcatgtttcgccacccctgctgtctcctggaggctcttgagcgtggagcatgaggatttcctgacagttgccgagagcctgaaaaaagagtttgactcgccggagaccgcagacttgaagtttagaatcgacggtaaatacattcatgtccataaggcagtactaaaaatccgatgcgaacatttcagaagcatgttccaatcctattggaacgaagatatgaaagaagtaattgaaattgaccagttctcatatcccgtgtatcgggcctttctccagtacctctatacagatactgttgatcttcctcccgaagatgccattgggttgcttgatttggcaacctcgtattgtgagaatcgtttgaaaaagttatgtcagcacataatcaaacgtggcatcacggtcgagaatgcattctctttgttcagcgcagccgtgcggtacgacgctgaagacttagaggagttttgcttcaaattttgcataaatcacttgaccgaggtcacccaaaccgcagccttttggcagatggatggcccactcctcaaagaattcattgccaaagcttccaagtgcggggcctttaagaattag

SEQ ID NO: 132045 - DNA, 1596 bp, synthetic construct
  misc_feature 1..1596: note = Description of Artificial Sequence: Synthetic coding sequence
  source 1..1596: mol_type = other DNA
atggttgacgtgggtaagtggcccatttttaccctcctgagtccgcaggagatcgcttccattagaaaggcatgcgtgttcggcacctctgcgtctgaggccctatatgtgactgacaacgatgaagtgtttgtgttcggcctgaactattctaattgcctcggtactggagacaaccagagcacactcgttcctaagaagctggaaggcctgtgcgggaagaagatcaagtccctctcgtacggtagcggcccgcatgttctgttgtccactgaggatggagtagtttacgcttggggccacaatggctacagccagctgggtaatggaacaacaaaccaggggattgccccagtccaggtatgcacaaaccttctcatcaagcaagtggtggaggtggcctgcgggtcccaccactccatggcattagctgccgatggcgaagtgtttgcttggggctataacaattgcggacaggtcggctcaggatcgacagccaatcagcccacccctagaaaagtaacaaactgtctgcacataaagagagtggttggtatcgcttgcggccagacaagctccatggctgtgctcgacaatggggaagtgtatggatggggttataacggcaacggccagctggggctgggcaataatggcaaccagctgacccccgtgcgcgtggcagccctgcattctgtgtgcgtgaatcaaatagtttgtggatacgctcacactctcgctcttacagacgaaggcctgctgtacgcttggggggctaacacatacggccagctgggcacgggaaataaaaacaatctcctgtctcctgcgcacataatggtggaaaaagaaagagtcgtggaaatcgcagcatgccactctgcccacacatccgcagccaaaacccagggaggccatgtctatatgtggggacagtgccggggccagtccgtgatcctgccgcatctgactcacttcagctgtaccgatgatgtttttgcatgctttgctacaccagccgtctcttggaggttactttctgtcgagcacgaagatttcctgaccgtggccgaatctctcaagaaagagtttgattcccctgagaccgctgacctgaagtttagaatagacggaaaatacatccacgtgcacaaagctgttctgaaaatccgatgcgagcattttcgctccatgttccaatcttactggaacgaagatatgaaggaagtgatcgaaatagaccagtttagttacccagtgtaccgggctttccttcagtatctctacaccgatacagttgatcttcctcccgaagacgccatcggactgctcgacctcgcaacttcctactgcgaaaatagactgaagaagctgtgtcaacacataatcaagcgaggaattaccgttgaaaatgcattctctcttttcagtgcagccgttagatatgacgcagaggatctggaggagttctgcttcaagttctgtatcaaccacctaaccgaagtgacgcagacagcagccttttggcagatggatggtccgctgctgaaagagtttattgctaaagccagtaagtgcggtgcatttaagaattag

SEQ ID NO: 132046 - DNA, 1068 bp, synthetic construct
  misc_feature 1..1068: note = Description of Artificial Sequence: Synthetic coding sequence
  source 1..1068: mol_type = other DNA
atggtggatgtggggaagtggcccatcttcaccctccttagcccgcaggagattgctagtattcgtaaagcatgtgtctttgggacgagtgcgtctgaagctctgtatgtcaccgacaatgacgaagtgtttgtgttcggtcttaactacagtaactgcctgggaacaggtgacaaccaatcaaccctcgtcccaaagaaactcgaaggtctctgtgggaagaaaattaaatccctcagctatggttctgggccgcacgtgctgcttagtacagaagatggtgtggtgtacgcctggggacataacgggtacagccaactggggaatggaaccacgaatcagggcatcgctcccgttcaagtctgcaccaatcttctgatcaagcaggtggtcgaggttgcttgcggctctcatcactcaatggctttagccgcggacggagaggtattcgcctgggggtataacaactgtgggcaagttggttcaggatctacggctaaccagcccaccccacggaaggttactaattgtctccatatcaagcgcgttgttggaattgcgtgcggccagacctcctccatggccgtgctggataatggggaagtgtatggttgggggtacaatggcaatggacagctcgggctcggaaataacggaaaccagctcacacccgtcagggtggctgcacttcactctgtgtgcgtgaatcagatcgtttgtggctacgctcacaccttggccctgacagatgagggcctcttgtatgcatggggcgccaatacctatggtcagctgggaactggaaataagaacaacctactgtctcccgcccacataatggtggagaaagagcgggtagtggagatagctgcctgtcacagcgcccacacatcagcagcaaagacgcagggcggccacgtgtatatgtgggggcaatgtagaggccagtcggttatcttaccacacctgactcacttttcatgcactgacgatgtttttgcttgttttgctacaccagctgtgagctggaggctgctgagcgtggtgtcaatagtcatcggtaaatag

SEQ ID NO: 132047 - DNA, 1656 bp, synthetic construct
  misc_feature 1..1656: note = Description of Artificial Sequence: Synthetic coding sequence
  source 1..1656: mol_type = other DNA
atggaggaggaactcccactgttctccggcgattctggaaaacctgtacaagccacactctccagcttgaagatgctcgatgtaggaaaatggcccatattttctctgtgtagtgaagaagagctgcaactaatacgccaggcttgcgtgtttggaagtgcaggtaatgaggtgttgtacaccacagtgaatgatgaaattttcgtgttaggaaccaattgctgcgggtgcctgggcttaggggacgttcaaagtacaatagagccgagacgccttgactctctgaacggcaaaaagattgcctgtctaagttatggatcaggccctcacattgtgctggcaactacggagggcgaggtgtttacctggggtcataatgcatattctcagcttgggaacggcactaccaatcacgggctggtcccctgtcatataagtaccaatctgtcaaataagcaagtcatcgaagtggcctgtgggagctaccactcactcgtactgactagtgatggggaagtattcgcttggggctacaacaattcgggccaagtgggaagcgggtcaaccgtcaaccaacccattccgcggcgtgtcacaggatgtctgcagaataaggtggttgtgaccatcgcttgcggccaaatgtgctgtatggcggtagttgacactggggaggtgtacgtatggggctacaacggaaacgggcagctcggattgggcaacagtgggaatcagccaacaccctgccgggtcgcggctttacagggcattcgggtgcagagagtagcgtgcggctatgcccacaccctggtcctgaccgacgaagggcaggtttatgcatggggcgctaacagctacggccagttgggaaccggcaacaagagcaatcagagttatccaaccccagtgacagtcgagaaagaccgtattatcgagatcgcagcgtgccactcaacacacacatccgcggcgaagacccaggggggtcacgtatatatgtgggggcagtgcagaggtcagagcgtcatactgccacacctgacccacttcagctgtacagacgatgtgttcgcttgtttcgccacacccgccgttacctggaggctgctgagcgtcgagcctgatgaccaccttacagtggcggaaagcctgaaacgggaattcgacaatcccgataccgccgatctgaagtttttagtggatggtaaatacatctatgctcacaaggtgcttctgaaaatcaggtgcgaacactttcgctccagcctagaggacaatgaagatgacattgtggagatgagcgagttttcttatccagtatacagggccttcctggaatatctgtataccgactctatatccctatccccagaagaggctgttgggctgctggacctggccaccttttatagggagaatagactgaagaagctgtgtcagcagacaattaaacagggaatctgcgaggaaaacgctatagctctgctctcggctgctgttaaatacgacgcccaggatctggaagagttctgctttcggttttgcatcaaccatctgaccgtggtaacccagacttccgggttcgcagagatggaccacgatttgctaaaaaacttcatctctaaagcgtcccgcgttggcgcattcaaaaattag

SEQ ID NO: 132048 - DNA, 1671 bp, synthetic construct
  misc_feature 1..1671: note = Description of Artificial Sequence: Synthetic coding sequence
  source 1..1671: mol_type = other DNA
atgagcgcccttccccgagatctggagctgagcaatcccagagaaaagctgacaaagccggtacaagctaccttgtcctcattaaaaatgctcgatgtggggaagtggcctatttttagtctgtgctccgaagaggagctacaattgatcagacaggcgtgcgtgtttggctctgcagggaatgaagtgctgtacaccacagtgaacgatgaaatcttcgtgctcgggacaaattgctgtggttgcttaggcttgggtgacgtacagtccacaatcgaaccccggaggttagactcactgaatgggaaaaaaatcgcatgcctgagctatggatccgggccccacattgtccttgccaccaccgaaggcgaagtgtttacatggggccacaacgcttactcacagctcggaaacggaaccacgaaccatggcttggttccctgccatatctcaaccaatctgagcaacaagcaggtgatcgaagtcgcatgcggatcataccacagtctcgtcctcacctctgatggtgaggtgtttgcatggggctacaataactctggacaggtggggagtgggtccactgtcaaccagcccatccctagacgggtgaccggctgcctgcagaataaagtggtggtgaccattgcttgtggacagatgtgctgcatggctgtggtggataccggggaggtgtatgtgtggggctacaacggcaatggacagttgggtctaggcaactccggcaaccagcctacgccctgcagggtcgccgctctgcagggcattagagtccagagagtagcgtgcggctatgctcacactctcgtgctgactgacgaaggccaggtctacgcgtggggtgccaactcttacggacagttgggcaccggaaacaaatctaaccagagctaccctactccagtcactgtggagaaggacaggatcattgagatcgcggcatgccacagcacccacacttcagctgcaaaaacacagggtggccacgtctacatgtggggtcagtgccggggacagtcagtgattttgccacatctcacgcatttctcctgcaccgacgacgtgttcgcctgctttgccaccccagccgtaacctggcgactgctctccgtggagcctgacgaccatctcaccgtagcagaatcccttaaaagagaattcgataatcccgacactgctgacttgaaatttttagtggacggaaaatacatatacgcacacaaagtcttactgaaaattaggtgcgagcatttccgatcttccctggaagacaacgaggacgatatcgtggagatgagtgagttttcctacccagtgtatagggctttcctcgaatatctttatacggactcaatttcactgagccccgaggaggccgtggggctgcttgacctggcaacgttttaccgggagaatcgcctaaaaaaattgtgccaacagacgattaagcaggggatctgcgaagaaaacgcgatcgcattattgtctgcagccgtgaaatatgacgcgcaagatttagaagaattctgcttcaggttctgcattaatcaccttacggttgtaacacaaaccagcggttttgccgagatggaccacgacctgctgaaaaacttcatttctaaggctagtcgcgtgggagcctttaagaattag

SEQ ID NO: 132049 - DNA, 1512 bp, synthetic construct
  misc_feature 1..1512: note = Description of Artificial Sequence: Synthetic coding sequence
  source 1..1512: mol_type = other DNA
atgctgcaggacggcagctgtaagcagatgctgctgatgctactgatcgtacagcccgttcaagcgactctctcttcactgaaaatgcttgacgttgggaaatggcctattttttccctgtgcagcgaggaagaactgcaactgatccggcaagcatgcgtgttcggaagtgctggaaacgaagttttatacactacagtcaatgacgagatctttgttttaggcacaaactgctgtgggtgtcttgggcttggagatgtgcagagtaccattgaacccagaagactcgacagtctgaacgggaagaagatcgcctgtctcagttatggcagtggtcctcacatcgtgctggcaactactgagggagaggtcttcacatggggacataacgcttacagccagctgggcaacggaacaaccaatcacgggctggtaccctgtcacatttctacaaacctgagcaataagcaagtaatcgaggtggcgtgtggttcctatcacagtctagtcctgacaagcgacggagaagtctttgcttgggggtacaataactccgggcaggttggctccggctccaccgtcaatcagcctatcccacgtcgggtcaccggttgccttcagaacaaggtcgtagtcacaattgcctgcggacagatgtgttgcatggccgttgtggatactggagaggtatacgtgtggggttacaatgggaacggccagttaggactggggaacagcggcaatcaaccaacgccttgtagagtggcagcactccagggcattcgggtgcagcgagtggcttgcgggtatactcacactagcgccgccaagacgcagggggggcacgtgtatatgtgggggcagtgccgcggccaaagtgtgattctccctcatctcactcattttagttgtactgacgatgtgttcgcctgcttcgccactcccgccgtgacctggcgtctgctttccgttgaaccagacgatcacctgacagtggctgagtcactaaaaagggagttcgataatcccgacaccgcggatctgaaattcctggtcgatgggaagtatatatacgcccataaggtgttgctgaaaatcaggtgtgagcacttcaggagtagcctcgaagacaatgaggacgacatagtagagatgagtgagttctcttacccggtgtaccgggcgttcctcgaatatttgtacactgactcaatcagccttagtcctgaagaggcagtgggtctgctggatctcgccactttttatagagagaacagactcaagaagttgtgtcagcagacaatcaaacaaggcatatgtgaagagaacgccattgccctcctgagtgctgcagtcaagtatgacgcccaggacctcgaggagttctgctttaggttctgtatcaatcatctcacagtcgttacccagacatctggcttcgccgaaatggaccacgacctcctcaaaaactttattagtaaagccagtcgggtgggagccttcaaaaactag

SEQ ID NO: 132050 - DNA, 1671 bp, synthetic construct
  misc_feature 1..1671: note = Description of Artificial Sequence: Synthetic coding sequence
  source 1..1671: mol_type = other DNA
ccctgtagcaatcgctacccgggcgggggcgctgacaaagctccagcttgcgaagagcccgtccaggcaactttgtcgagtctcaagatgctcgacgttggcaagtggcctatcttctccctctgtagtgaggaggagcttcagctgattaggcaagcatgtgtcttcgggagcgcggggaacgaggtgctgtatactaccgtgaacgatgaaattttcgtgctgggcacaaattgctgtggttgcctaggactcggcgacgtgcagtctacaatcgaaccccgaagactcgattcactgaacggaaagaaaatagcctgcctgagttacgggagtggccctcacatcgtgctggccactaccgagggggaggtattcacttggggccataacgcctattcacagctgggcaacggaaccacaaaccatggtctggtcccttgccacatcagcaccaacttaagcaacaaacaggtgattgaagtcgcttgtgggtcataccacagcctagtcctgacatcagacggcgaggtgttcgcgtggggctataacaacagcggccaggtcgggtcaggatctacggtgaatcagccaatccctcgacgagttaccggatgtcttcaaaacaaggttgttgttaccatcgcctgtggacaaatgtgttgcatggccgtggttgacactggagaggtctacgtatggggctataacgggaatggccagctcggtctgggaaactccggcaaccagcccacgccctgcagagtcgctgccctgcagggaattcgggtacaacgtgtggcctgcgggtacgctcatacgctggtgcttaccgatgagggccaggtatacgcgtggggagccaattcttatggccagctgggaacaggcaataagagtaaccagtcttatccaactccagtaaccgtggaaaaggaccgcattatcgagatagctgcctgtcattcaacacatacatcagcggcaaagacccaggggggccacgtctatatgtgggggcagtgtagaggccagtccgttatactaccccacctgacacatttctcttgtacagatgacgtgttcgcctgtttcgcaacacctgccgttacgtggcgattgctcagtgttgagcccgatgaccaccttaccgtggccgaatcattaaaacgcgaattcgataatccggatactgccgatcttaagtttttggtggatggcaaatacatttacgcgcataaagtgctgcttaaaattcgctgcgagcacttccgctcgagcctagaggacaacgaggatgatatcgtagaaatgtcggaattctcttatcctgtttaccgcgctttcttggagtacctgtacactgacagtattagtttgagtcctgaggaggcagttggtctcctagatctggctacattctacagagagaataggttgaagaaactgtgccagcagaccattaagcaggggatttgcgaggagaacgcaattgcccttctgagtgctgctgttaagtacgatgcacaggatctggaggagttttgcttccgtttctgcattaaccatctgactgtagtgacgcagacgtctggattcgccgagatggatcacgatcttcttaagaatttcatttcaaaggctagcagagttggtgcatttaagaactag

SEQ ID NO: 132051 - DNA, 834 bp, synthetic construct
  misc_feature 1..834: note = Description of Artificial Sequence: Synthetic coding sequence
  source 1..834: mol_type = other DNA
atgtctggcgtgactactgaaacaggtagtttggattctgcaacagtagcaactagccagcctctggcagaatggcagctgtgtaaagcctcagtgtcacgaggaattatcgaaatcgctgcttgccacagtacacatacatctgctgctaaaacacagggtggacacgtatacatgtggggccagtgtagaggacagtcagtgatcctaccacatctgacacacttttcttgtacagacgatgtctttgcctgctttgccaccccagctgtgacgtggaggctcctgtcagtcgaacctgacgatcacctgactgtggccgagtctctaaaacgcgaattcgacaatccagatacagcggaccttaaattcctggttgacgggaaatacatatacgcacataaggtcctcctcaagattagatgtgaacatttccgctcatctctcgaagacaacgaagacgacatcgtggagatgtcagagttctcctatccagtgtacagagccttcctggaatacctctacacagacagcatctctctgtctccggaggaagcagtcggactgctggatctggctacattctacagagagaacagacttaagaaactctgccagcagaccattaagcaaggcatttgtgaggaaaatgccatcgccctgctgtctgctgctgtcaagtacgacgcccaggatctggaggaattctgttttcgtttttgcattaaccaccttactgtcgttacccagacatccggctttgcggagatggatcatgacctactcaagaactttatctcaaaggcttcccgcgtcggagctttcaagaattag

SEQ ID NO: 132052 - DNA, 846 bp, synthetic construct
  misc_feature 1..846: note = Description of Artificial Sequence: Synthetic coding sequence
  source 1..846: mol_type = other DNA
atgttagatgtgggcaagtggccaatatttagtctttgtagcgaggaagagctgcagctcattcgacaggcatgtgtctttgggtcagccggcaatgaggttttgtatacgacggttaacgatgaaattttcgtgttgggaaccaactgctgcggttgcctgggactcggagatgtgcagagtacaatcgaacctcgtcgactcgacagtctcaatggaaagaagattgcttgcctgtcttacggatccggacctcacatcgttctggcaaccacagaaggcgaggtttttacatgggggcacaatgcatactcacaacttgggaatggaacaaccaaccacgggttagtcccgtgccatatcagcactaacctctctaataaacaggtgatcgaagtggcgtgcggcagttaccacagtctggtgctgacttccgacggagaagtctttgcctggggctacaacaactccggccaggtcgggagcgggtccacggttaatcagcccataccaagacgagtgactggctgcctgcagaacaaggtggtggtcacaattgcctgcggccagatgtgctgcatggccgtagtcgacacaggggaagtgtacgtttgggggtacaatggcaacggccagttgggcttgggtaactcgggaaatcaacccactccatgccgcgttgcagctctacaaggtattagagtgcagagggattaccgcgattgcagtctgtccctgcacactcacgtgtgcggtcaggatgccggttgggccagggtacatgttggcccagtgccaggtagcgtgagggacccaccagctccacaccccttgctgctgcactag

SEQ ID NO: 132053 - DNA, 1359 bp, synthetic construct
  misc_feature 1..1359: note = Description of Artificial Sequence: Synthetic coding sequence
  source 1..1359: mol_type = other DNA
atgtcaccaaagcgcatcgcgaagaggcggtctccccctgcagatgcgatccccaagtccaaaaaagtgaaagatacccgggctgctgcttcgagacgcgtccctggggccagaagttgtcagggtgcatgtgggccttccccacctgatcagaagactagaccggtctcacacaggtcgcacagcacggagccaggactggttctgacacttggccaaggggatgtgggccagctgggtctcggggagaacgttatggaacggaaaaagccagcactggtgagtatcccggaggacgtcgtccaggccgaggccgggggtatgcacaccgtgtgcctttccaaatctggacaggtctattctttcggctgcaacgatgagggggccctcggccgggatacatccgttgaggggtctgagatggtgcctggcaaagttgagctccaggaaaaggtagttcaggtctccgccggcgactctcacactgccgcactgacggatgatggccgcgtattcctctggggcagtttcagagacaacaatggtgtcatagggctgctcgagcccatgaaaaaatccatggtgcccgtgcaggttcagctggatgtgcccgttgtgaaagtggcctctggtaacgaccacctggtcatgctgaccgccgacggcgatttatatacgttaggatgtggcgaacagggacagcttggtcgtgtgcctgagttatttgccaatcgcggcggtcggcaggggctcgagcgattgctggtccccaagtgcgtgatgctgaaatcccggggatctagaggccatgtaagattccaggatgccttctgtggggcatatttcacatttgcaatatcccatgaaggccatgtgtatggctttggtctttccaattatcatcaattgggcacacccggcacagaatcctgtttcattccgcagaacctaacgtcattcaaaaattcgaccaaaagctgggtgggatttagtggtggccaacatcacacagtgtgtatggatagcgagggcaaagcgtactcactgggccgcgctgagtatgggcggctcggcctcggtgagggcgctgaggagaaaagtatccctactttaatctcacgcctcccagctgtttcatctgtggcctgcggggcctcagtcggctacgccgtaactaaagatgggcgggttttcgcctgggggatggggacgaattaccagctagggactggtcaggacgaggacgcatggagcccggtagaaatgatggggaaacaactcgagaacagggtcgttttatccgtgagctctggagggcaacacacagtcctgttagtcaaggacaaagaacagagttag

SEQ ID NO: 132054 - DNA, 1266 bp, synthetic construct
  misc_feature 1..1266: note = Description of Artificial Sequence: Synthetic coding sequence
  source 1..1266: mol_type = other DNA
atgagccctaaacggatcgccaagcggagatctccccctgcggatgcaatcccaaagtccaagaaagtgaaagtgtctcatcgctcccactctacagagccggggttagtactgacgctggggcagggagacgtgggtcaactcggactcggcgagaacgtgatggagaggaaaaagccggcccttgtgagtattccagaggacgtggtgcaagccgaggccgggggtatgcataccgtctgcctaagcaaatccgggcaggtctactcatttggctgtaatgacgagggggcgctgggaagagacacgagcgtcgagggctcagagatggtgcctggtaaagtcgaactccaagaaaaggtggtgcaggtgagcgccggagacagccataccgcagccctaacagatgatggccgggtctttttatggggatcgttcagagacaataacggggtcatcgggctcctcgagcccatgaaaaaatctatggtgcctgtgcaggtgcaacttgacgttccagtggtgaaggtcgctagcgggaatgatcatctggtgatgctgaccgcagacggagacctgtacaccctgggctgcggtgaacagggccaactgggtcgcgtcccagagctgtttgcaaatagggggggacgccaggggttagaacgcctactggtacccaaatgcgtaatgctgaagtcccggggtagcagaggtcacgtgcggtttcaagacgctttctgtggcgcgtacttcaccttcgcaatttcccacgaaggtcacgtctatggtttcggtctaagcaactatcatcagctcggcactcctggcacagagtcgtgcttcattccgcagaaccttacaagctttaaaaacagcactaagtcttgggttggattctcaggagggcaacaccatactgtttgcatggattctgagggaaaggcgtactccctggggcgcgctgagtatggccgcctggggttgggcgaaggcgccgaggaaaaatccattcctaccctcatttcaaggcttccggccgttagtagtgtcgcatgtggagcctccgtgggctatgctgttaccaaagacggaagggtgttcgcttggggaatgggaacaaattaccagctgggaacaggacaggatgaggatgcctggagtcctgtggaaatgatggggaagcaactggagaaccgggttgttctgagcgtatctagcggaggacaacatactgtgcttctggtcaaggacaaagagcagagttag

SEQ ID NO: 132055 - DNA, 1266 bp, synthetic construct
  misc_feature 1..1266: note = Description of Artificial Sequence: Synthetic coding sequence
  source 1..1266: mol_type = other DNA
atgagccctaaacgcatagcgaaacgacgctccccacctgctgacgccatcccaaaatctaaaaaggtgaaggtgagccatagatcccatagcacagagcctgggctggtcttgactctaggccagggagacgttgggcagttaggattaggggagaacgtcatggagcggaaaaagccggctttagtctctattcctgaggatgtggtgcaggcagaggccggcggaatgcacaccgtgtgtctctccaaatccggccaggtatactctttcggctgcaacgacgaaggagctctgggcagggacaccagcgtcgagggcagtgagatggtgccgggaaaggtagaattgcaggagaaggtggtccaggtgtctgccggggattcgcataccgctgcattgaccgatgacggaagggtgtttttgtgggggtcttttagggacaataacggagtgataggcctgctggagccaatgaagaaatcaatggtaccggtacaggtgcaattggatgtcccagttgtgaaggtagcttcgggaaacgatcacctcgtcatgctgaccgcagacggggacctctacacactcggctgtggcgaacaggggcagctgggacgagtgccagaacttttcgccaaccgtggggggcgccaggggctcgagaggctgctcgtgccaaagtgcgttatgctgaagagccgagggtcaaggggccacgtccgtttccaagatgccttttgtggggcctatttcacattcgctatttcccacgaaggtcacgtctatggtttcggattatctaattaccaccagctgggaaccccaggcacagaaagctgcttcatcccccagaacttgaccagctttaagaattctaccaaatcttgggtgggcttctccggggggcagcaccacaccgtatgtatggattctgagggcaaagcatacagtctggggagagctgagtatggaaggctcggcctgggcgaaggcgctgaagaaaaatcaattcccacactgattagcagactcccagcagtcagttccgtggcatgcggagccagcgtgggctacgctgtgacgaaggacggtagggtgttcgcctggggtatgggaaccaactaccagctgggtaccggccaggacgaggacgcttggagtccggttgaaatgatggggaaacagctggaaaatagggttgtcctttctgttagctccggtggacagcatacagtgctattggttaaggataaagaacagtcatag

SEQ ID NO: 132056 - DNA, 1266 bp, synthetic construct
  misc_feature 1..1266: note = Description of Artificial Sequence: Synthetic coding sequence
  source 1..1266: mol_type = other DNA
atgtcacctaagagaattgctaaaaggcgatctcctcctgctgatgcaattccgaagagtaagaaagttaaggttagtcatagaagtcacagtacagagcccggacttgtacttacacttggtcagggggatgtcggacagctgggcctgggagagaacgtcatggagagaaagaagcccgccctagtatccatccctgaagatgtcgttcaagcagaagctggtggaatgcataccgtatgcctgagcaaaagcggccaagtctacagctttggttgcaatgatgagggggctctcggccgcgatacatccgtcgaaggaagcgaaatggtgcctggcaaagtagaactccaagagaaagtcgtacaggtgtcagccggtgatagccacacagccgcactgaccgacgacggacgggtttttctctggggatcatttcgcgataacaacggggtaataggattacttgagcctatgaagaagtccatggtgcccgtacaagttcaactggacgttcccgtggtgaaggtggcctcaggcaatgatcatctcgtaatgttaacagcagatggggatctctacactctggggtgtggcgagcaggggcagttgggaagggtgccagaactcttcgctaatagaggcggtagacagggacttgaacggttgttggtgccgaagtgcgtcatgcttaagagtagaggcagccgagggcacgttcgttttcaggacgcattctgcggcgcttacttcacgttcgctatatctcatgagggacacgtgtacggcttcggactatccaactaccaccagttggggacgcccgggaccgagagctgcttcattccccagaacctgacctccttcaaaaacagcacaaagtcgtgggtaggattctcaggggggcagcatcacacagtgtgcatggattccgagggcaaagcctacagcctgggtcgggcggaatacggccgcctgggcctgggcgaaggagctgaagaaaagtcgatccccacactaatttcacgccttcctgctgtttcatctgttgcgtgcggggctagtgtagggtatgccgtgactaaggacggaagagtattcgcgtggggcatgggtacaaattatcaacttgggaccggacaggatgaggatgcctggtcacccgtggagatgatgggcaaacaacttgaaaaccgcgtggtgctgtccgtgagctccggtggccagcacaccgttctcctggtcaaagataaagaacagagctag

SEQ ID NO: 132057 - DNA, 693 bp, synthetic construct
  misc_feature 1..693: note = Description of Artificial Sequence: Synthetic coding sequence
  source 1..693: mol_type = other DNA
atgtcccctaagagaatcgctaagcgaagatccccaccagcggatgctatcccaaagagcaagaaggttaaggtgagccaccgtagccatagcaccgagccgggtttggtgttaacactgggtcagggagacgtaggccaactgggcctaggtgagaacgtgatggagcgcaaaaaacctgcactggtgagcattcctgaggacgttgtgcaagctgaggccggcggcatgcataccgtgtgcctgtcaaagagcggccaggtgtactcattcggatgcaatgatgagggcgccctggggcgagacacttctgttgaagggagcgaaatggttccaggaaaagtggagctgcaagaaaaggtggttcaggtgagtgctggtgacagccataccgctgcgctcaccgacgatggacgggtgtttctctgggggtcctttagggataataacggagtgattgggctcctcgaacccatgaagaagagcatggtccccgtgcaggtgcagcttgatgtccctgtggtgaaggtggcctccggcaatgatcatctagtgatgttaacggccgacggggatctgtacaccctaggctgcggcgagcagggtcaactggggagggtgcctgaattgtttgctaacaggggaggcagacagggcctggagcgccttctggtgcctaagtgcgtaatgtag

SEQ ID NO: 132058 - DNA, 852 bp, synthetic construct
  misc_feature 1..852: note = Description of Artificial Sequence: Synthetic coding sequence
  source 1..852: mol_type = other DNA
atgtcgcctaaacgtattgccaagcgccgcagcccccccgctgatgcgattcccaaatcgaagaaggtgaaagtgagtcataggtcacattctactgaaccagggttggttctcaccttgggtcagggagatgttggtcagctgggcctgggtgagaacgtaatggagcgaaaaaagcctgcactcgtgagtatccctgaggacgtggtgcaggccgaagccggcggtatgcatactgtatgcttgagcaagagcggacaggtctacagttttggttgcaacgatgagggcgcactcggccgggacacgagcgtggagggctctgaaatggtccccgggaaagtcgaactgcaggagaaggtcgttcaagtctccgcgggagacagccacacggcagccctgacggacgacggccgagtcttcttgtggggaagcttccgcgataataatggggtaattggcctgctggagcccatgaagaaatccatggtgcctgtgcaggtacagttagatgtcccggtggtcaaagtagccagtggcaacgatcatctggtgatgttaactgccgacggcgatctctacacactcggctgcggcgagcagggtcaactagggcgcgtgccagagctgttcgcaaataggggaggaagacagggtctggagagattactggtgcctaagtgcgtgatgctgaagtcgaggggttccaggggacatgtccggttccaagacgccttctgtggagcttacttcacatttgctattagtcacgaagggcatgtgtatggtttcggactgtctaattatcatcagctcggaacccctggaaccgaatcctgttttattccatag

SEQ ID NO: 132059 - DNA, 708 bp, synthetic construct
  misc_feature 1..708: note = Description of Artificial Sequence: Synthetic coding sequence
  source 1..708: mol_type = other DNA
atggccagagaagaatgcaaggcattgctggatggcctcaataagaccacagcgtgctaccaccatctggtgctgaccgtgggtggttctgccgactcccaaaacctgcgccaggagctacagaaaacgcggcaaaaagctcaggagctggcagtcagtacctgcgcgcggcttacggcggttctgagggataggggtctggcagccgacgagcgcgctgaatttgagcgactctgggtagcattctcaggctgtctggacctgctagaggccgacatgcgcagagcccttgaattgggggctgcgttcccactgcacgcccctagaagacctctggttagaacaggggttgccggcgcctcgtccggggtggccgctcgggctctatccactaggtcacttcgcctggaggcagaaggcgattttgacgtagccgacctccgagaactcgaacgggaagtcctgcaagtgggcgagatgatcgataacatggaaatgaaggtgaacgtccctaggtggactgtccaggcccgccaggcagcaggcgctgagctgctgtctaccgtttctgcaggccccagttctgttgtttcccttcaagagagggggggagggtgcgacccacgtaaagcccttgcagcaattctatttggagcagtactattggctgcagtggctctggccgtctgcgttgccaagctgagctag

SEQ ID NO: 132060 - DNA, 630 bp, synthetic construct
  misc_feature 1..630: note = Description of Artificial Sequence: Synthetic coding sequence
  source 1..630: mol_type = other DNA
atgcgcgcagccgctattagtaccccaaagctcgacaagatgccagggatgtttttcagcgcgaatccaaaggagttgaagggaacgactcactcattgctggatgacaaaatgcagaaacgtcgccccaagaccttcggaatggatatgaaggcctatctgagatctatgatcccccatctggagtcaggcatgaaatcctctaagtccaaggacgtgctgagtgccgctgaggtcatgcagtggtctcagtcgttagagaaactcttggcaaaccagaccggacagaacgtctttggtagcttcctgaagtcagagttctcggaagaaaatatcgagttctggctggcctgtgaagattataaaaagactgaaagcgatttgctgccttgcaaggccgaagagatttacaaagcgtttgtgcacagcgatgctgctaaacagattaacatagacttccggactcgagagagcacagccaagaagatcaaggctccaactcccacctgcttcgatgaggcgcagaaggttatctacacactaatggaaaaagacagctatcctcgattcctcaagagcgacatctacttaaatttgttgaatgacttacaagctaactcattgaagtag

SEQ ID NO: 132061 - DNA, 1044 bp, synthetic construct
  misc_feature 1..1044: note = Description of Artificial Sequence: Synthetic coding sequence
  source 1..1044: mol_type = other DNA
atgccagggaagccaaaacatctgggtgtgccaaatgggagaatggtattagcagtgtctgatggcgaactctctagtacaactgggcctcaaggccagggagaagggaggggctccagcttgtctattcactccctccccagcggtccatcttctccattcccgactttcgtgtcatcaaaatctgagagtcatagaaagagccttggcagtaccgagggagagtctgaatccaggcccgggaaatattgttgcgtttaccttcctgatggtactgccagtcttgccctcgctcgaccagggctgactatacgcgatatgctcgctggcatatgcgagaaaaggggcctgtctctgccagacataaaagtgtatctggtggggaatgaacagaaagccctggtcttggatcaggactgtacagttctggccgatcaagaggtgcgccttgagaatcgaataacattcgagctcgagctgacggcgcttgaaagggtggtgcggatctctgccaagccaacaaagaggttgcaggaggccctgcagccgatcctcgaaaaacacggcctgagtccccttgaggtggtgctgcatcggccaggcgaaaagcagcccctggacctcggcaaactagtgtcctcggttgccgcccagagactcgtcttagacaccttacccggtgtgaagatatcaaaagctcgtgataagagtccttgccggtcacagggctgcccccctcgaacccaggacaaagccacccatcccccgcctgcatcgcccagctctctcgtcaaggttccctccagcgcaacaggaaaacggcagacctgcgacatcgaaggactggtggagctccttaaccgggttcagagttccggcgcccatgatcagcgcggacttctaagaaaggaagacttggttctgccagagttcttgcagttaccggctcagggaccaagctccgaagaaacacctccgcagaccaagagcgccgcgcagccaatcgggggcagcctgaattctaccacggactctgctttgtag

SEQ ID NO: 132062 - DNA, 1701 bp, synthetic construct
  misc_feature 1..1701: note = Description of Artificial Sequence: Synthetic coding sequence
  source 1..1701: mol_type = other DNA
atgccaggtaaacctaagcatctaggtgtgcccaacggccggatggtgctcgctgtctcagatggggaactttcatccacaactgggccccaggggcagggagagggtaggggtagtagtttgtctattcactccttgccctctgggcccagcagccccttcccgacagaggagcagccggtagccagctgggcgctatcgtttgagagactgctgcaggacccactgggccttgcctatttcacagaattccttaagaaggagttctctgcagagaatgtcaccttctggaaagcatgcgagaggtttcagcagatacctgctagcgatactcagcagcttgcccaagaagcccgcaatatttaccaggaattcctgagcagccaggctctgagcccagtcaatatcgacaggcaggcatggcttggagaggaagtgttagcagaaccaagacccgatatgttccgggcccagcagttgcagatattcaatctgatgaaatttgacagttatgcccggttcgtcaaaagcccactgtaccgagagtgtcttctggcagaagctgaaggaagacctcttagggaaccaggctcttctaggctgggctccccagacgctacgaggaaaaagcccaagctgaagccagggaaatctctaccactaggcgtggaagagttgggccaactccctccagtggaggggcctggcggaagacccctgcggaagtccttccgccgcgaactgggaggaacggcaaacgcagccctgaggcgagaatcccagggtagtcttaacagctccgctagcttagatctggggttcctagcttttgtgtcttccaaaagtgagtctcacagaaaatctctcggtagcactgagggcgagtctgagagtcgcccagggaagtattgttgtgtgtatctgcctgacggaactgctagtctcgcactggcgaggcctggcctcacaatccgggatatgctggcaggtatctgtgagaaacgaggcttaagtctgccagatatcaaagtgtaccttgtggggaatgagcaggcacttgtcctggaccaggactgtaccgtccttgccgatcaggaggtccgactggaaaatcgcatcactttcgaactggagctgaccgctctcgagcgagtggtgcgaattagcgccaagcccacaaagcgtctgcaagaggctctgcagcctatccttgaaaagcacggacttagcccactcgaagtcgttctgcatcgtcctggggagaagcaacctttggacctggggaaactggtgagtagcgtggcggcacaaagactcgtgctggatacactcccaggtgtaaaaattagcaaagcccgcgacaagtctccttgtcgctcccaagggtgtccacctaggacccaggacaaagctacccaccctccacccgcttcaccatctagtctggtgaaggttccgagtagtgccacaggtaaacgccagacctgtgacattgaggggctcgtcgagctgctgaacagagtgcagagtagcggcgcccatgaccagcgcggcctgctcaggaaagaagaccttgtgctgcctgaattcctgcaactccccgcccaaggcccttcatcagaagaaacaccaccacaaactaaaagtgcagctcaacctatcggcgggtcgcttaacagtaccactgattccgctttgtag

SEQ ID NO: 132063 - DNA, 1314 bp, synthetic construct
  misc_feature 1..1314: note = Description of Artificial Sequence: Synthetic coding sequence
  source 1..1314: mol_type = other DNA
tagagtcccgtgaacatagatagacaggcctggctgggcgaggaggtcctcgctgagccccgccccgacatgttccgggcccagcagttacaaatattcaatttaatgaagtttgactcatatgccagattcgtaaagtcccccctttacagagaatgcctgctggcagaggccgagggtcgccctctgagagagccgggctcctcccgactaggctcccctgacgcgacgcgaaagaaacccaagctgaaaccaggcaagagcctgccactgggcgtggaagagctgggacagctgccacccgtcgagggccccggcggaaggcccttacgtaagagcttccgcagggagcttgggggcacagctaacgctgcactgcggagggagagtcagggatctctgaattcatccgcaagccttgacttgggtttccttgcctttgtctccagcaagtctgagtcccatcggaaaagtttaggcagcacagaaggagagagtgaatctcgccccggaaaatattgttgtgtgtatctgcccgacggtaccgcctcacttgccctggctcgccctggcttgactatcagagacatgctcgctggaatttgcgagaagagaggcctcagtctgcctgacattaaagtctatctcgtggggaacgagcagaaggctctcgtactggaccaggactgcacggtgttggcggaccaagaagtgcggctggagaacagaattacattcgagctggaactgacagcccttgagagagtggtgcgaatatctgccaaacccacgaaaagattgcaggaagcattgcagcccattctagaaaaacacggtttaagtccactggaggtagtgctgcatcgcccgggggaaaagcaaccattggatttgggcaagttggtcagtagtgtggcggcacagaggctggtactcgacaccttgccgggcgtgaaaattagtaaagctagggacaagagtccttgtcggtctcagggttgcccgcccagaacacaggacaaggccactcaccccccaccggcttcccccagctccctcgtcaaggtcccttctagcgcaaccggtaaacggcagacctgtgacatcgaggggctagtggagttactgaatcgagtacagtcctcgggcgcccacgatcaaagaggccttctgcgaaaagaagatctggtgctccctgaatttctgcaactgccagctcagggtccttcctccgaggaaacccctccccagactaagtcggccgcacagcctattggcggctcactgaattccaccactgactccgccctttag

SEQ ID NO: 132064 - DNA, 609 bp, synthetic construct
  misc_feature 1..609: note = Description of Artificial Sequence: Synthetic coding sequence
  source 1..609: mol_type = other DNA
atgtgccgcacgctagcagcttttcccaccacgtgtcttgagagggctaaggagttcaagacgagacttggaatcttcctgcacaagagtgaattggggtgtgatacgggttctaccgggaaatttgagtggggctcaaagcatagtaaggagaaccgcaatttctccgaagacgtcctggggtggcgcgaatctttcgatctcctcctctccagtaaaaatggcgtggccgccttccacgcattcttaaagacggaatttagtgaagagaatttagagttctggctcgcctgcgaggagtttaaaaaaatcagatccgcaacgaaactggcttctcgggcccaccagatttttgaggaatttatttgtagtgaggctccgaaggaagttaatatcgaccatgaaacccacgagctgacacggatgaacctccagaccgcaacagcaacgtgcttcgacgcagcgcagggtaaaaccagaactctgatggaaaaggactcctatcctcgcttcctgaaatccccagcttacagggacctcgctgctcaagcatccgccgcttcagctaccttatcctcttgtagcctcgatgagccttcccatacatag

SEQ ID NO: 132065 - DNA, 459 bp, synthetic construct
  misc_feature 1..459: note = Description of Artificial Sequence: Synthetic coding sequence
  source 1..459: mol_type = other DNA
atgcccgtcaaatgttgtttctataggagtcccaccgcagaaaccatgacttggtcagagaacatggatacccttctggccaaccaggccggtttggacgcttttcgcatatttctgaaatctgagttcagcgaggagaatgtcgagttctggcttgcctgcgaagactttaaaaaaacaaaaaacgcggacaagatcgccagcaaggctaaaatgatctattccgaattcattgaagccgacgcgcccaaggagataaatatcgattttgggacaagagacctgatcagcaagaacatcgcggaacccacactgaagtgcttcgacgaagctcaaaagttgatttactgtctcatggcaaaggatagcttccctaggtttctaaaatcagaaatatataaaaaattagtgaacagccaacaggtccccaaccataagaagtggcttccattcctgtag

SEQ ID NO: 132066 - DNA, 1809 bp, synthetic construct
  misc_feature 1..1809: note = Description of Artificial Sequence: Synthetic coding sequence
  source 1..1809: mol_type = other DNA
atggagagatccctgcaccgcgtgagtctgggctctcggcgcgcgcatcccgatttatcattctatttgacaacttttgggcagctgcgcttgagtatcgacgctcaggaccgcgtactgttacttcatataattgagggcaaaggcttaatatccaagcagcctggcacctgcgacccgtacgtcaaaataagtctcattccggaggacagccgcctcaggcatcaaaaaacacaaacagtacccgattgccgggaccccgcattccacgagcattttttcttcccagtccaggaggaggatgatcaaaagaggttacttgtgacggtgtggaatcgcgcttctcagtccagacagtctgggctgatcgggtgtatgtcatttggagtgaagtcgctgctgacgcctgacaaagagattagtggctggtattaccttctgggtgaacacctgggaagaacaaaacacttgaaggtggccaggaggcggctgaggccgttacgggatccactgctcaggatgccaggcgggggagatactgaaaatgggaagaagctgaaaattaccatccccagagggaaggacggttttggctttacaatttgttgcgatagtccggtgcgagtccaggccgtcgacagcgggggccccgcagagcgcgctgggcttcagcagctggacaccgtgcttcagctaaacgagaggcctgtggagcattggaaatgcgtcgagctcgctcacgaaataaggtcatgtccgtcagaaatcattctacttgtatggagaatggtcccacaggttaagcccgggcccgatggcggcgtgctgaggagagcctcctgcaagagcactcatgacttgcagtcacccccaaacaaaagagagaaaaactgcacacacggagttcaggcgcgaccagaacagagacacagctgtcacctggtctgtgattccagcgacggattgcttttaggaggttgggagcgatacacagaggtggcaaagcggggtggccagcatacgctgcccgccctcagccgtgctactgcgcccacggatccgaactacataattctagctcccctgaatcccggctcacagttgctgcggcctgtctatcaagaggacacaatccctgaggagtcaggaagcccaagcaagggcaagtcttacactggtcttggcaaaaaaagccgtcttatgaaaaccgtgcagactatgaaggggcacggcaactaccagaattgcccggtggtccggccccacgcgactcattccagctatggaacatatgtgaccttggcccccaaggtcctcgtattccctgtcttcgttcaacctctggacctctgtaaccctgctcggacgctcctcctgagcgaggagctactgctgtatgaaggtagaaacaaggccgccgaggtgactctatttgcttactccgacctactgctgttcactaaagaggacgaaccaggaagatgtgacgtacttcgaaaccctctgtacctgcagtccgtgaaactgcaagagggaagctccgaggacctcaaattttgcgtcctgtatcttgccgaaaaggccgaatgcctgtttacacttgaggcacacagccaggaacaaaagaagagggtgtgttggtgcctctctgagaatattgcgaagcaacaacaattggctgcttctccaccagacagcaagaagttgcaccctttcggctctcttcagcaagaaatgggacctgtgaatagcactaacgctacgcaggaccgcagtttcacttcccccgggcagaccctcattggctag

SEQ ID NO: 132067 - DNA, 507 bp, synthetic construct
  misc_feature 1..507: note = Description of Artificial Sequence: Synthetic coding sequence
  source 1..507: mol_type = other DNA
atgaagaataaactggggatttttaggaggagaaacgaatctcccggtgcccccccggccgggaaagcagataaaatgatgaaaagtttcaaaccgaccagtgaggaggctctgaaatggggcgagtcactggagaagcttctggtgcataagtatggactcgccgtctttcaggcctttctgcgcacagagttttctgaggagaacctggaattttggcttgcctgtgaggattttaagaaggtgaaaagccaatccaagatggcatcaaaagcaaagaaaatctttgcagaatacatagccattcaagcgtgtaaagaggttaacctcgactcctacaccagagaacatacaaaggataacttgcagagcgtgacgcgaggctgctttgacttagctcagaagagaatattcggactgatggagaaggacagttaccccaggtttctgagaagcgacctctacctagacttgataaatcagaagaaaatgagccctcctctttag

SEQ ID NO: 132068 - DNA, 2754 bp, synthetic construct
  misc_feature 1..2754: note = Description of Artificial Sequence: Synthetic coding sequence
  source 1..2754: mol_type = other DNA
atgaaccgtttcaacggcctgtgtaaagtgtgttctgagagacgataccgacagattaccattccgcgaggcaaggacggcttcggattcaccatatgttgtgacagcccagttcgagtgcaagcagtggacagtggtggacctgcagaacgcgcgggcctacaacagctcgacacggttctccagcttaatgagcggccagtggagcattggaaatgcgtggagctggcgcacgagatcagatcgtgcccatctgagattattctcctcgtatggcgaatggtgccccaggttaaaccaggtcctgacggcggggtgctgcgcagagcgtcttgtaaatccacccatgacctccaaagtccaccgaataagagggaaaagaactgtacacacggagtgcaggcacgtcctgaacagcggcattcctgccatctggtctgtgattccagcgatggacttctcctgggcggatgggaaaggtacactgaagtcgctaagcggggaggccaacacaccctgccagcccttagccgagcaacagcacctaccgaccccaattatataattcttgccccgctaaaccccggctcccaattattgagacctgtgtaccaggaagatacgatccccgaggaatccgggtccccctccaagggtaaaagttacaccggtctggggaaaaagagcagactgatgaaaaccgtgcaaactatgaaaggccacggaaattatcagaattgcccagtggtgaggcctcatgccacgcacagtagttacggaacatacgtgactctggcaccaaaggtgctggtctttccagttttcgtccagccgctcgacttatgcaaccctgctagaactttgttgctctcagaagaactgctgttgtatgagggccgcaataaagctgcggaggtgaccttatttgcatactctgatttactgctcttcacaaaagaggacgagcccggccggtgcgatgtgctgagaaacccattgtacttgcaaagcgtgaagctgcaagaagggtccagcgaggaccttaaattctgcgtgctttacctagccgaaaaggcagagtgcttgttcaccctggaggcccattcgcaagagcagaagaaacgagtgtgttggtgcttatccgagaatattgccaaacagcagcaactggcggcctcaccccccgattcaaagatgttcgagactgaggctgatgagaaacgcgagatggcgctcgaggaaggaaagggccctggcgcggaggacagtcctccttcaaaggagccctcaccagggcaggagctccctcccgggcaggacctccctccaaataaagattctccctcaggccaggagcccgccccttcccaagaacctcttagctctaaagactcggcaacgtctgaggggagtccccctggacccgacgccccaccttccaaagatgtccctccatgtcaggaaccaccgcctgctcaagacctgtcgccctgccaggatctcccggccggccaggagccccttccacatcaggaccccctgctgactaaggacctgccggctatccaagaatccccaacaagggatctgcccccttgtcaggatctgccaccctcccaggtcagtctgcccgccaaggctctgacagaggatacgatgtccagcggggacctgttggcagcgactggagacccaccagctgcacctaggcctgcatttgtcattcccgaagtccggcttgactctacatacagtcagaaggcaggggccgagcaagggtgtagtggagacgaggaagacgcggaggaggcagaggaagtggaggagggcgaagagggcgaggaggatgaggacgaggatacctctgacgataactacggcgagaggagcgaagcgaagcgctccagcatgattgagaccggacagggcgccgagggcggattatccttaagagtccaaaactctctcaggcgccggacccatagcgaggggagtctcttgcaggaacctagggggccgtgctttgcctcagacaccactttgcactgcagtgacggagaaggggccgcgtctacttggggaatgccttcacccagcacattaaagaaagagttgggacggaacggcggatccatgcaccatctctccctgttctttaccgggcacaggaaaatgtccggggcagacacagtgggcgacgacgatgaggcctcaagaaagagaaagtctaagaatcttgcgaaggatatgaagaataagctgggcatctttcggagaaggaatgagtctcccggcgctcccccagctggcaaagccgataaaatgatgaagtctttcaaaccaacttcagaggaagctttaaaatggggagagtcacttgaaaagttactggtgcacaaatacggattagctgtcttccaggcattcctccgtaccgagttttcagaagaaaaccttgaattttggctggcgtgcgaggatttcaagaaagtcaagagccagagtaaaatggcatccaaggcgaagaagatctttgctgagtacattgcaatccaggcctgcaaagaggtcaatctcgattcatacactcgagagcataccaaagataaccttcaaagcgttacccgggggtgttttgacttagcacaaaaaaggatcttcggcctcatggagaaggattcctaccccaggtttctcaggtctgacctatacctggacctcattaatcagaagaaaatgtctcctccactgtag

SEQ ID NO: 132069 - DNA, 3597 bp, synthetic construct
  misc_feature 1..3597: note = Description of Artificial Sequence: Synthetic coding sequence
  source 1..3597: mol_type = other DNA
atgcctgtgattcccgctctttgggaggtcgagatgggaagaagtcagggccaggagattgagactattctcgcgaatcgaagtcacagcgattccacccctttaccaaacttcttgagcggctcccaccggcctgaatgttgcacgtgccggctgttgaccgcctctggggctcaagactctcttccatttggaagacgtttgtattctggcccctggaggagctgtgaggaggtgtgtcatgtctctgtgctgtccgtcctgtccactagttgcggactgagcctttctttaccaatctttcccggttggatggaatggctaagccccgacattgcccttccgcgacgagatgaatggactcagacttcccctgctcgcaagcgcattacacacgcaaaagtccaaggcgccggacagcttaggctttctatcgatgcccaggacagagttctcctactgcatattatagagggaaagggactgatttcaaagcaaccaggcacatgcgacccctacgtgaagatttccctgatccccgaggactcgcggcttcgtcaccagaagacacagacagtaccagactgccgagatcctgctttccatgagcactttttcttccctgtacaggaggaggacgaccagaagaggcttctggtgaccgtgtggaatcgcgccagtcagagccgtcaatctggactcattggatgtatgtcgttcggggtgaagtcattgcttacccccgataaagagatatctggatggtactatttgctaggtgagcatttgggaagaaccaagcacctgaaagtcgcaaggcgcaggctgagacccctgagggatcccctgctgcgaatgcctggaggcggtgacaccgaaaatggcaaaaagctcaagatcactatcccacgcggaaaggacggctttggctttaccatctgctgcgactcacccgtgagagtgcaggctgttgactctggagggccagctgaaagagccggactgcagcagcttgacactgtgctgcagctcaacgaacggcccgtcgagcactggaaatgcgttgagttggcccacgaaatccgttcctgtcccagtgaaattattctcttggtctggaggatggtgccgcaggttaagccagggcccgacggcggggttcttcgtcgtgcaagctgcaaaagcacgcatgacttacagtctcctcctaacaagcgcgagaaaaactgcacgcatggggtccaggccaggcccgagcagaggcatagttgccatctggtttgtgattccagtgacggcctcctgcttggtggatgggagaggtacaccgaagtggcaaagcggggcggccagcacacgctccctgcactgtctcgcgccactgctcctactgaccccaactatattatcctcgcaccacttaatcccgggtcacagctcctacgcccagtgtaccaagaagacaccatccctgaagagagtggcagccccagcaaggggaaatcctacactggattgggtaagaaaagcaggctgatgaaaacggttcaaaccatgaagggccacggcaattatcagaattgcccggttgtccgccctcatgccacccacagcagctacggaacctacgtcacgctcgcccctaaagtgcttgtcttcccagtatttgtgcagccactggacctctgtaaccctgcccgaactctgttactcagtgaagaattgcttctgtacgagggacggaacaaggcagccgaagttacgctgtttgcctattcagatctgctgttattcaccaaggaggacgaacccggacgctgtgacgtgctccgaaacccgctctacctgcaatccgtgaagctccaggagggtagctccgaagacctaaagttttgtgtgctttacctggccgaaaaggctgagtgtctgtttaccctcgaagctcactcacaggagcagaagaaacgcgtgtgttggtgcctctcagaaaacatcgcaaagcaacaacagctggccgcatcaccgccggacagcaagatgtttgaaacagaggcagacgaaaagagggaaatggccttggaggagggaaagggcccgggtgccgaggattcccctcccagtaaagaaccttctcctggtcaggaactgccgcctggacaggatctgcccccaaataaagattcaccaagtggacaggaaccagcaccctctcaagagccattatcgtcaaaggactcagccacatccgagggctccccgcccgggccagacgcacccccgagtaaagacgtacccccttgccaggaaccgcctcccgcgcaggacttgtctccgtgccaggatctgcccgccgggcaggagccactgcctcaccaagatccccttctgaccaaggacctgcctgcgattcaagagtcccctactcgggacctgcctccctgccaagacctccctccgtctcaagtgtccctgcctgcgaaggcgttgactgaggatacaatgtcttccggcgatctgctagccgctacaggagatccccccgcagctccaaggcctgcatttgtcattcccgaggtccggcttgattctacctactcccaaaaggccggcgcagaacaaggatgttcgggtgatgaagaagacgccgaggaagccgaggaggtggaagagggggaggaaggggaagaggatgaagatgaggatacatccgacgacaattatggggaacggtctgaagctaaacgtagttccatgatcgagacaggtcagggcgccgaggggggtctgagtttaagggtccaaaattctttgcgtaggcgcacccactctgaagggtccctgttacaggaaccccgcggcccatgtttcgcatcggacactacactgcattgcagcgatggagagggggccgcttcgacatggggcatgccttctccctccacactgaagaaagagctgggacggaacggcggcagcatgcaccatctgtccctgtttttcaccgggcataggaagatgagtggagcagatacagtgggagacgacgacgaggcctcccgtaaacgcaagtcaaagaaccttgctaaggacatgaaaaacaaactcgggatattccgcagaaggaacgagagccctggcgctccacctgcagggaaggccgataagatgatgaagagcttcaaacccacctccgaggaggccttgaaatggggtgagagccttgagaaactactggtgcacaaatacggactcgcggtcttccaggcattcctacggacagaattctcagaggagaatttggagttttggttggcctgtgaggactttaagaaggtgaagtcccaaagtaaaatggcatctaaagcaaaaaaaatcttcgctgagtatattgctattcaagcatgcaaggaggttaaccttgatagttacactcgcgaacatacgaaagacaatcttcagtcggtcactcgcggctgtttcgatcttgctcagaagcgtatcttcggcctaatggagaaagatagttatccaagatttttgaggagcgacctttaccttgaccttatcaaccagaagaagatgtctcctccgttgtag

SEQ ID NO: 132070 - DNA, 1560 bp, synthetic construct
  misc_feature 1..1560: note = Description of Artificial Sequence: Synthetic coding sequence
  source 1..1560: mol_type = other DNA
atgtttgagaccgaggccgacgagaagcgggaaatggccctcgaggagggtaaaggccccggcgcagaggactctccgcccagcaaggaacctagtcctggacaggaactgccgcccggacaggacctgcctccaaataaagatagcccatctgggcaggagcccgcccccagccaggagcctctgagctcaaaggacagcgccacctccgaaggatcgcccccaggtccagatgcaccgccctccaaggacgtgccaccttgccaagaaccgccaccagcccaggatttgtccccgtgccaagacttacctgccggccaagagccccttcctcaccaggatcccctgctgacaaaagacctcccggcaatccaggagagccccactcgggacctgcccccatgtcaggatctgcctccatctcaagtgagcctgccagccaaagcacttactgaggacactatgtcgtctggtgaccttctggccgctacaggagaccccccagctgcgccaaggcctgccttcgtaataccagaggtgcgacttgactcaacatactcacagaaagccggggctgaacagggctgtagcggcgacgaagaagacgccgaggaggccgaggaggtggaggagggtgaagaaggcgaagaagacgaagacgaagatactagtgacgataactacggagaacgcagcgaggccaaacgctccagcatgattgaaaccggacagggagccgaaggcggattgtcgctgcgggtgcagaattctttgcgacgccgaacacattctgaagggtcgttgctccaggaaccaagggggccatgtttcgccagtgacaccaccctccactgttcagacggcgaaggcgctgccagcacctggggcatgccaagtccttctacacttaaaaaagagctggggcggaatggtggatccatgcaccatctttcacttttttttactggacatcggaagatgtctggggccgatactgtgggggacgatgatgaggcttcccggaaaagaaaatccaagaatctggctaaagatatgaaaaataaactgggtattttccggcgtaggaatgagagccctggggccccccccgctggcaaggcagataaaatgatgaaatcattcaaacccacttctgaagaagcactgaaatggggtgagtccctcgagaagcttctggttcacaagtacggcctggccgttttccaagctttcttgagaacagaattctcagaagagaatcttgagttctggctggcctgtgaggattttaagaaagttaaatcccagagtaaaatggcttctaaggcaaaaaagattttcgctgaatatattgccatccaagcgtgcaaggaagttaatctggactcctacacaagagaacacaccaaagataacctgcagtccgttacccggggatgttttgatctcgcgcagaaaaggattttcggcttaatggagaaagactcctacccgagatttctgaggtcggacctgtatcttgatctgattaatcaaaaaaagatgtcgccaccgctttag

SEQ ID NO: 132071 - DNA, 3597 bp, synthetic construct
  misc_feature 1..3597: note = Description of Artificial Sequence: Synthetic coding sequence
  source 1..3597: mol_type = other DNA
atgccagtgatcccagccctgtgggaggtggagatgggaagatcccaaggacaggagatcgagacaatcttggctaacaggtctcacagcgactccacaccccttccaaacttcctgagcggctctcacaggcctgaatgctgcacttgtaggctgctaacagcctcgggagcccaggacagcctcccctttgggaggcggttgtactccggaccatggagatcttgtgaagaggtgtgtcacgtttcagttctgagtgtcttatctactagctgtgggctgtcactgtctttgccaattttccctggttggatggagtggctttctccagacatagcattgccacggagagacgagtggacgcagacttcacccgcgcggaagcgcataactcatgctaaagtgcaaggagcgggtcagctacggctcagtatcgatgcgcaggatagggtcctgcttctgcatatcattgaggggaagggcctgatctcgaagcagcccggcacttgtgatccttacgtcaaaatcagcctcattccagaggactcgcgactgcggcaccagaagacacagacagttcctgattgccgcgacccagcatttcacgagcatttcttcttccctgtccaggaagaagacgaccagaaaagactgttggtaaccgtgtggaacagagctagccagtcaaggcagagcggcctgattggctgcatgtccttcggcgtgaagagccttcttactcccgataaagaaatatctggatggtactatctgcttggcgaacatctcggccgtaccaagcacctgaaggtagccaggcgaagactgaggcctcttcgggacccccttttaaggatgcctgggggcggagataccgagaatggcaagaagctgaagattacaattcctagggggaaggacggtttcggctttacaatatgttgcgactctcctgtgagagtgcaggccgtggatagtggtggccctgccgaaagggcgggcttgcagcagctcgatacagtgctacagttgaacgagaggcccgtggagcattggaaatgcgtggagctcgctcacgaaattaggtcgtgcccaagcgaaattatcctgctagtgtggagaatggtgccccaagtgaaacctggacctgacggcggagtactgcgtcgggccagttgcaagtcaacacacgacctccaatcaccaccgaacaaacgtgagaaaaactgtacccacggtgtgcaagcaaggccagaacaaaggcatagttgccacctggtgtgtgactcgtcagacggacttctcctgggtgggtgggagaggtacactgaagtcgcaaaacgcggcggacagcataccttgcccgctttaagcagggctactgctccaaccgatcccaattacatcatcctcgcccccctgaatccaggatctcagttgctgcgccccgtataccaggaggacaccattccagaggaatctggaagcccctctaagggcaaatcctatactggcctgggaaagaagagtagattaatgaaaaccgtgcaaaccatgaagggccacggcaattatcaaaattgcccagttgtgcgtccgcacgccactcatagctcctacggaacctacgtcacattagcgccaaaggtgctggttttcccagttttcgtccaaccactcgacctgtgcaatccagcaaggaccctgctcctgagcgaggaactcctattgtacgagggccgcaacaaggctgccgaagttactctgtttgcctactccgaccttctcctgtttactaaggaagatgagcccggccggtgcgacgtattgagaaatcccctgtatctacagtcagtgaagctgcaggaagggtcttctgaggacctgaagttttgcgttctttacctggctgaaaaggctgagtgcctttttactctggaggcgcacagccaggaacagaaaaaaagggtgtgttggtgtctctctgagaatattgctaagcagcaacaactcgctgcctcacctcctgattccaagatgtttgaaactgaggcagacgagaagagggagatggccctggaggaaggcaaagggcccggagctgaggatagcccaccaagtaaagagcccagcccagggcaagagcttccccctggccaggatcttcctcctaacaaagactcgccgtccgggcaggaaccagccccatcccaggagcctctttcttccaaagactcagctacctctgagggctcgccccctggacctgatgctcccccaagcaaagatgtgccgccgtgccaggaacctcccccggcccaggatctttctccatgtcaggaccttccagctggtcaagagcccctgccgcaccaggaccctttgttaaccaaggacctgcccgccattcaggagagtccaacccgggatctgcccccatgtcaagatttgccaccaagccaggtgtctctgccagctaaggctttaacagaggacaccatgtcatcaggtgacctactagctgccacaggggaccctcccgccgcaccccgccctgctttcgtgatcccggaagtgcgcttggactccacatattctcagaaggcaggcgccgagcagggatgctccggcgacgaggaggacgccgaagaggccgaggaagtggaggaaggtgaagagggcgaggaggatgaagacgaggacacctccgacgataactatggcgagcgcagtgaagccaagcgttcttctatgattgagacagggcaaggtgcagagggaggactctctctgagggtgcaaaattctctgaggcgacggactcattcggagggctcactactgcaagagccccgggggccttgcttcgccagcgacactactttacactgttcagatggagaaggtgcggcctctacctgggggatgccaagcccctccacacttaaaaaagagctgggtcgaaacggtggcagcatgcatcatctttcattgttttttaccggacatagaaagatgtccggtgctgatacagtgggagacgatgatgaagcttcacgcaagagaaagagcaaaaaccttgccaaagatatgaagaacaagctgggaattttccgcaggcgcaacgagagtcccggcgctcccccagccggcaaagcagataagatgatgaaatccttcaaacccacttccgaggaggcgctgaaatggggggagtctctggagaagcttctggtacataaatatggactggcagtttttcaggcattcctgaggacagagttttcggaggaaaacctcgaattttggctggcctgtgaagatttcaaaaaagtaaaatctcagtctaaaatggcaagcaaggccaagaagatcttcgctgaatatattgccattcaggcctgcaaggaggtgaatctggatagctataccagggagcacacaaaggataacctccaatcggtgactaggggttgtttcgacctagcgcagaagaggattttcggacttatggagaaggattcctatccccggttcctccgcagtgatctctacctagatctgatcaaccagaaaaagatgagtccccctctgtag

SEQ ID NO: 132072 - DNA, 1776 bp, synthetic construct
  misc_feature 1..1776: note = Description of Artificial Sequence: Synthetic coding sequence
  source 1..1776: mol_type = other DNA
atgaatcgatttaacggactctgtaaagtgtgctctgaacgaagataccggcaaatcactatcccaaggggtaaagacggctttgggttcacgatatgttgcgactcaccagtaagggtccaggcagttgatagtgggggtcccgcagaaagggccggcttgcagcagctggatacagtgctgcaactgaatgagagacctgtggaacactggaagtgtgtggaactggcccacgaaattagatcctgcccttccgaaattatccttctggtgtggcgaatggttccccaagtaaaaccaggcccagatgggggtgtgctgaggcgggccagttgtaaatctacacacgaccttcagtcaccacccaacaaaagggaaaaaaattgcactcacggggtccaagctaggccagagcagcgccattcatgtcacctcgtctgcgattcaagcgatggcctcctgttaggaggctgggaaaggtacactgaggtagcgaagaggggaggacagcacaccctcccagccctgtcgagagcgactgctcccactgatccaaactatatcatcttggccccgctgaaccccggtagtcagctgcttcgtccagtgtaccaagaggataccatacccgaggagtctggcagccctagtaagggtaaatcgtacaccgggctggggaagaaaagcagactgatgaagacagtacagacaatgaaagggcatggtaattatcagaactgtcccgttgtccgaccacatgccacgcactcctcatacgggacctacgtcacccttgcccctaaagttcttgtcttccccgttttcgtccagccactggacctttgcaaccctgctagaacacttttgctatctgaggagctgctgttatacgagggcaggaataaggccgccgaggtcacgctgttcgcctactctgacctcctgctgtttacgaaagaagacgaaccagggcgctgcgacgtgcttcgcaatccactgtatctccaatccgtgaagctgcaagagggttctagcgaggatttaaaattttgcgtgttgtatctggccgagaaggcggaatgtctctttactctagaagcacactcacaggagcagaagaagcgggtgtgttggtgcttgtcagaaaacattgctaagcagcaacaactggccgctagtccaccagactccaagatgtctggagctgacaccgtgggagacgatgacgaggcgagtcggaagagaaagtctaagaacctggcgaaggacatgaaaaacaagctcggtatatttaggcgacgaaacgagtctcctggcgcaccccctgccggcaaagccgataaaatgatgaagagtttcaagcctaccagtgaggaagcattgaagtggggggaaagtctggagaaactcctagtgcataaatatgggctggctgtgttccaggcgttcttacgaactgagttctctgaggaaaatctggagttttggctggcttgcgaagatttcaagaaggtcaagagccagtccaagatggcctccaaggctaagaaaatcttcgcagaatatattgcaatacaggcttgtaaagaggtcaacctggactcttacacacgggagcacacaaaggataacctgcaatctgtgaccagaggctgcttcgacctcgcgcagaagaggatcttcggattaatggaaaaggacagttatcctagattcctgcggagtgacctctacctcgatctgatcaaccagaagaagatgagccccccactgtag

SEQ ID NO: 132073 - DNA, 1560 bp, synthetic construct
  misc_feature 1..1560: note = Description of Artificial Sequence: Synthetic coding sequence
  source 1..1560: mol_type = other DNA
atgttcgaaaccgaggccgacgaaaaaagggaaatggctctggaagaaggaaaagggccaggggctgaagacagcccaccatctaaagagccatcaccaggacaggaattaccacccggccaggatctcccacctaacaaggactcccctagcggccaggagccggcacctagccaggaacccttgtcgtctaaagactcagccacgtccgagggatctccccccggccccgatgcacctcctagtaaagacgtccccccttgccaggagccccctcctgcacaggatctctcaccctgtcaggacctgcctgccggtcaggagccactgcctcatcaggaccccctcctgaccaaagacctccctgctattcaggagagccctaccagggatttgcctccgtgtcaggacctgcctccaagtcaagtgtctctacccgctaaagctctgaccgaggacaccatgtcctctggcgatcttttagcggcgactggggaccccccggctgccccacgccctgcatttgttatccccgaagttagactcgactctacgtactcacagaaggcaggcgctgagcaaggctgctccggcgatgaagaggatgccgaggaagccgaagaggtggaggaaggcgaagagggagaggaagacgaagacgaagacacctcggacgacaactacggggagcgttccgaagccaagcgttcctccatgatagagactggccagggagcagagggtggattgtctctccgggtacaaaactcactcaggcgccggacacactctgaaggctccctactccaagagcctaggggcccgtgcttcgcctctgacacaacactgcactgcagcgatggagagggcgccgcttctacgtggggcatgcctagtccctcgaccctcaaaaaggagttggggaggaatggcggatcaatgcatcacctgtccctgtttttcaccggacatcgaaagatgtccggggctgacaccgtgggggacgacgatgaagcctcaaggaagaggaagtccaagaacctggctaaggatatgaagaacaaactcggtatcttccgaagaaggaatgagtcccccggcgcccccccagcgggcaaagccgataaaatgatgaagtcatttaagcccacatccgaggaggccctgaagtggggggagtcgttggaaaaacttcttgttcataagtacggccttgcggtgttccaggcattcttgcgcacggagttcagtgaggaaaacctggaattctggttggcttgcgaggacttcaaaaaagtcaaatcacagtctaaaatggcctctaaagccaagaagattttcgcggagtacatagccatccaagcatgcaaggaggttaacctcgactcatatacacgggaacacacgaaagacaacctgcagtcggtcactaggggatgcttcgatttagcccagaaaagaatatttgggctgatggaaaaggatagctatcctcggtttctaagaagcgacctatatcttgacctgattaaccagaaaaagatgagcccccctctgtag

SEQ ID NO: 132074 - DNA, 936 bp, synthetic construct
  misc_feature 1..936: note = Description of Artificial Sequence: Synthetic coding sequence
  source 1..936: mol_type = other DNA
atggtcacccgccgaccagtcacaaacagctgggactggctgccggccggcgctgcgccagaggctgtgccttgccgtcatatgcccctctcccggttacccttgcgcgtggggcagaaagaattcttcttccctctgcctcttctggtccctcctatctcctggttgttgttgtcagagagccaaccgcgcttggtccccggatccccagttatccggcccggctttcagcgcgcttgtgtcgctgccgcgtgcacagtggctgcgcggtgtcccggcaggggcgtcggagaccggtcccagtctggagcctcttatcggcctatctgtggccccaaagtgggcggcccaactgagatgcttcggggaatgtatctgaccaggaatggaaatttgcagcgtcgacacaccatgaaagaagccaaagacatgaagaacaaacttggaattttccggaggcggaacgagtcaccaggggcaccccccgccggaaaagccgacaaaatgatgaagtccttcaaaccaacctcggaggaggcattgaagtggggagagtcactcgagaagttgttggtccacaaatatggactggccgtgtttcaagcgttcttacggacagagttctctgaggagaatctcgaattctggttggcatgcgaagacttcaaaaaagtcaagagccagtcaaaaatggcatctaaggctaaaaaaattttcgccgagtacatagccattcaagcctgcaaggaagttaatctcgatagctatacccgggagcacacaaaggacaatctgcagtctgtcactagggggtgtttcgacttagcccagaaacgaatctttggactgatggaaaaagacagctatccacggtttttgcggtccgatctgtatttagaccttataaatcagaagaaaatgtcccctcctctttag

SEQ ID NO: 132075 - DNA, 564 bp, synthetic construct
  misc_feature 1..564: note = Description of Artificial Sequence: Synthetic coding sequence
  source 1..564: mol_type = other DNA
atgaagcacaggctcggctttttgctgcagaagtctgattcctgtgaacacaattcatcccataataaaaaagacaaggtggtgatttgtcagagggtctcccaagaggaagtgaaaaagtgggctgaaagcctcgaaaaccttatctcccacgagtgcggcctggcagccttcaaggccttcctcaagagcgagtactcagaagagaatatcgacttttggatatcctgcgaagaatacaaaaaaatcaaaagccctagcaaactttccccaaaagccaagaagatttacaatgaatttatcagcgtccaggctactaaggaggtgaacctggattcttgcacccgggaggagaccagccgaaatatgctggaacctaccataacatgctttgatgaagcccagaagaagatcttcaacttaatggaaaaggactcttatcgacgtttcctgaagtctcgattctatctcgacctggtcaatccaagcagctgtggagctgagaaacaaaagggggcgaagagctccgctgattgcgccagtctggtgccgcagtgcgcatag

SEQ ID NO: 132076 - DNA, 282 bp, synthetic construct
  misc_feature 1..282: note = Description of Artificial Sequence: Synthetic coding sequence
  source 1..282: mol_type = other DNA
atgtgcaaggggttggccgggctgcccgcatcttgcctgagatctgctaaggatatgaaacaccggcttggcttcctgcttcagaaatccgactcttgcgaacacaattcctcccacaataagaaagacaaagtggtgatttgccagcgcgtttcacaggaagaagttaagaaatgggcagagtccctagagaatcttatttcacatgaatgcgagcctggatttctgcaccagggtagagacaagcctgagcacgccagagcctacaacaacctgctgtag

SEQ ID NO: 132077 - DNA, 618 bp, synthetic construct
  misc_feature 1..618: note = Description of Artificial Sequence: Synthetic coding sequence
  source 1..618: mol_type = other DNA
atgtgcaaaggactggcaggcctgccagctagctgcttgagatctgccaaggatatgaagcacagactcggttttttattacagaaatccgactcttgcgagcataattcgagccataacaagaaggataaagtcgtcatatgccagagagtaagccaggaggaagtgaagaagtgggccgagtctctggagaatctgatcagccacgagtgcggtttagcagcatttaaagcttttctgaagagtgagtacagcgaggagaacatagacttctggatttcctgcgaagagtataagaagatcaagagcccgtccaagctgtcgcctaaggcaaagaagatttacaatgagtttatatccgtgcaggctactaaggaggtgaatttagattcttgcacacgggaggagactagtcggaacatgttggagccgacgatcacctgcttcgatgaagctcagaaaaagatcttcaacctaatggagaaagacagctatcggcgctttctgaagagcagattttacctagacctggttaatccgtctagttgtggggctgagaagcagaagggggccaagagctctgcagactgtgcctcccttgttccacagtgcgcgtag

SEQ ID NO: 132078 - DNA, 909 bp, synthetic construct
  misc_feature 1..909: note = Description of Artificial Sequence: Synthetic coding sequence
  source 1..909: mol_type = other DNA
atgtacaatatgatgttactcattcagaagcgaaagggtatcggctctcagttattaagggccggcgaggctgagggagaccggggggcagggactgccgagaggagcagcgattggcttgatggaaggtcatgggcgattaaggaaacgccaaccggtctagcaggcaggcgcagcgaggattcggataacattttcaccggagaagaggcaaagtacgcccagagccgcagccatagttcctcttgcaggatcagtttcctgctagccaactccaagctccttaacaagatgtgcaagggtctcgctggattgccagcctcttgtttgcggtcagccaaggacatgaagcacagactgggtttcctactgcagaaatccgacagctgtgagcacaactcctctcacaacaaaaaggacaaggttgtcatctgtcaacgtgtctctcaggaagaagtgaagaaatgggccgaatcgctcgaaaacctaatttcacatgagtgtggcttagctgcattcaaggctttcctgaagtctgagtattccgaggaaaatatagatttctggatttcatgcgaagagtataaaaagatcaagtccccctcgaagctctcacccaaggctaaaaaaatatacaatgagttcatcagtgttcaggcgacaaaagaggttaacttggactcatgtacacgggaagaaacctccaggaatatgctcgagcccactatcacctgctttgatgaggcccagaagaaaatcttcaacttaatggaaaaggacagttaccgcagattcctcaaatcccgattctacctggacctggtcaatcccagctcctgcggtgctgaaaagcagaaaggtgccaaaagtagcgccgactgtgcaagcctcgtgccccagtgcgcctag

SEQ ID NO: 132079 - DNA, 564 bp, synthetic construct
  misc_feature 1..564: note = Description of Artificial Sequence: Synthetic coding sequence
  source 1..564: mol_type = other DNA
atgaagcacaggttaggattccttctacagaagtcggactcatgtgagcataatagtagccacaacaagaaagacaaggtagtgatctgtcagcgggtatctcaggaggaggtaaagaaatgggccgaaagcttggagaatctgatctcccatgaatgtggcctggccgccttcaaagctttccttaaatccgaatatagtgaggagaacatagatttttggatttcatgcgaagaatataagaaaattaagagcccctcaaaactgtcgcctaaagccaaaaagatttacaatgagttcatatccgtccaggctaccaaagaggtcaatctggactcgtgcaccagggaggaaacaagcagaaatatgttagaacctactatcacctgtttcgatgaagcacaaaaaaaaatttttaacctgatggagaaagacagctacagaagattcctgaaatccagattctacctcgatttagtaaatccgagctcttgcggagccgagaagcagaagggtgcgaaatcatctgctgattgcgcatccctggttccgcaatgtgcctag

SEQ ID NO: 132080 - DNA, 432 bp, synthetic construct
  misc_feature 1..432: note = Description of Artificial Sequence: Synthetic coding sequence
  source 1..432: mol_type = other DNA
atgaaacaccgattgggcttcctactccagaagagcgattcatgcgagcacaatagctcccacaataaaaaagataaggtcgtcatatgtcagagagtgagccaggaggaggtcaagaagtgggctgaaagtctcgagaacctgatctcccatgagtgcggattagccgcctttaaggcctttttgaaatccgagtactcagaggaaaacatcgatttctggatcagctgtgaggaatataagaaaataaaatctccgagtaagctgtcaccaaaggccaaaaaaatctacaacgagttcataagtgttcaggccaccaaagaggtgaaccttgatagctgcaccagagaagaaacctctagaaatatgttagaacctaccattacttgttttgacgaggctcagaaaaaaatattcaacctcatggagtag

SEQ ID NO: 132081 - DNA, 546 bp, synthetic construct
  misc_feature 1..546: note = Description of Artificial Sequence: Synthetic coding sequence
  source 1..546: mol_type = other DNA
atgtgtaaaggattggctgctctcccccacagttgtctcgagcgagccaaggagataaaaatcaaattagggatcctgcttcagaaacctgatagcgtgggtgatctggtcatcccgtacaacgagaaaccagagaaacccgcaaagacccaaaagacgtccttggacgaggccttacagtggcgggattccctggataaactgctgcaaaataattatgggctggcttcgtttaagagttttctgaagtctgagtttagcgaggagaaccttgaattctggatcgcatgcgaggattacaagaaaattaagagcccagcgaaaatggcagaaaaagcaaagcagatttacgaggagttcattcagaccgaggcaccgaaggaagtgaacatagatcacttcacaaaggacatcactatgaaaaacctggtggagccaagcttatcctccttcgacatggctcagaaacgaatacacgccttgatggaaaaggattcgttgcctcggtttgtgaggagcgaattttaccaggagctcatcaagtag

SEQ ID NO: 132082 - DNA, 606 bp, synthetic construct
  misc_feature 1..606: note = Description of Artificial Sequence: Synthetic coding sequence
  source 1..606: mol_type = other DNA
atgtgcgctagaaatatcagccaggatatactcatcctgcaaatgcacagtgcgcattggcacatcaatgggaaatacgaggagaaaagtaacctgatgttctgggccaaggagataaagattaagcttgggatactgctccagaagcctgatagtgttggtgatttagtgatcccgtacaacgagaagcccgagaagccggccaaaacccaaaaaacctcgttggatgaggcactgcagtggagagactccttggacaagttgctccagaataactatggcctggcttcctttaagagctttctcaagagcgagttctcagaagagaacctcgagttttggatcgcttgtgaggactataagaaaatcaaatcccccgcgaagatggcggaaaaggctaaacagatctacgaagagtttatccagaccgaggctcctaaggaggtcaatatcgatcacttcaccaaagacattactatgaagaacctcgtggaaccctctttgtcctcattcgatatggcgcaaaagcggattcacgcattgatggagaaagacagcttgccccggttcgtaaggtctgagttctaccaggaattgatcaagtag

SEQ ID NO: 132083 - DNA, 222 bp, synthetic construct
  misc_feature 1..222: note = Description of Artificial Sequence: Synthetic coding sequence
  source 1..222: mol_type = other DNA
atggctgagaaagccaaacagatctatgaggaatttatccaaacggaagcaccaaaagaagtaaatatcgatcattttactaaagatattacaatgaaaaatcttgtcgaaccatctctctcatcgtttgacatggctcagaaaagaatacacgccctgatggagaaggacagtctccctaggttcgtgcggtccgaattctaccaggagttgattaagtag

SEQ ID NO: 132084 - DNA, 1362 bp, synthetic construct
  misc_feature 1..1362: note = Description of Artificial Sequence: Synthetic coding sequence
  source 1..1362: mol_type = other DNA
atggctcaggggagtggagaccagagagctgtgggcgtggcggatccagaagaaagctccccaaatatgattgtctactgcaagatcgaggatataattactaagatgcaagacgataaaacggggggcgtgccaattagaaccgtaaaatccttcttgtcaaaaattccttctgtggttaccggtaccgatatcgtgcaatggctcatgaaaaacctttctatcgaagaccccgttgaagccattcatctcggctctcttattgcggcccaaggatatatttttcctataagcgaccacgttctgaccatgaaggacgacgggaccttttatcgcttccaggctccgtacttctggccatctaactgttgggagccagaaaatacagattatgctatctacttgtgtaagcgaactatgcagaacaaagcccggctggaactcgctgactacgaggccgagaatctcgcaagactacaacgagccttcgcccgtaaatgggagttcatatttatgcaggccgaggcccaggtcaagatcgaccggaaaaaggataaaacagagcggaaaattttggacagccaggaacgtgcattttgggatgtccatagacctgtgcccggatgcgtaaatacaactgagatggacatcaggaaatgtcgcagactgaaaaatccacaaaaggtgaagaaatccgtgtacggagttacagaagagagccaggctcagtcccccgtgcatgttttgagtcagccaatccggaaaactaccaaagaggacatcaggaaacagattacatttttaaacgcccagatcgaccgacattgcctgaagatgtcaaaagtcgccgagagcaaagaaccctctcagcagcgggttaagcgctggggattcagctttgatgagatcctcaaagatcaggtcggacgggaccagtttctacgattcctcgaaagcgaattctcctcagaaaacctccggttctggcttgccgttcaggatctgaagaagcagcccctgcaggacgtggccaaaagggtggaggaaatatggcaggagtttctcgcacccggggccccatccgccattaacttggatagtcactcctacgaaataaccagccagaatgtcaaagatgggggccgctacacgttcgaagacgctcaggagcatatctataagttgatgaagtccgacagttacgcaagatttctgagatctaacgcctaccaggatctgctgcttgccaagaaaaagcccgaatcggagcagggtaggcgaacaagcctggaaaaattcacacgaagcgtgggtaagtcacttgcaggaaagcgtctgacaggtttgatgcagagtagctag

SEQ ID NO: 132085 - DNA, 1383 bp, synthetic construct
  misc_feature 1..1383: note = Description of Artificial Sequence: Synthetic coding sequence
  source 1..1383: mol_type = other DNA
atggcccagggtagtggtgaccaacgagcagtcggtgtggctgaccctgaagaatcctctcctaacatgattgtgtattgtaagatcgaggatatcattaccaaaatgcaggacgataagacaggcggtgtgcctatcagaactgtgaaatctttcctgtctaaaattcccagcgtcgtgaccggcactgatatcgtgcaatggttgatgaagaatctctccattgaggatcccgtggaagctattcatctcggcagcctaattgcagcccagggctacatcttccccatctccgaccacgtcctcactatgaaagacgatggaaccttctatagatttcaggccccctatttttggccttccaactgctgggaacccgagaatactgactacgccatctatctctgcaaaagaactatgcagaacaaggcaagactggagttggctgactatgaagcagaaaatttggcaagactgcagagggcgtttgctcgcaagtgggagtttattttcatgcaggcagaggcccaggtgaagatcgatcggaaaaaggataagacggagagaaagattctcgactcacaagaacgcgccttttgggatgtgcaccggcccgttccaggctgcgtcaacacaacagagatggatatccgaaaatgccgtaggctcaagaatcctcagaaagtaaaaaaatccgtctacggagtcacagaggagtctcaggcacagagccctgtacacgtcctgtctcaaccaatcaggaaaacgacaaaagaagacattaggaagcagattaccttcctgaatgcccagattgataggcactgtttgaagatgtctaaagttgctgagtctttgatcgcttacaccgagcagtacgtggagtatgatccactgatcaccccagcagagccgtcaaatccttggatctctgacgatgtggctctgtgggacatcgaaatgagcaaggagccctcacagcagcgagtaaagaggtgggggttttctttcgatgagatactcaaggaccaggtgggtcgcgaccagttcttgcgtttcctggaaagtgagttttctagtgagaacctgcgcttttggcttgcagtccaggacctaaaaaaacagcctttgcaggacgtggctaagcgagtggaagagatctggcaggagttccttgctcctggcgcccctagtgccattaaccttgactcccattcatacgaaatcacaagtcagaatgtcaaagacggtggcaggtacacctttgaggatgcccaggagcacatctacaaactgatgaagtccgattcctacgctagattcctcagaagcaacgcttatcaggatctactgttagcaaagaaaaaggtgtggctcctctag

SEQ ID NO: 132086 - DNA, 1419 bp, synthetic construct
  misc_feature 1..1419: note = Description of Artificial Sequence: Synthetic coding sequence
  source 1..1419: mol_type = other DNA
atggcccagggttccggtgaccagagggccgtcggtgtggctgacccggaggagagcagccctaatatgattgtttattgcaagatagaagacatcatcactaagatgcaggatgataaaaccggcggagttcctattcggactgtaaaatcatttctaagcaaaatccccagcgtggttactggaactgacatcgtccagtggctgatgaaaaatctgtctattgaagatccagttgaggcaatacacttgggtagtctcattgctgcccagggatatatattccctatttccgaccacgttctgacaatgaaggacgatgggacattctatagatttcaagcaccatacttctggccttcaaactgctgggagccagaaaataccgattacgcgatttacttgtgcaagagaacaatgcagaacaaagcccggctggagcttgcagactatgaggctgagaatctggccagactccagagggctttcgcccgaaaatgggagttcatttttatgcaggctgaagcacaagtgaaaatagaccgcaaaaaagataaaacggaacgaaaaattctggactcgcaggaaagggccttctgggatgtacacagaccagtgcctggttgtgtgaacacaaccgaaatggatattagaaagtgtagaaggctcaagaacccccagaaagtcaaaaaatccgtgtacggggtgaccgaggagagccaggcgcaaagccctgtgcacgtgcttagccagccgatccggaaaactacgaaggaggacattcgcaaacagatcacattcctgaacgctcaaatcgaccgacattgtctcaagatgtcaaaagtggctgaatctctgatcgcttacacagagcaatatgtcgaatatgatcccctaatcacccctgccgaacccagtaacccatggattagcgatgacgtggctctctgggacattgagatgagcaaggagccaagccagcagcgggtgaaaagatgggggttctcctttgatgagatcctcaaggatcaggtagggagggaccaattcctgagattcctggagagcgagttctcatccgaaaacctccgcttctggctggccgtacaggacctaaaaaagcagccacttcaggacgtcgctaagcgagttgaagagatttggcaggagttcctcgctcccggggcaccatctgccattaacttagactcacattcatacgaaatcacgagccagaacgtaaaagacggcggtcgttatacctttgaggatgcccaggagcatatttataaactaatgaaatccgacagttacgctagattcctccggagcaacgcttatcaggatcttctcctggctaagaaaaaaggcaaaagcctggccgggaagcggctcaccggcttaatgcagagtagctag

SEQ ID NO: 132087 - DNA, 1443 bp, synthetic construct
  misc_feature 1..1443: note = Description of Artificial Sequence: Synthetic coding sequence
  source 1..1443: mol_type = other DNA
atggcgcagggttctggtgaccagcgtgcagtcggtgtcgccgaccccgaagagtcctcccccaacatgattgtgtattgcaagatcgaggatatcattactaaaatgcaggacgacaagaccgggggtgtcccaatcaggacagtcaagagcttcttgtccaagatcccgtcagtggttaccggaaccgacattgttcagtggttgatgaagaacctttctatcgaggaccccgtcgaagccatccatctgggctccctgatcgcagctcagggatacatcttccctatttccgaccacgtgctgacaatgaaggacgacggaacgttctataggtttcaagccccatatttctggccttccaactgttgggagcccgagaataccgactatgccatctatctgtgtaaacgaaccatgcagaacaaagctcggctggagttagctgattatgaggccgaaaatctggccaggctgcaacgcgcttttgcaaggaagtgggaattcatttttatgcaggcagaggcgcaggtgaagattgataggaagaaggataagactgagaggaaaattctagacagccaggaacgggcattttgggacgttcatcggcccgttccagggtgcgtcaatacaactgagatggatataagaaaatgccggcggctgaagaatccacaaaaggtgaaaaagtcagtgtacggcgttactgaagagagccaggctcagtctcctgtgcacgtcctctcacagccaattaggaagactacgaaggaggacattcgaaaacagattacatttttaaatgcccaaattgataggcattgcctaaagatgtcaaaggtggcagagtccctgatcgcctacactgagcagtatgtggagtatgatcccctcattacccctgccgaacccagtaacccctggatttccgatgatgtcgccctctgggacatcgaaatgtctaaagaaccgtcccagcagcgtgtgaaacgctggggcttctcattcgacgagatcctgaaagaccaggttgggagggaccagtttctacggtttctcgaatctgagtttagctctgaaaaccttcggttttggttagcagttcaggacttaaagaaacagcccctgcaggatgtggccaagcgggtcgaggagatctggcaggagtttctagcccccggcgccccaagtgcaatcaacctggattctcatagttatgaaattacgagccaaaatgtgaaagacggcgggagatacacgtttgaggatgcccaggagcacatatataagttaatgaagtctgactcttacgcacgttttcttcgcagcaatgcctaccaagatctcctgctcgcaaaaaaaaaaccagagagcgagcaggggaggcggacctccctggagaagtttactcgcagtgtgtgcctgcagctactcttctag

SEQ ID NO: 132088 - DNA, 1428 bp, synthetic construct
  misc_feature 1..1428: note = Description of Artificial Sequence: Synthetic coding sequence
  source 1..1428: mol_type = other DNA
atggcgcaaggatcaggcgatcagcgggccgtgggcgtggccgatcctgaagagtcttctcccaacatgatcgtgtactgcaagattgaggatatcattacgaaaatgcaggacgataagactggtggcgtgcccatacggacggttaagagcttcctgtcaaaaataccttctgtcgtaacagggaccgatatcgtccagtggctgatgaagaacctgagtatcgaagatccagtggaagcaatccatcttggctccctgattgccgctcaaggatatatcttccccatttctgatcacgtgttgacaatgaaagatgacggcactttctatcgcttccaggctccctacttttggcccagcaattgttgggagccagaaaatactgactatgcgatctacttatgtaagagaactatgcagaataaagccaggctggaactcgcagattacgaagcggaaaaccttgcccgtttgcagcgagcgttcgcccgtaaatgggagtttatttttatgcaggccgaggcccaggtcaagatcgaccgaaaaaaagacaagacagaaagaaagattttggattcacaagagcgagcgttttgggacgtgcatcgccccgtgccaggatgtgtcaacaccaccgaaatggacatcagaaagtgccggcggctcaaaaatcctcagaaagtgaagaagtctgtttacggcgtgacagaggagagccaggcacagagtccagtgcatgtgctctcccagcccattagaaagacgaccaaagaggacattcgcaagcagattacctttctgaacgctcaaattgacagacactgtctgaaaatgtctaaggtagcagagagcctcatcgcctacactgagcagtatgtcgagtatgacccacttattactccagccgagccatctaatccttggatcagcgacgacgtagctctgtgggatatcgagatgtctaaggaaccgagccagcagagagtcaagagatggggcttctcgttcgacgagatactcaaagaccaggtcggccgcgatcaattccttcgcttcctggaatccgagttttccagcgagaacctgcgtttttggctcgctgtgcaggacctaaagaagcagccactgcaggatgtggctaaacgtgtcgaagaaatttggcaggagttcctggctcccggtgcaccgagcgctatcaatctcgattctcacagctatgaaatcacttctcagaacgtgaaggatggcggaagatacaccttcgaggacgcccaggagcatatttataagctaatgaagtcagattcctatgcccgtttcctacgatccaacgcctatcaagatctgctcctggccaaaaaaaagccagaaagtgagcagggaaggaggacatccctcgagaagttcactcgttccgtcggatag

SEQ ID NO: 132089 - DNA, 1434 bp, synthetic construct
  misc_feature 1..1434: note = Description of Artificial Sequence: Synthetic coding sequence
  source 1..1434: mol_type = other DNA
atggcccagggtagtggagaccagagggcagtgggtgtggctgatccggaagagagtagcccaaatatgatcgtatattgcaagattgaggacatcattactaaaatgcaagatgataaaaccggaggagtcccaatcaggacggtcaagtcattcctgagtaagataccgagtgtcgtcacgggcacagatatcgtgcagtggttaatgaagaatctgtccatagaggatcctgtcgaggctatccacttggggtcactgattgccgcgcaggggtacatttttcctatcagtgaccacgttcttaccatgaaagatgacggcaccttttataggttccaagccccatacttctggcctagcaactgctgggagccggaaaatactgattacgctatttatctatgcaaacgcaccatgcaaaataaagcgagacttgagctcgctgattacgaagcagaaaacctcgcccgtttgcagcgtgccttcgctcgtaaatgggaattcatctttatgcaggcagaggctcaggtgaaaatcgaccggaaaaaggataagactgaacgtaagatactagactcccaggaacgagctttttgggatgtccataggcctgtgcctgggtgcgtgaatacgaccgaaatggacatccgtaagtgtagacgactgaagaacccacagaaagtgaaaaagtcggtgtacggagtaactgaagaaagtcaggcccagagccctgtccatgtgctctcacagcctattaggaagactaccaaggaagacattcgcaagcagattactttcctaaacgcccagatcgaccgccactgtctcaagatgtctaaggtcgctgaaagccttatcgcttataccgaacagtacgtggagtatgacccactcatcacccctgctgaaccatctaatccgtggatttccgatgacgtcgccttatgggacattgagatgagcaaggaaccaagccagcagcgcgtaaagcgttggggattctccttcgatgagatcctgaaagatcaggtaggaagggaccaatttctgaggtttctcgagtcggaatttagttctgaaaatctgcgcttctggttggccgtgcaggacctgaagaaacagcctctgcaggatgtggcaaaacgcgttgaggagatttggcaagagttcctggctccaggggccccttctgctattaacctggacagccattcatacgaaatcaccagtcagaacgttaaggatgggggccggtacaccttcgaagatgcacaagagcatatttataaacttatgaagagtgacagttacgctaggtttctgcgaagcaatgcgtatcaggatctccttctggctaagaagaaacctgaaagcgaacagggccgacggacgtcactcgaaaagtttacgaggtccgtcctgctgttttag

SEQ ID NO: 132090 - DNA, 1620 bp, synthetic construct
  misc_feature 1..1620: note = Description of Artificial Sequence: Synthetic coding sequence
  source 1..1620: mol_type = other DNA
atgaagaacctctccatcgaagatcccgtcgaggccatacatctgggcagcttaatcgccgcccagggatacatttttcccatttccgatcatgtcttgacgatgaaagatgacggaactttctatcgcttccaagcgccatatttctggccatctaactgctgggaaccggagaacactgattatgccatatatctgtgcaagcgaacaatgcagaataaggccaggctggagctggccgactatgaggccgagaacctcgcaaggctgcaaagagcattcgccaggaagtgggagtttatctttatgcaggcggaagcccaggtcaagattgatcggaaaaaggacaagaccgagaggaaaatccttgactctcaggaacgagccttctgggacgttcacagacctgtgccgggatgcgtcaatacgacagagatggacatccgaaagtgtcggcggttgaagaatccccagaaagtcaaaaaatcagtgtacggggtgactgaagagtcccaggcacagtcacctgtgcacgtgctgtctcaacccatccgaaaaacaacaaaagaggacatccggaagcagataactttcctgaacgcccagattgaccgacactgcctgaaaatgtcaaaggtggccgaatccttgattgcttacaccgagcaatacgtggaatacgatcccctaataacacctgccgagccatccaatccttggataagcgatgatgtggcgctttgggacattgaaatgtctaaggagccttcccaacagagggttaaaaggtggggcttcagcttcgatgagatcctgaaggaccaggtgggaagggatcagttcctcaggttcctggaatccgagttttcatctgaaaacctccggttttggctcgctgttcaggacctgaaaaaacagccacttcaagacgtggccaaaagggtcgaagaaatctggcaggaattcctggctccaggcgccccctctgccattaatctggacagccatagctacgaaatcactagtcagaacgtgaaagacgggggaaggtacacctttgaggacgcccaagaacatatctacaagttgatgaagtccgattcctatgcacgttttctgcggtcaaacgcctaccaagatctgcttctcgctaaaaagaagcctgagtccgagcaggggaggcgtacctccctcgaaaagttcacccgctccgtcaacgtccagaacacacggcccgctggcgcttggagcatattcatggccgctctgccgatggccgtgtggctacgtactcctcggtcttgtcacgggttaagcgagtcaagactcttggggttaccaagcctgcacgacggcctgcgggaagggcagtctctgcctcagagctgtccaggttcttctagcaccgctgctgagggtgctcgggaacgcgcctccaatggccgaagcctcgcccgaagacagcattgccagtgccatggacagggcgaggagacgcaactgtgcctgtggtcgcggttggaatcaagtaagcgtagtcagcgcgcatcatccctgcgaacaagtaaggcaaagaaaaaacgtcagactgtgaagcaaggtccaaaggcttggccgtag

SEQ ID NO: 132091 - DNA, 1299 bp, synthetic construct
  misc_feature 1..1299: note = Description of Artificial Sequence: Synthetic coding sequence
  source 1..1299: mol_type = other DNA
atcgaagatatcatcacaaaaatgcaggacgacaagaccggtggtgtgcctatacggaccgtgaaatcctttttgtcaaagataccttctgtggtcactgggaccgatatcgtccagtggctaatgaagaacctgagcattgaagaccccgtggaagccatacacctgggcagtctgattgctgcacaggggtatatcttcccaatctccgatcacgtccttacaatgaaagacgacggcacattttataggtttcaggctccttacttctggccctccaattgttgggaacccgaaaacacagattacgccatttacctgtgtaaacgaactatgcagaataaggctcgactcgaattagccgactacgaagcagaaaacctagctcgcctgcagcgcgctttcgcaaggaagtgggagttcatctttatgcaagccgaggcccaggtgaaaatcgaccggaaaaaagacaagaccgaaaggaagattctcgattctcaggagcgggcattctgggacgtacatcgacctgtccccggctgtgtaaacacgaccgagatggacatccggaagtgccgtagattaaaaaatccacaaaaggtgaaaaaaagtgtctatggagtgaccgaagaatcacaggcccaaagtcctgtgcacgtcctgtcccaaccaattcgcaagactacaaaagaggacatcagaaagcagattaccttcctgaatgcccagattgaccgccactgcctgaaaatgagcaaggttgcagaaagcctcatcgcatatacagaacagtatgttgagtatgaccccctgatcactcctgcggaacctagtaatccgtggattagcgacgatgtggcactgtgggatattgagatgtccaaggaaccatcccagcaaagggttaaaagatgggggttctctttcgacgaaatcctgaaggatcaggttggccgcgaccagttcctgcgattcctagaatcagagttctcttcagaaaatctgcggttctggctggcagtccaagacctcaagaagcaacccctacaggatgtggctaagcgagtggaagaaatttggcaggagttcttggcccctggtgcgcctagtgccattaacctggacagtcattcttatgaaatcacctctcagaacgttaaagacggaggtcgctatacatttgaggacgcacaagaacatatttataagctgatgaagagtgactcctatgctcgttttttgcggtccaatgcttaccaagatctgctgctggcaaaaaagaaagtctggctcctgtag

SEQ ID NO: 132092 - DNA, 1041 bp, synthetic construct
  misc_feature 1..1041: note = Description of Artificial Sequence: Synthetic coding sequence
  source 1..1041: mol_type = other DNA
atgcagaacaaggcccgcctggagttggccgactatgaagcagagaacctggccagactgcagagagccttcgctcgcaagtgggagtttatattcatgcaagccgaggctcaggtgaagattgaccggaagaaagacaaaactgaacggaaaatactggacagtcaggaacgcgccttttgggatgtgcatcgtcctgttcccgggtgcgttaatactacagagatggatatacggaagtgccgcaggctgaaaaatccacaaaaggtgaagaagagcgtatacggagtgactgaagaaagccaggcgcagtctcccgtccacgtgctgagccaacccatcaggaagactacgaaagaggacattcggaagcagatcacctttcttaatgctcaaattgataggcattgccttaaaatgagcaaggttgctgagtcattgatcgcatatactgaacagtacgtggaatacgaccctttaattaccccagccgagccaagtaacccatggatttcagatgatgtcgcactttgggatattgagatgagtaaggagccatcccagcaaagggtgaagcgctggggctttagcttcgacgagatcctgaaggatcaagtcgggcgtgatcaatttctgcgctttctagagtcagaattctcgtcagagaatttacgtttctggctggccgtccaggacctgaaaaaacagccgcttcaagatgtagccaagcgcgtggaggagatctggcaagaatttttagcccctggcgcaccctctgccatcaacctggacagccattcatacgagatcactagccagaacgtgaaagacgggggcaggtacactttcgaagatgcacaggagcacatttataagttgatgaagtcagatagttacgcacggtttctgcgatctaacgcctatcaagatctcctgcttgccaaaaagaagcctgagtctgaacaaggcaggcggacctccctggaaaagttcactagaagcgtgctatggctgctgttccccctgggaaagagaccatag

SEQ ID NO: 132093 - DNA, 1473 bp, synthetic construct
  misc_feature 1..1473: note = Description of Artificial Sequence: Synthetic coding sequence
  source 1..1473: mol_type = other DNA
atggcgcagggttccggtgatcagagagctgtaggcgtcgccgatcctgaggagagcagtccaaacatgatcgtctattgtaaaatcgaagatattatcactaagatgcaggatgacaagactgggggagtaccaatcagaaccgttaaatcatttctgtccaaaattccatcggtagtgacaggcacagatatcgtgcagtggcttatgaagaacctgagcattgaagatccagtggaagccatccatttaggctctctcattgccgcccaaggatacatatttccaatttccgatcatgtattgaccatgaaagacgacggcaccttttaccggttccaagctccttatttttggcctagcaactgctgggagcctgaaaacacggactacgcaatttacctctgcaagcggactatgcagaataaggcaaggctggaactggccgactacgaggcggaaaatctggcacgcctccagcgtgcgtttgcccgaaaatgggagtttattttcatgcaggccgaggcacaggtaaaaatcgaccgcaaaaaggacaagactgagcgtaagatcctagatagccaggagcgggctttctgggacgtccaccgcccagtccctggttgtgtaaacaccactgagatggacatccgcaagtgtcgaaggctgaagaaccctcaaaaagttaagaagtctgtatatggggtcaccgaggaaagccaagctcagtctccagtccatgtccttagccaacctatcagaaagactactaaggaggatatacggaaacagattacatttctgaacgctcagattgaccgtcattgtctgaagatgagcaaggtggccgaatcgctgattgcgtacactgagcagtacgttgagtacgaccctctcatcacacccgccgagccatccaacccatggatctctgacgacgttgcactgtgggacattgaaatgtccaaggaaccatctcagcagagggttaagcgatgggggttcagcttcgatgaaattttaaaggaccaggtgggaagggatcagttccttcgattcctggaaagcgaattcagctccgaaaatctgaggttctggcttgccgtgcaggacctgaaaaagcagccactgcaggatgtggcgaagcgtgtcgaagagatctggcaggagttcctcgcccctggggccccgtccgctatcaacctcgattcgcatagctacgaaatcaccagccaaaacgtcaaggacggcggtcgctatacctttgaggacgcccaagaacacatctacaaattgatgaaatcagactcttacgcccggttcctcagatctaacgcctatcaggacctgctgctggctaaaaaaaagcctgagtcggagcagggaagacgtacgtcattggaaaaattcacaaggtcggttggaaaatctcttgcagggaagcggctaactggcttaatgcagtcgagctag

SEQ ID NO: 132094 - DNA, 1419 bp, synthetic construct
  misc_feature 1..1419: note = Description of Artificial Sequence: Synthetic coding sequence
  source 1..1419: mol_type = other DNA
atggcccagggttctggggatcagcgggcagtcggcgtcgcagacccagaggagagctctcccaatatgatcgtctattgcaaaattgaagacataatcacaaaaatgcaagacgataaaaccggcggggtgccaatacgcacagtgaaatccttcctgtctaagattccgagcgtggtgacgggaacagatattgtgcagtggctaatgaaaaatttatctatagaagaccctgttgaggccatacaccttggcagtctgatcgcggcccagggatacattttcccaatctcagaccacgtcctgacaatgaaagatgacggaactttttaccggtttcaagctccatatttttggccatctaactgttgggagccagaaaacaccgactatgctatttacttgtgcaagcgcactatgcagaacaaagccagactcgagctagctgattacgaagctgagaatctagcgcgactgcagcgggcatttgcccgcaaatgggagttcatctttatgcaggcagaggctcaggttaagattgaccgcaagaaggataagacggagcgaaaaatcctggacagtcaagagagggcattttgggacgttcacaggcctgtgccgggttgcgttaatactacagagatggacattagaaagtgcaggagactgaagaatccccagaaggtgaagaagtccgtgtatggagtcactgaagaaagtcaggcacagagtccagtacacgtcctatcccaacctattcggaaaaccaccaaagaggacattaggaagcagattacatttctgaatgcacagatcgaccggcactgtctaaaaatgagtaaggtggctgaatctctgatcgcctacaccgagcaatatgtagagtatgaccctcttattacacctgccgagccctccaacccttggattagcgacgacgtggcactctgggacatcgagatgagcaaagagccttcccaacaaagagtgaagaggtgggggttctcattcgacgagatcctgaaggaccaggtggggagagaccagttcctgagattcctggagtccgagttttcttccgagaacctccgcttttggctggccgttcaggatttaaaaaagcagcctctgcaagatgttgccaaaagggtcgaggaaatctggcaggagttcctggcccctggcgccccatccgctattaacttggattcacactcttacgagatcacctctcagaacgtgaaggacggagggcggtataccttcgaggatgcccaggagcatatctataagctcatgaaatctgattcttacgcccgcttcctgaggtccaatgcataccaggatttgcttctggccaagaaaaagggcaagagcttagctggaaaacggttaactggattgatgcaatccagctag

SEQ ID NO: 132095 - DNA, 1041 bp, synthetic construct
  misc_feature 1..1041: note = Description of Artificial Sequence: Synthetic coding sequence
  source 1..1041: mol_type = other DNA
atgcagaacaaagctagactggaattggctgattacgaggcagaaaatttggcccgcctacaaagagctttcgctcgaaaatgggagttcatcttcatgcaagctgaggcccaagttaagattgaccgtaagaaagacaaaactgaaagaaaaatcttggactcccaggaacgcgcattttgggatgtccataggccagtccccggttgcgtgaacactaccgagatggatatcaggaagtgccgaaggctcaagaatccccagaaagtcaagaagtcagtttacggagtgacagaggagtcacaggcacagtcccccgtccacgtgctcagtcagcctatccggaagacaaccaaggaagatatacgtaagcagataaccttcctgaatgcccagatcgaccggcactgtttgaagatgagcaaggtcgctgagtctttgattgcctacactgaacagtacgtagagtacgatcccttaattacccctgccgagccttcgaatccttggattagtgacgatgttgctctttgggacatcgagatgagcaaagagccttctcagcagcgagtcaagaggtggggcttctcattcgacgagattctgaaagaccaggtcggaagggaccagtttctgagattcttggagagcgagttttcttccgaaaatctgaggttttggctcgccgtccaggacctgaagaaacaacccctccaggacgtcgctaaacgcgtggaggagatatggcaggagttcctggcgcctggtgctccctctgccatcaatctcgactctcattcatatgaaataacatcacagaacgtgaaggatgggggccggtatacattcgaggacgcccaagaacacatttacaagctgatgaaatccgacagttacgcacgcttcctccgctcaaatgcctaccaggatttgctgctcgctaagaagaaaccagagtctgagcagggacggagaacaagtctagagaaatttactcgctccgtcctctactccaacacccctctcgcaaaaagaccttag

SEQ ID NO: 132096 - DNA, 1419 bp, synthetic construct
  misc_feature 1..1419: note = Description of Artificial Sequence: Synthetic coding sequence
  source 1..1419: mol_type = other DNA
atggcccaggggagcggcgaccaacgcgcagtcggtgtggcagacccagaggagtcctctcctaacatgatcgtttactgcaaaattgaggatataataacaaaaatgcaggatgacaaaaccgggggcgttccaatccgcactgtgaaatcgttcctctccaaaattccctccgtggtgactggaaccgacatcgtgcagtggctgatgaaaaacctctctatagaagatcccgtggaggccattcacttaggcagtttaattgctgcccaaggatacatcttcccaatctcagaccatgtgctcacaatgaaggacgacggaaccttctatcgctttcaagcgccatatttttggccatctaactgttgggagcctgagaatacagactacgccatctacttgtgtaagagaactatgcaaaacaaagccaggttagaactcgcagactatgaagcagagaatctcgcaagattgcagagggctttcgcaaggaagtgggagttcatattcatgcaggcagaagcccaagtgaaaatcgataggaagaaggataaaaccgagcgcaagattctcgactcgcaggaaagagcattctgggacgtacatagacctgtaccagggtgcgtgaacacaacagaaatggacatacgaaagtgcagaaggctgaagaacccgcagaaagtgaagaaatccgtgtatggcgtgaccgaggagtctcaggctcagagccctgtccacgtgctcagccagcctataagaaagactacgaaggaggatattcggaaacaaattacattcctcaatgctcagattgaccgacactgcctgaaaatgtcaaaagtcgctgaaagtctcatcgcatacacagaacagtatgtggagtacgatcccctcatcacccctgccgaaccctccaacccctggatttccgacgatgtggcgctatgggacattgagatgagcaaggagccatctcagcaacgcgtgaagcgctggggcttctcctttgatgaaatcttgaaggatcaagtcggaagggaccagttcttgcggttcctagagtctgagttcagttccgagaacttaaggttttggttggcggtgcaggatctgaaaaaacaaccccttcaggatgtggccaaaagagtcgaggagatatggcaagaattcctggcccctggagcccctagcgccatcaacctcgattctcactcctacgaaattactagtcagaatgtgaaagacggggggcgatacacctttgaagacgcgcaagagcacatctacaagctgatgaagtcagattcctatgccaggtttctcaggtcgaacgcctatcaggatttgctactcgcaaagaaaaaggggaagtctctggctggcaaacgcttgaccggcctaatgcagtcaagctag

SEQ ID NO: 132097 - DNA, 1473 bp, synthetic construct
  misc_feature 1..1473: note = Description of Artificial Sequence: Synthetic coding sequence
  source 1..1473: mol_type = other DNA
atggcccagggctcgggagaccagcgcgccgtcggagtggctgatccagaagagagtagccctaacatgatcgtttattgtaagatcgaggacatcattacaaagatgcaggatgacaagaccgggggtgtgcccattcgcaccgtgaagtcttttcttagcaaaataccctcggtggtgactggaacggacatcgtacagtggctgatgaagaacttatctatcgaggaccctgtggaagccatacatctgggctccttgatagcagcacagggatacatcttcccaatctcagatcatgtgctcaccatgaaagacgacggcaccttttatcggttccaggccccttacttttggcccagcaactgttgggagccagagaatactgattatgccatttacttgtgcaaacgcacaatgcaaaacaaggctcgcctggagctggccgactatgaggctgagaatctggcccgcctgcaaagagcctttgcccgtaagtgggaattcattttcatgcaggcagaggcgcaagtcaagattgaccgaaagaaagacaagaccgaaagaaagatcctggatagccaagagagggccttctgggacgtgcacaggcccgtccctgggtgtgtgaacactactgagatggacatccggaaatgcaggcgactcaagaacccccagaaggtgaagaagtctgtttatggcgtgacagaagagtcccaggcacagagtcctgtgcacgtgttgtcacagcccattcgcaagacaaccaaagaagacattaggaagcagatcacatttctgaacgcccagattgacaggcactgtcttaaaatgtcgaaagttgcagagtcgctcattgcctatactgagcagtatgtcgaatatgatcctctcatcacacctgctgaaccctctaacccttggatttctgatgatgtggctctttgggacattgaaatgtcaaaggagcctagccagcagcgagtaaaaaggtggggcttctcctttgacgagatcctcaaagaccaggtgggcagggatcagttcctccggttcctcgagtcggaattctcctcggagaacctgcgcttctggctggcggtacaggatctgaaaaagcagcccctgcaggatgttgccaagcgcgtggaagagatctggcaagagttcctcgcaccaggtgccccatccgctattaatctcgactctcactcctatgaaatcacaagccagaacgtgaaagacgggggccgctatacttttgaggatgcacaggagcacatttacaagctcatgaagtccgattcgtacgcgagattcttgcgctctaacgcttaccaggacctgttgctcgcgaagaagaaacctgaatcagaacagggaaggagaactagcctcgagaagttcacgcgatccgtgggtaaatcactcgccggaaaacgtctgaccggattgatgcagtctagttag

SEQ ID NO: 132098 - DNA, 1398 bp, synthetic construct
  misc_feature 1..1398: note = Description of Artificial Sequence: Synthetic coding sequence
  source 1..1398: mol_type = other DNA
atggctcaggggtcaggagaccagcgggcggtgggggtggctgacccggaggagtcaagcccgaacatgatagtgtactgcaagatagaagatataatcactaagatgcaagatgacaaaacaggcggtgtgcccattcgcaccgttaagtccttcctctcaaagattccatctgtcgtcacaggaaccgacatcgtgcagtggctaatgaaaaatctgagcattgaagatcctgtggaagcgatccacctgggcagcttgatcgccgcccagggctacatttttcccataagcgaccacgtgcttaccatgaaagacgatgggacattctatcgcttccaagcgccctacttctggccctcaaactgctgggaacctgagaacaccgactatgccatatacctgtgtaagcgtaccatgcaaaataaggcgagactcgaactcgcagactacgaggctgagaacttggcgcgactgcagagagcattcgcccgcaagtgggagttcatctttatgcaggctgaggctcaggtcaagatcgacagaaaaaaagacaagaccgagaggaaaatactagactcccaggaaagggcgttttgggatgtccaccgcccagtgcccggctgcgtgaatactaccgagatggacataagaaaatgtcggcggctgaagaatccccagaaggttaagaagagtgtgtacggtgttactgaggagagccaggcccaatctcccgtccatgtgctttcacagcccatccgaaaaactaccaaagaagatatacggaagcaaatcacttttcttaacgcccaaatcgatcgacactgcctgaaaatgtcaaaggtcgctgaaagcctgatcgcatacaccgagcagtatgtggaatacgatcctttgatcaccccagccgaaccaagtaatccatggatttccgatgatgtggcactgtgggatatcgagatgagtaaggagccctcgcagcagagagtcaagcgttgggggtttagctttgacgaaatcctgaaagatcaggtggggcgcgatcagttcctcaggttcctcgaaagcgaatttagctctgagaacctgaggttttggttggctgtacaggatctgaaaaagcaaccactccaggacgtggccaagcgcgtggaggagatctggcaagagttcttagcacccggggcaccttctgctattaaccttgattcacacagttacgaaattacgtcccaaaacgttaaagacggcggtcggtacacattcgaagacgcacaagagcatatatacaagctgatgaagtcagattcatatgctcgattcttacggtcaaacgcataccaggaccttctgctggctaaaaagaaaaaagtgagcaaggttgtggagctgccttag

SEQ ID NO: 132099 - DNA, 1356 bp, synthetic construct
  misc_feature 1..1356: note = Description of Artificial Sequence: Synthetic coding sequence
  source 1..1356: mol_type = other DNA
atggaagatgtgatagccagaatgcaggatgagaagaacggaattcctatcagaactgtgaagagcttcctatccaagatccctagtgtgttctcaggaagtgacatcgtgcagtggctaattaaaaatctcaccatcgaagaccccgtggaggcgttacacctgggtaccctaatggccgcgcacggctacttctttcctattagcgaccacgttctgacactgaaggacgatggaactttctacaggtttcaaaccccctatttctggccttctaactgttgggagcctgaaaatacggactacgcagtctacttatgcaagagaacaatgcagaacaaagcaagactcgagctcgccgactatgaggccgagtccttggcccggctgcagagagccttcgcccgtaagtgggagttcatctttatgcaggcagaggcccaagccaaggtggacaagaagagggacaagattgagcggaaaatccttgactcacaggaaagggcattctgggacgtgcataggcccgtgcccggatgtgtcaacaccaccgaggttgatatcaaaaaaagctcaaggatgcggaacccccataagaccagaaaaagcgtttacggtcttcagaatgacattcgaagccatagcccgacccacacaccgacaccggagaccaaaccacctacagaagacgaactccaacaacagattaaatactggcagatccagctggaccgccataggctcaaaatgtccaaagtggcggatagcttgctgagttacaccgaacagtacctcgagtacgatccatttctgcttccccccgaccccagtaatccatggctgtccgatgacacaacattctgggaactggaagcatccaaggagccgtctcaacagagagttaagaggtgggggttcggtatggacgaagccctgaaggatcctgtcggacgggaacagtttctaaaatttctcgagtcagagttctctagcgagaatctgagattctggttggcagttgaggaccttaaaaagcgtcctatcaaggaggtgccctcccgcgtgcaggagatctggcaggaattcctggcccccggagcccctagcgctatcaacctggattcgaagagctatgacaagaccacccagaacgtaaaagagccgggcagatacactttcgaagacgctcaagagcatatctacaagttaatgaaaagcgacagttatcctcggttcattagatcctccgcatatcaggagctcttacaggcaaagaagaaggggagaaacatccccatcttcccttgccacaagaactgcacaccaacgctgcgtgccagtactaatttactgtag

SEQ ID NO: 132100 - DNA, 1275 bp, synthetic construct
  misc_feature 1..1275: note = Description of Artificial Sequence: Synthetic coding sequence
  source 1..1275: mol_type = other DNA
atggcacagggtaacaactacggccaaacctcgaacggggttgctgatgagtctcctaatatgctcgtttaccgaaagatggaggatgtgatcgctcgcatgcaggatgagaagaacggcattccaattagaaccgtgaaaagcttcttatcgaaaataccttcagtcttcagcggtagcgacatcgtacagtggctgatcaagaacttaactatcgaggaccctgcagtgtacctctgtaagagaacaatgcagaacaaagcgaggctggagctggcagattatgaagccgagtctttggccaggctccagagggctttcgctcgaaaatgggaatttatcttcatgcaggcggaagcccaggcaaaggtggacaagaagagggacaaaattgagaggaagattctcgactcccaggagcgcgcattctgggacgttcaccgcccagtgcccggctgtgtaaatactaccgaggttgacataaaaaagtcttctcgtatgcggaatcctcacaagacccgcaaatctgtctacggcctgcagaacgacatccgcagccatagtcccactcatactcctactccagagactaagccccccacggaggatgaactacagcaacaaataaagtattggcagatccagctggatcgccaccgcctgaagatgtcaaaggtagctgacagtttactcagctacacagaacagtatctagagtatgacccatttcttctccctccagatccatccaacccttggttgtccgatgacacgaccttttgggaactggaagcaagtaaagagccgtcacaacagagagtgaagcgatgggggttcggcatggacgaggcactgaaagacccagtggggcgggagcagttcctcaaatttttagagtccgagtttagtagcgagaacctgaggttctggcttgcagtggaggaccttaaaaagcgcccaataaaggaggttccatcacgggtgcaggagatctggcaagagttcctggctccgggcgctccatcagctatcaaccttgactccaaaagttatgataagacaacgcagaatgtcaaagaaccgggacggtatacctttgaggacgcacaggagcacatctataaactgatgaaatcagattcttatccccgatttatcaggagtagtgcgtatcaagagttgctccaggctaagaaaaaagggagaaatattcctattttcccttgccataagaattgcactccaaccctgcgcgcttcaactaaccttctctag

SEQ ID NO: 132101 - DNA, 1410 bp, synthetic construct
  misc_feature 1..1410: note = Description of Artificial Sequence: Synthetic coding sequence
  source 1..1410: mol_type = other DNA
atggcccaggggaataactatggccaaacctccaatggggtggctgatgagtcccccaacatgcttgtgtatagaaagatggaggatgtaatcgcaagaatgcaggacgaaaagaatgggattcctattcgaacagtcaagagctttttgtcaaagatcccctctgtcttctcgggctccgacatcgtgcagtggctgatcaagaatctgaccattgaggatcccgtggaagctttgcacttggggaccttaatggccgcgcatggctattttttccccatctctgatcacgtcttaactctcaaggacgacgggacattctatcgttttcagaccccttacttctggccctcgaactgttgggaacctgaaaatactgattatgcagtctatctgtgcaagagaacaatgcagaataaagcgcggttggagctcgccgactatgaggctgagtcactggctaggctgcaaagggcttttgccagaaagtgggaatttatcttcatgcaggcggaggcccaggcaaaggtcgacaaaaaaagggacaaaattgagcggaagatcttggactcccaggaacgagctttctgggacgtgcaccgcccggttcccggatgcgtaaatacaactgaagtggatatcaaaaagagcagcagaatgagaaatccacataaaactaggaaaagcgtatacggactccagaacgacatcagaagccacagccccactcatacacccaccccagaaacaaagccgccaaccgaggatgagttgcaacagcagattaagtattggcagatacaactagatagacacagactgaagatgagcaaggtggcagatagcctcctgagttacaccgagcagtaccttgaatacgaccccttcttacttccgccagaccctagcaacccctggttgagtgacgatactacgttttgggagctggaagcatctaaggagccctcccagcagcgggtaaaaaggtggggatttggaatggacgaggccctgaaagatcctgtgggcagagagcagttcctgaaattcctagagagcgaattttcctctgagaatctccggttttggctcgccgtggaggatctgaagaagcgacctattaaggaggtgcctagcagagtacaggaaatttggcaggaattcctagctcctggcgccccttccgcaatcaacttagattccaagagctatgacaaaactactcagaatgtgaaagaacccgggcgctatactttcgaggacgcccaggaacatatctataaacttatgaaaagcgattcttatccaagatttattcggtcgtcggcctatcaagaattgttgcaggcgaaaaagaagggcaagagtctcacctccaaaaggctgacctcccttgcccagagctactag

SEQ ID NO: 132102 - DNA, 1434 bp, synthetic construct
  misc_feature 1..1434: note = Description of Artificial Sequence: Synthetic coding sequence
  source 1..1434: mol_type = other DNA
atggcgcagggaaacaactacgggcagactagcaatggcgtcgcggatgagtcgccaaatatgttggtgtacagaaaaatggaagatgtgattgctaggatgcaggacgaaaagaatgggatccccattcgcaccgtaaagtcatttctctccaagattccctccgtgttctcaggcagcgacattgttcagtggctgatcaaaaatcttacgatcgaggaccccgttgaggccctgcacctgggcacactgatggcggcccacgggtatttctttccaatttcggaccatgtcctgaccttgaaagatgatgggacgttttatcggtttcagaccccttacttttggccgagcaattgttgggaacccgaaaacacggattacgctgtgtatctgtgtaagagaactatgcagaataaggctcggctcgaactcgccgactatgaggccgaatccctggcccgcctgcaaagagctttcgccagaaagtgggagtttatctttatgcaggcggaagcacaagctaaggtggacaaaaaaagagacaagatcgagaggaagatccttgattcccaggagagagccttctgggatgtccatcgccctgttcccggctgcgtgaacactaccgaagttgacattaaaaaatcttcaagaatgaggaatcctcataaaaccagaaaaagcgtttatggccttcaaaatgacattcggagccatagtcctacccataccccgactccggagacaaagccgccaaccgaggatgaactgcagcagcagatcaaatactggcagatccagctggacagacatagactgaaaatgtccaaggttgccgacagtctgttgagctatacggaacagtacctggaatacgaccccttcttgctgccacctgaccctagcaacccgtggctctcagatgatacaacattttgggagctcgaggcatccaaggagccatcacagcagcgggtgaagcgctggggctttggaatggatgaggcactgaaagaccccgtcggtcgcgagcagttcctaaaattcctggagagcgaattctcgtctgaaaacttacgcttttggctagctgtggaagacctgaagaaacgccctattaaagaagtcccaagcagagtgcaagagatctggcaggaattcctggcccctggcgctccctctgccataaaccttgacagcaagagttatgataaaacaacccagaatgtgaaggagccaggaagatatacatttgaagacgcccaagagcatatctacaaattaatgaaaagtgattcctaccctcggttcattcgcagttccgcgtatcaggaactcctgcaagcaaaaaagaaagggagaaacattcccatcttcccttgccataagaactgtactcccacactgcgggccagcaccaacctcctctag

SEQ ID NO: 132103 - DNA, 1410 bp, synthetic construct
  misc_feature 1..1410: note = Description of Artificial Sequence: Synthetic coding sequence
  source 1..1410: mol_type = other DNA
atggcccagggcaataactacgggcagaccagcaacggggtcgcggacgaatccccaaatatgctggtgtaccgaaagatggaagatgttattgctcggatgcaagacgaaaagaatggaattcccatccgaaccgtaaaaagtttccttagtaagatccccagtgtattttcgggctctgacatagttcagtggctaatcaagaatctcaccattgaggatcctgtggaggccctgcatctgggtacactgatggctgctcacggctacttctttccgatctctgatcatgtactgaccctgaaggacgatggaacattttaccgatttcagacaccctacttctggccctccaattgctgggagcctgaaaatacggactacgctgtgtatctatgtaaaaggaccatgcagaataaggcccggctcgagttggcagattacgaagctgaaagccttgctagactgcagcgtgcttttgcacgcaaatgggagttcatctttatgcaagctgaggcccaagctaaggtcgataaaaagagagataaaattgaaaggaaaatactggattctcaggaacgggccttttgggacgtacacaggccagtgccaggatgtgtgaatacaactgaagtggacattaaaaagagtagtcggatgcgcaaccctcacaagacgaggaagtcggtgtatggtctgcaaaatgatatcaggagccattctcctacacatactccaacaccagaaacaaagccacctactgaagacgaacttcagcaacaaatcaagtattggcagattcagttggatcgtcatagactaaaaatgtccaaggtggcagattcgctactcagctatactgagcagtacctggaatatgatccatttctattgcctccagatccgagtaacccttggctgtctgacgatacaaccttctgggaattggaagcaagtaaggaaccaagccagcagagagtaaagaggtggggcttcgggatggacgaggctttaaaggatcctgtgggaagagaacagtttcttaagtttttagaatctgaatttagctctgaaaatctgcgattttggttggctgtcgaagatctaaagaaacggccgataaaggaggttccctctagggtacaggagatatggcaggaatttcttgcccccggcgccccgtctgcaattaatctggacagcaaaagctatgacaagaccacccagaatgttaaggagcctggccgctacacatttgaggatgcgcaagagcacatctataaactgatgaaatccgatagctaccctaggttcattagaagcagcgcatatcaggaactactgcaagcaaagaaaaagggtaagtccctcacttctaagagacttacgtccttggcccagagctattag

SEQ ID NO: 132104 - DNA, 1464 bp, synthetic construct
  misc_feature 1..1464: note = Description of Artificial Sequence: Synthetic coding sequence
  source 1..1464: mol_type = other DNA
atggcccaggggaataactatgggcagaccagtaatggcgttgctgacgaatcccctaatatgctggtttaccgaaaaatggaagacgtcatcgcccgtatgcaagatgagaagaacggcatccctatccgcaccgtcaagagtttcctgtcaaaaataccttccgtgttcagcggtagtgatatcgtgcaatggctaattaaaaatcttacgattgaggatccagttgaggcactgcacttggggacattgatggctgcccatgggtattttttccctataagcgaccacgtgctgactctgaaagacgacggtactttttaccggtttcagacaccttatttctggcctagcaactgttgggaacccgagaatactgattatgcagtctacctgtgtaagcgcaccatgcagaacaaggcccggttggaactggccgactatgaagctgaatcactggcacgcttgcagagggccttcgctaggaagtgggaattcatctttatgcaggctgaagcacaggctaaagtcgataaaaagagagacaagattgagagaaaaattttggactctcaagagagagcattctgggatgtccaccgtcccgtccctgggtgcgtgaacacaaccgaagtcgatataaagaagagcagcagaatgcgaaacccacacaaaacacggaagtcagtgtacgggcttcagaatgatatacgatctcactcgccaactcacacgcccacacccgagaccaagcccccaactgaagatgagctgcaacagcagattaagtattggcaaattcagctagataggcatcggctgaaaatgagcaaagttgcggatagcctactgtcatacacggaacaatatcttgagtatgatccattcctgttacctcctgacccatccaacccctggctgtctgacgacactactttctgggagctggaagcatctaaggaaccttcacagcagcgagtgaagcgctggggatttgggatggatgaggcacttaaagatccagttggcagggaacagttcctgaaattccttgagtcagaattctctagtgaaaatctgcggttttggctggcagtagaggatctgaaaaagagacccataaaggaagtgccatccagggtgcaggaaatctggcaggagttcctggcccccggagccccaagtgccattaatctcgacagcaagtcctatgataaaacaactcagaacgtcaaagaaccgggcaggtacacctttgaggacgctcaagagcatatctataagcttatgaagagtgactcctacccgagattcatccgcagctccgcataccaagagctgctgcaagccaaaaaaaagagcggaaacagtatggacagacgcactagtttcgaaaaattcgcacagaacgtgggaaaatcacttactagtaagcgactgacaagtttggcccagtcctactag

SEQ ID NO: 132105 - DNA, 1275 bp, synthetic construct
  misc_feature 1..1275: note = Description of Artificial Sequence: Synthetic coding sequence
  source 1..1275: mol_type = other DNA
atggctcagggcaataattacggccagacatccaatggtgttgctgacgaatcccccaacatgttggtatatcggaagatggaggacgttattgcacggatgcaggacgaaaagaacggcatccctattaggacagtgaaatcatttttatctaagatcccatccgtgttctcaggtagcgatatagtgcagtggctgattaagaatctgactatcgaagatcccgccgtgtatctatgtaaacggacaatgcagaataaagccagactggaattagccgattacgaggctgagagcttagctcggcttcaacgggcctttgcaaggaaatgggagttcatctttatgcaggccgaagcccaggccaaggtagataaaaagagggataagattgaacggaaaatactcgacagtcaggaacgtgccttttgggacgtgcatagaccagtgcccgggtgcgttaacacaaccgaggttgatataaaaaagagtagccgaatgagaaacccccacaagacccggaagagtgtgtatggtctgcaaaacgatattcggagccattcccccacccacactccaactccagagactaaaccccccactgaggatgaacttcaacaacagattaagtattggcagatccagctggaccgtcacaggctgaagatgagcaaagttgccgacagtctgctgagttatacggagcagtacctggagtatgatccattcctcctccctccagatccctcaaatccgtggctgtccgatgacaccacattctgggagttggaggcaagcaaagagcctagccagcaacgagtaaagagatggggcttcggaatggacgaagccctcaaggatccggtggggcgcgagcaatttctgaaatttttggaaagcgaattctcaagcgagaatctacggttctggctggcagtggaggacctgaagaagaggcccatcaaggaggtcccctctagagtgcaggagatatggcaggagttcctggcgcccggcgccccctccgccattaatttggactcaaaaagctacgataagaccacccagaatgtgaaagagcctggtagatatacatttgaagacgcgcaggagcatatctacaagctaatgaagagtgatagctacccaaggttcatccgcagttctgcttatcaggagctactgcaagcaaagaaaaaggggcgaaacattccaattttcccttgccataagaactgtacccctaccctgagggcctccaccaacctgttgtag

SEQ ID NO: 132106 - DNA, 1488 bp, synthetic construct
  misc_feature 1..1488: note = Description of Artificial Sequence: Synthetic coding sequence
  source 1..1488: mol_type = other DNA
atggctcagggcaacaactacgggcagacaagcaacggagtcgcggatgagagcccgaatatgctggtttacagaaaaatggaggacgtcatcgccaggatgcaagatgagaagaacggaataccaatccgaactgtgaaaagctttttgtctaaaatcccatccgtgttcagcggatctgacattgtgcagtggctgatcaagaacctaaccatcgaggacccggttgaggccctgcatcttgggaccctcatggccgctcacggttactttttcccgatcagcgaccacgtcctaactctcaaggatgatggaactttttacagatttcagacaccgtatttttggccctccaactgttgggaacccgaaaacaccgattacgcagtatatctatgtaagcgcactatgcaaaacaaggctcgcctcgaactggctgactacgaggcggagtctctggcccgtttacagcgggccttcgccagaaagtgggagtttatttttatgcaggctgaagcgcaggctaaagtggataagaagagggataagattgaaaggaaaattttagactctcaggaaagagcattttgggatgtgcaccgacctgtgccgggctgcgttaataccactgaggtggacataaagaaatccagtagaatgcgcaacccgcacaagactcgcaagagcgtgtatggcctgcagaatgatattcgcagtcattctcccactcacacaccaacgccagagaccaaaccgcctactgaggatgagttgcagcaacagatcaaatattggcagatccagttggacaggcaccgcttgaagatgagtaaggtcgcggacagcttgctttcgtacacggagcagtatttagaatatgacccattcctgttgccacccgacccctcaaacccatggttatctgatgacaccaccttctgggaactggaggccagcaaggaaccttcgcagcagcgggtcaaaaggtggggttttggcatggacgaagccctgaaagaccccgtgggtcgcgagcagttcctcaagtttctagagtccgagttcagcagcgaaaacctgagattttggttagccgtggaagatttaaagaagcggccaatcaaggaggtgccttctagagtccaagaaatttggcaggagtttctagccccaggcgcgccctccgccatcaatctcgatagcaagtcttatgacaagacaactcagaacgtgaaagagcctggacgctacaccttcgaggatgcacaggagcacatctataaactgatgaagagcgactcctatccccgattcattcggtcgagcgcctaccaggagctgctccaggctaaaaaaaagagcgggaattcgatggacagacggacctccttcgagaaattcgcacagaacgttggccgcaacatcccgatcttcccctgccataaaaactgcacaccaacgctgcgagcctccacgaatctgctttag
